United States Patent Application Publication US 2017/0114356 A1 - sequence listing, part 65

SEQ ID NO: 89551 - DNA, 1168 bp, Zea Mays
gcttccttcctcaacgttccttctcccttcaccatcccactccacctaacaattgggagaagttttagcccagctaagcggctgtggatgggaggatcctaagagcaccctggaaatccaaaaccatctcgtctccgcagcgggagcccaggcttcgtatgacagcggccattgccgatggccactacgcgcgcctacaagcttcgtatcccgtgaattgctggtttggggattttgaatttgaacttgaagtcggattgctcttgactgctttgtttgaactggtgcagttaagttgggctgggttggggttgattcacccgcgatgatcgaattcgattccagggctttgcgattgagtgtagtgcagcgcaggagttgcgttcccaccaaggaacgtattcaggaccatccgaattgtcttgctacttgggttggtgggcatagaatgaaattttagtgctgcaaagtttcagacctgaaatattacagcttcctgcctcaaatcaacctaatctggtggtctggattaacttgagacaggagactactgttgttttccaggaatcgtgacttctgttctctgtagcttatcatttgcttggtaggttgtatcaattgctgttaatagggccacactgtagttagggagatctatacaagttgctcaatcctcaattacatacgtgtcgattcttttgtctgagaacttctacttcacgctaggtagtttgtttcatagagaatgtagctgctggtatcatggatagtgcagctgctggtatgaacttagtgctatgccgaaaattggtatcatttcgatcattgcaatgatgaacaagcatgctcaagtgctattgttgctgtctggttggaggtctttgttttgtaaatttaaccttcttttttactctggcatgtgtggttctttcggtaattgattgattaacatgtttgtgctatttaaacactctatttcctcttaatgaaaaacatgctatggcacggtcgcgaaaaaaatgaattatgaaagaatgaattaagaaagaaactctaaacatgctggtaaaatgaattgatatgtgcaattgagtaattgtactctggattttcagtcaatatttttcattgtggaaatgcgtgtctagatccttctggaaaaaatgaa

SEQ ID NO: 89552 - DNA, 376 bp, Zea Mays
gctctcaagatctatttctacacctcttctttctcctagagttagattgaacccaaatttcattgacagacagaagaatcaggcagctactgctgtaccattaccagaaccaatagtccgctttaaagcgaatctctcttcagatgctggaatgttgtctcgcaagtcacatgcatcagcagctcccatgtatagatcaaggtccaatagttctcggtatggtattatggaatcatcttccatacctgttctggccttgaggcatagctctagaaaggatgctggtcccgttcacagtgaagctgccacaggtgagttagcagatattgagcctcaaaatatagaaaaggaaggtttagttgccaatcatggcaaa

SEQ ID NO: 89553 - DNA, 775 bp, Zea Mays
ctattgatgctacatggagaatgttggattttgctgaactgtatcacattagatgtttgcgcttctctcttacgtcttaccaccagtcttcttgaaagcacatatgacaggcatatgagcattgccttgaggatgattctcagtttcgtgaagagctttggtcccacaatttcttcagccttgttggctataccacctgttggggtagaccttgaagcagagcagaggtgtttttttcttttcatctcactgaaattgtaatggattctccttcctgcctcatgcatacaacggacttgcttcacgagcgcgtatcttgctaggatggagtggtgcaatctatgtttccaagaactgaagaatgtgagcgtcagcctcaagtttctgacaaggcggcaaggcgaggttgggagattagctcaggagctcagcctttttcttcaggatctctttcaattgtcaagcgtgtaaacagtgaccataccacgacgtgcaaaatattcacgcactcaatttcctttggtcataacagatatagcgacatatagtaggatttacctctagaaagaaagaaatatacagaaactatagggtgaagcttacagggtattttctccgagctagtttgggagcatcatttttttcatagaattcctatttttctaaggtctcgtttgtttcctttcattttaaggaattagaatcttactaatataatatgctattttttttagaatatgacatttcactacttttcaaagttatcatataagct

SEQ ID NO: 89554 - DNA, 679 bp, Zea Mays
ctattgatgctacatggagaatgttggattttgctgaactgtatcacattagatgtttgcgcttctctcttacgtcttaccaccagtcttcttgaaagcacatatgacaggcatatgagcattgccttgaggatgattctcagtttcgtgaagagctttggtcccacaatttcttcagccttgttggctataccacctgttggggtagaccttgaagcagagcagaggatggagtggtgcaatctatgtttccaagaactgaagaatgtgagcgtcagcctcaagtttctgacaaggcggcaaggcgaggttgggagattagctcaggagctcagcctttttcttcaggatctctttcaattgtcaagcgtgtaaacagtgaccataccacgacgtgcaaaatattcacgcactcaatttcctttggtcataacagatatagcgacatatagtaggatttacctctagaaagaaagaaatatacagaaactatagggtgaagcttacagggtattttctccgagctagtttgggagcatcatttttttcatagaattcctatttttctaaggtctcgtttgtttcctttcattttaaggaattagaatcttactaatataatatgctattttttttagaatatgacatttcactacttttcaaagttatcatataagct

SEQ ID NO: 89555 - DNA, 504 bp, Zea Mays
atgcgctcccgtagtggcacatcagatcagcagcgactcagcggtcagtatcaccaaaaagcaaatcctgtgtggtccattaaaacaaatagtcaaatagatgtactagcattcaacacgagcggaacatgttcgaggtttgatagccgcataaaagaaaagggcttagcaagtccgtacgaggcggccgtagatggcgatggggaactcgcagcgggagcagatgtggacgcgctccccgagcgggcgacgggagcgacggccgatggcgcgcgtggcggcggcagcggaggtcgtgacggcgccgaggctcttcgcgacggggaggtccgcgatcacgaggtggtcggggcatgccacggtgaccgattccaggatgctgccaccgagcgccgcagccgccccaaccgcggcgggggcgccggcgccagctgccgtgctagcggcggcaccgccggagtccgacgagccaatcttgctcaggcggatctgcagcatcgctag

SEQ ID NO: 89556 - DNA, 1168 bp, Zea Mays
cgttgttcacgggtgatcggccggcaggctggcggcggcgtggaccacgtaaccgcggagcgagggcgtccgggcgggcagcggctgctggcgccgccggctccgcacccgccggcgcgcgacgtggcggcgcacccggggggtgacgtcctcggcggccttgatcatggcgaagaagagcaggcggtagacgacgaccatgcagagcagcacggccaggtcgagccacttggaccgccccgcgtccatctggaacacgttctccaggatgaactcgccggggatcttgctgggcagcacgtcgtcctgctggccgtcgaacagcaggcccttgaggtcgttctggtactggccccgcagcgcccagtagtggaagctgatgtaggacatggggtacctccagaagggcttggggatgtcgtgggggagcctgaagtagcccgacaccagcatgaatatcccctggatccccgcgccgacgatgatgcccatgaggaagttggggatgacgctcgcgatggccatcatcaggctctccaccacggtgacgctggcgtagaggtccagcacgaagaagaggtagtgcgtgaagcccgggtgcaggcgcaccatgaagtagcacagcgtgcccgacaccagggtgatcaggaccaggaacggcatcgccgacaccgtgttgctgatcacgaacgcgaccacgccgtagtgcccgttcagcctctccctctgaaacaccttcatgtcctccacgaacgacgggaaccccccgatcgacatgaacgtgacgaagccgaagatgaaggaagcgcatgccccccgggcctagatagagctgtagccggtgccgacattgaagtatatagtcccgatgcaaatcgtgacgacgacatagatgatgagcctcagccagtagtacccgaaatccctggacatattgacgaacgaccgcttcgtgagcgtggacgcctgcatcaggaagctagcctggctccctccagagtccagcacagtccctgagccgggccatctcgtctactttctgctgcgcgctgacgtagtgctgcgagtgctggtagtggctgaccagcctgctcatcgcctccgaggtcgtgatcttctccagcggatcgtcaatccggctcaccctcgtcttcatcgaccctttcag

SEQ ID NO: 89557 - DNA, 649 bp, Zea Mays
attccatgtttctgaccattgcaacacgggttgtttggggggggggggggggggggcatcccctacctccctagataataatacgtagcaactacaattcggaaacatcctataaattataattctctcagctacgcataacagagatacaggttgctgggtaacctagaagtagacataaccaggcaatctaataggattgtcgaaggagctgatgaaacctatttggttttgtgccactttatactgcatttacagtctagacctgaaaaagagcacatctctctccaatctgataatttgcccgagtcttcatgactgtacttaatcttcagattcctgaacccaacaagtggcaataggtgccgcatgcagcacccaaccacccttatgtgataaacgtcgcacaagtaggtgatagcctcttatttctcacctataatgcttttgtagttaaccatgtagatggcaaccagtgtgagaagcgcaccaccaatctgtactgttgagaaggtctcacccaggtacaggtacctgaacagcaaagaggtggcaaggagtcaagataacattgtgtgaatactgaaatcaggtagcagtaacacaacatcctcagaagaatcttacccgaaaacggatgcaaacatgg

SEQ ID NO: 89558 - DNA, 1483 bp, Zea Mays
ctcttcccttcccttccctccgacatgacgccgcatctgcccgccgtctcctcctcctcgaccaccaccacatcccgcgccgccgcggccgcccaccacctgctcgacgccgccgccgcgcccccgtcctcgccgcaccagtaccggaggcggaggcggcgccgggtgctggggtgcctccgcccgcgcgccgcgtccgtccgctgctgcgccgcggcggcgcgggcggcggaggccaccacgcgtgtcttcgtcgtctccgacctgcacacggactacccggagaacatggagtgggtgcgccgcctgcccgcccaggtcggggcgggcgaggggcgaggcgtcgacgcgctcgtcgtcgcgggcgacgtggccgagaccagggataacttcgcgcgcaccatggaggtcctcagggagcgcttcgccgccgtcttctacgttccagggaaccacgacctctggctgcgccgcgagggcggcctctatatggattcgctggagaaactgactgcattgcttgatgcatgtagtgagctgggtgtggatacaggcccaagaacgataggtgacttgggaatcataccattgttctcatggtaccacaagagttttgacaaggagaaggatgttaacagtgtgcgtgtcccttcgctagaaatggcttgtaaagactttcatgcttgccaatggccttcagacctgacaaatgatgatgaggctcttgctctttactttgacaagttgaatgacaagaatcatgatgctattgaagaagtgaaaagtagcagcaaacatatattaacgttttcacactttgtaccaaggcaagagttgtgtccggagaaacgaatgctttattacccatatcttcctaaggtcattggctctgattttttggagaggaggctgagagatatacacagcaacagagaagacagagcagcttgccatgtttttgggcacactcatttctgttgggattctgtggttgatgagatcaggtacgtgcaggctcctctggcataccctcgagaaagaaaacgccggatgaacggtgaaggctggctgccattttgtgtataccgtgacggtttcaacccagaaatttatccagcactgtggtcagattactacaacaagaacaaaagggaacccgagaacactcagctcgcgccttgggttgccagccattacgcaaagtaccacaagttccactgaccctttctgagttgccttggctttttgccgaattgatgcagatcgtcccttcaggatggtgttgaattagctgggaaaaggagatattgacgttttacctgtacatgatcttttcttgtttctacccttaccataacttttgggcaagtaagcgccagcctctgttcgttgtatgttgcagaaatctgaataatgtgtataagattcttcaaagcattgctgcagagatagcgaaatatagctgattctgttcatctaacaa

SEQ ID NO: 89559 - DNA, 539 bp, Zea Mays
accaccgtggcgtagtaggcgtacacgaggccgaacgtcatgacggcctccagcagcacggcgtgcccgtcgccgaccccggacgcgagcgcgaaccccggcgggcgcgcgccccccgtggcgagccgcagcaggagcgtcgcggcgacggcgcccagcagctgcgcggcccagtagaggaccgcgcggacgagggagacgcggccgccgacgagcgcgccgaaggtgacggccgggttcacgtgcccgcccgagacgttgacggccaccgccaccgccacggccagacccagcgcgtgcgccagcgccactgccaccagcccgcccgccgtgctgatcgtgctgtggtcgtgtacgtaccgagcgagaggacggatccctcggcggcgaagacgaagatggcggtggcgatgaactcggagatggcggcgcggatggtgtccgggtgcgtggcgtcctcgctccgtcccaccgtgaaccgccgccccgcccgcacgcccgtggccgtgctcatgtcgtccgccaaaaaccaagccaaa

SEQ ID NO: 89560 - DNA, 765 bp, Zea Mays
accaccgtggcgtagtaggcgtacacgaggccgaacgtcatgacggcctccagcagcacggcgtgcccgtcgccgaccccggacgcgagcgcgaaccccggcgggcgcgcgccccccgtggcgagccgcagcaggagcgtcgcggcgacggcgcccagcagctgcgcggcccagtagaggaccgcgcggacgagggagacgcggccgccgacgagcgcgccgaaggtgacggccgggttcacgtgcccgcccgagacgttgacggccaccgccaccgccacggccagacccagcgcgtgcgccagcgccactgccaccagcccgcccgccgtgctgatcgtgctgtggtcgtggtacatcttccctgcacgcaagcaaacaaatgacgaaccccgcgcgcatgcacatcgtcgtctccatctgcatatatgcatgcagtgtggtgcggtgcgagaggttggcgcggacggtgaagcatgcgtcagtacgtaccgagcgagaggacggatccctcggcggcgaagacgaagatggcggtggcgatgaactcggagatggcggcgcggatggtgtccgggtgcgtggcgtcctcgctccgtcccaccgtgaaccgccgccccgcccgcacgcccgtggccgtgctcatgtcgtccgccaaaaaccaagccaaacccctgctagcggcctcttcttgctagctagcttgcagtagcggcgtgcgtacctcctccttcgtttcaaacagacgagcgggcagtcagtcag

SEQ ID NO: 89561 - DNA, 805 bp, Zea Mays
ggcaaacccttgtgttggtccagccgcccctcgccccgccgcaccaatcccccaccccatcccaacgctatccgctgccctcgccgcgcccccctcctcttccacctcgtccgccaccctccccaatccatcacatcccaccctaccccaccggccctgccgccgccgaggaggaggtgtccccacccccgtccgcagaggcagcagggatctctaccgggcatggagctggcgctcgcctccgcgaagccctcgcctcgggcggcgggggccttcccgccacttatcttctcgccgcttaaaccattcccgctcctccgcttcccgccgcggaggaccgcagcggcggcgctgcggctccggctccggctccgcgcggctgccgctgacgcgggcgagacttcccctggcgaggaggtgttcggcgcgcggcgggagctaacgggcatccagccgctggtggaggcgctgccgcccgcagcgcggacggcggcggaactggccgtcgccgcggcagccgtggcggcgggatacggcatcgggctccgcgcgggtggcgggtcgcgcgccgtggcggtggcgggggcggcagtgctctgcgcggccagcgtggcgggagcagctgcggtgaactccgtggtcccagaggtcgccgccgtggggctgcacaattacgtcgcgggccacgacgaccccaccaacctggacaacggcgaggtggaggcaatcgcgaagaaatatggagttagcacacaggatgacgccttcaaagcagagctctgtgacttgtatgccaggtgtgctt

SEQ ID NO: 89562 - DNA, 2333 bp, Zea Mays
taaatttaatagtttgcttacaacattaagcaaacaccctgaagctgataattttgctcgtggtcttggccctatttcattagctggagaggatgatcacgataggagagctgatgatttcaagatactctataaggcctatgctacagaagtactttcagatggaattgtggatgataagaagcttttcccctctgaatgaactgagaaacatatttggactggggaagcgggaagcagaaggaatcttatctgatgccaaagctcacatatacagaaggacacttgctaaatcatttaacactgaattagcttcagtccatagcaaagcagcatttctccaaactctttgcgaaaagttacagtttgatcctgaactggctagtaagatgcatgaagaaatttacagacagaagcttcagcagtttgtaactgatggagagctgagcaaggaggaagtggaagctctgatggcattccaagtgcgtctctgcatccctcaagaaactgtggacgctgcacatactgagatttgtgggcaactgttcgaaaaggttgtcaaagaagccattgcatctgttgacggatataatgctgatagacgtgaggctgttaggaaggcagcacaaagtctaaacctgaaaacggaggctgtcatgacgatctttagtaaagcagtacggaagttattcttgagctacattcagagagcaaaagaagctggaaaccgcattgaaactgcaaaagaactgaagaagttaatttccttcaacatagttgttgttaccgagcttttagctgacattaaaggagaactatctccagttgctgaaactgaagcatcaagtgcagcttcagaatctgaaggagaggatggtgaacatgaatgggaatcattggatacactgaggaagactagacctgataaagagctcaaagaaaagctgagaaagtcaagccagaaagagataactctcaaggatgacattccattgagggatagggctgagctgtatgaaacgtacctgatgttctgcatcactggggagacgactaatgtatcatttggaacagctatctctacaaagaaagatgattcagagtttttaatgctaaagcaattgggtgacatacttggtttaactcgcaaagaagctcaagatgttcacattaagtttgcagagaaagcttttgtgcaacaggcggaagtaattcttgctgatgggaaattaacagaggctaaggctgaccagcttgctaagattcaaaagcaggtcggtttgcctactgaacatgcacagaaaatcattaagggtattacaacgacaaagttatcttctgcaattgaagcctctgttgctcggggtcagatcggtatacagcaggtccgaggattgaaggaagcaaacttccaactagatagcttgattgcggagccgcagcgagaaagcatttataggaaaactgttgaagagctcttttcttcaggatattgcaaaggttaggttggagaactcccttgtccaggctattgcgttgcttcggcagaagaagagagatgatgtgctttcatctctgaatgacatgctcgcatgtgatgctgcggtccctgcatcacgacccttgtcatggcccacaccaggagagctagatgatctatttgccatctacctgaagagcattcctaagcctgagaagctatcaaggttgcagtacctgctcggcattagcaacgagaaggctaacgagatgcagtacgcagcctcggagggatcgctgccggttgcagctgaagagaaagaggagttggcgttctaggaagggagacagttttgttagggtagccaccggagttgaggtcccttgccaaggaacgaacgaacttggtgcctgtggcggacagctgctattgtagctaggcgcatacatgtttttggaaaaggaaatcgacgtgtaacactgacatatttattgcatgtctatctgtatagacaagtcaataacaccgacgctgttaggctgttgcattccaccaggccacactggaagcgttttgttttctggttcattgtttctcttttggtttaagaatgtattacagctatgactgccacccttgcttataacctggatttgttgttaacctacctggagtgcttaagggcccgttcggttctacccggattgtttgtgtaacttataagttttgatcgctggaacgttccgggatggaatccggaagaaacgaacacggctaaggggcagtttggagccttctgttgcttaccatcagcaacctctttgcaaaatgtgaaatctctctgttttactcc

SEQ ID NO: 89563 - DNA, 2422 bp, Zea Mays
taaatttaatagtttgcttacaacattaagcaaacaccctgaagctgataattttgctcgtggtcttggccctatttcattagctggagaggatgatcacgataggagagctgatgatttcaagatactctataaggcctatgctacagaagtactttcagatggaattgtggatgataagaagcttttcccctctgaatgaactgagaaacatatttggactggggaagcgggaagcagaaggaatcttatctgatgccaaagctcacatatacagaaggacacttgctaaatcatttaacactgaattagcttcagtccatagcaaagcagcatttctccaaactctttgcgaaaagttacagtttgatcctgaactggctagtaagatgcatgaagaaatttacagacagaagcttcagcagtttgtaactgatggagagctgagcaaggaggaagtggaagctctgatggcattccaagtgcgtctctgcatccctcaagaaactgtggacgctgcacatactgagatttgtgggcaactgttcgaaaaggttgtcaaagaagccattgcatctgttgacggatataatgctgatagacgtgaggctgttaggaaggcagcacaaagtctaaacctgaaaacggaggctgtcatgacgatctttagtaaagcagtacggaagttattcttgagctacattcagagagcaaaagaagctggaaaccgcattgaaactgcaaaagaactgaagaagttaatttccttcaacatagttgttgttaccgagcttttagctgacattaaaggagaactatctccagttgctgaaactgaagcatcaagtgcagcttcagaatctgaaggagaggatggtgaacatgaatgggaatcattggatacactgaggaagactagacctgataaagagctcaaagaaaagctgagaaagtcaagccagaaagagataactctcaaggatgacattccattgagggatagggctgagctgtatgaaacgtacctgatgttctgcatcactggggagacgactaatgtatcatttggaacagctatctctacaaagaaagatgattcagagtttttaatgctaaagcaattgggtgacatacttggtttaactcgcaaagaagctcaagatgttcacattaagtttgcagagaaagcttttgtgcaacaggcggaagtaattcttgctgatgggaaattaacagaggctaaggctgaccagcttgctaagattcaaaagcaggtcggtttgcctactgaacatgcacagaaaatcattaagggtattacaacgacaaagttatcttctgcaattgaagcctctgttgctcggggtcagatcggtatacagcaggtccgaggattgaaggaagcaaacttccaactagatagcttgattgcggagccgcagcgagaaagcatttataggaaaactgttgaagagctcttttcttcaggtacaggggatttcgatgaagaggaaatgtatgtgaagattccagctgatctcataataagttctgagaaggccaagtcaattgtacaggatattgcaaaggttaggttggagaactcccttgtccaggctattgcgttgcttcggcagaagaagagagatgatgtgctttcatctctgaatgacatgctcgcatgtgatgctgcggtccctgcatcacgacccttgtcatggcccacaccaggagagctagatgatctatttgccatctacctgaagagcattcctaagcctgagaagctatcaaggttgcagtacctgctcggcattagcaacgagaaggctaacgagatgcagtacgcagcctcggagggatcgctgccggttgcagctgaagagaaagaggagttggcgttctaggaagggagacagttttgttagggtagccaccggagttgaggtcccttgccaaggaacgaacgaacttggtgcctgtggcggacagctgctattgtagctaggcgcatacatgtttttggaaaaggaaatcgacgtgtaacactgacatatttattgcatgtctatctgtatagacaagtcaataacaccgacgctgttaggctgttgcattccaccaggccacactggaagcgttttgttttctggttcattgtttctcttttggtttaagaatgtattacagctatgactgccacccttgcttataacctggatttgttgttaacctacctggagtgcttaagggcccgttcggttctacccggattgtttgtgtaacttataagttttgatcgctggaacgttccgggatggaatccggaagaaacgaacacggctaaggggcagtttggagccttctgttgcttaccatcagcaacctctttgcaaaatgtgaaatctctctgttttactcc

SEQ ID NO: 89564 - DNA, 788 bp, Zea Mays
acaggacaacgagacgtctgacggcgtgaggctgagaccaaaggagaacagagacggagaggagcgcggcggcccgggcgccggagcctggagggtaggggaagagaagagaagaggcgatggcgtcaatcgggtcctccaacatcggattccagctgctgaagaagtctggttggaaggagggcactggccttggagcgcaggagcagggaaggttggaacctgtagagactcgtgttaagaataacaagcgtggtataggttctaaagaaccaaaaccacaacctaaggttgaggatgacattgaaacacatcctcaaaagcccaagcaggaaatgcaatcaaagaaaagggcaaaattagctgcaaagaggataagaaaactgcaagaagaggagaagcgcttgaaagagaaggaattcgagatggcttttttcagggaattttggcctgataatgtgtaaggcagaaacttcaacacttgacaatgtagctgctgactttgcctgatatagtggatgtataggcttgcaaaacgcttggcctacaaaatgttaccccattcattccgtggatgatttcacacatgatttgtggctagggttggcacaaagctgttcatccatgtagtggacaaatctagtgtagaattgcccatgctatgtgatcttgtaatttttatacattataaatcttgtttttttttgttcatataactgtgctcaatattttgccttgccaatgcaaagatttaaatctaggctcagaaaccaggcaatagttcacta

SEQ ID NO: 89565 - DNA, 104 bp, Zea Mays
aacttgtgattgtagattgcttgtgttttatatgtccatgtatatcattattcaaactatattttatattaatttaatagggtgtatgtgtttttatgaagccg

SEQ ID NO: 89566 - DNA, 1525 bp, Zea Mays
agcgtgccgttgggggcaggtggagacttcacgtccccgcctcctatgtcctatcgcagtcgcaccacgcataaacccctatcgcagtcgcacctgcgcagctgcactgcccctcacagacgagtcaaccgcctttccacctcctcgccgtcgttccgtagtggcgccgcctatatagagagcgaaccgcgcgaggtcccagcacagcagccaggattccacaaacagagaggccaggttccaagcaaaggcagtgcaggcagggcgtgtggagaagcagagcagcgggtggcgcacctgcacgtgccaggctgccagctctggccatggcggatcaccagaggatccaccctgtcgacctggaggccggcaatcggccaacgacgccgctggtgccgggaggctcgttccggtcggacaagggcgacccagcgcagcgcgcgaacaaccaccaccaacaacagcaacaacgaggctacgtctacgtcccggggcctctgcctccgccgccgcgccgcgccgcgccaccggcgccgccgctgccgccgccgaagcggcgcgggcggggctgctgctgccggttcctctgctgcgccgtgataaccgcggtcgtgctggcggtgctcgccgcggcggcggcgggcgcgctgtacctgttgctggaccccaaggcgccgcggtactcggtggaccggctctctgtctccacgttccaggtggacccgtcgacgctgacggcgcgggccgggttcgacgtggcggtgacggcggcgaaccccaactcgcgcatcgccatccagtacgagcccgggtccagcctgggcgtgtggtaccagtcgtaccgcctggcgcggggcgcgctgccgcccttctaccagggccaccgcaacaccacggtgctggcgctggccatggccggggaggtgcagctgggcggcgccgccgtggccgggatgcgggacgcgcagcggacgggcgccgtgccgctcgtgttccgcgccgacgtgcccgtgcgcgtcgagctcggcacctttaagctctggaaggtcacgtccagggtgcgctgcgacctcgtcgtcgacaggctcatggacgtcagcagccccatcaagatcaaggccagcaactgcaagttcggtctgaagctgtgattcgttcgtcgccgcgttggattcttttggctggctgagtgctggacctgcttgctggtagtatttgcgcaggtgcagacgtgcagtgcactcccgccaacctcgtcggtgttcatcccggctgtgtacagatggtagtgtatcattgctgttatagaggaataattttgcatcgattgttttttataattctagagctactacttctatcgccgcgcacacagttgaatggggaagacaaaacaaccaaatggaaaatggctctagtaccattctccgttactcgacatgagagagcgatggagcagaaatgccatgttttactaacaaagtagcttgatattttgataatggtaaggccaggaaggatccat

SEQ ID NO: 89567 - DNA, 2188 bp, Zea Mays
gttcctaatctggcatgagtatatgatccctactccctagtctgtatgaacaggaaatgtttgttggagagggcagggaaaacatctaggtcataggtttccgaacgggttggctttgatggagcaatagaacaagtgggctgaaagcttgaagtaatgaacggctcgagttgtgcagctttgccccgcatttttttttgaaaagtgcagcgttcctccgtttcgcttctcccgctcccttccgcaacggcgtactccctccgccgcccgccgaccgccgactcccgccgcaaaatcctgcgtcagaagcgccgattctcggacgtcctccggatctgagacaccgagcgcactacgagctgtagcttgacctaaaaatgagtgagggggatgctactcagcttgcccttgagaaaggattaccgcaagtgtctaatgatgatggttcgagtagtcctgcaactatgcacaagttgaaagttgacacagaagatgctggaagcaaaattgaatcacccactccagagaagcttgaatctagaagcaaaggggttgttgtgagttcgttggcaaggaatttacttgcagagaggtacaaagatagatttgcaaatcagttcctggaagatgagggtgacatagatgatgaagactataatgacagtatttcgccaggcatgagccgatctcagagatcaagaagcattgaacttctggagaagcacaaggatttactgaatctttttaatagaatggagagttctataaggttgctacgcttacggaagaggatggctacatttaataatattgccacccaggtggaaatactcgcaaaaaggaagttatcgtactgtcatttggcccaaatgaagtatttgtttccagaagcaatccagattaagagggtacttctacatgacgagaaaagcctatgcatgtatgctgatatggaaatcatacttgtaatggatgttgtggaatacacaagtactgatcactctccatccatgacaatttgcgatgctttttactcgaagcttttgacatttttggatgctcatcataagggtacagacattccagaggcaatcttaccagaaccctttaacttgaggtcaaggggccagttaaatcttgaggcatcacataatggacatgctgctgagccacatctgcaaggcaccactaaggatggattctcaaatgcttcccacttcccacaatcttttcgaaagctaatgtcccagaaagtcattactgatggagctgaaaggactcaattgctacttgatccaacaaaactgagctctgtgagtgcttatgatacagaaggaacaaacagaagccctaaaaagcaagacaaacatgcttcagttacagtgaactctgaaatttctgctactccaagccgtcatttgatctctcgttgtcaagagggtacgccaaaacaagagaccttagaatcaccactgttggctcaaacaccagcaactcagacacccaaaaggcaattgcccactccacttgagaaacttgaggccacatgtggacacatttctgaaccacgttcagctagttctgcccgcagatcactaaatacatctttaaaatttgaagggggaagcccttcttatcatgatagaatggaacatgtggctacatctaaaattggaattctctcggaagattcatctagtttcaacaagtcattagaggagaatggtcctgtcttctttactgatagagacaaaatcaatctggcagacccagtgggtgtccaggaaaagatggcttcgttacgttccacatttggcatcgtctgcgatatttctcattctatcaagaattcgctaattacaaaacaggagcttttccataatattcttgccaacaacttggagatagaacagatgggagagatagaagagcagctacatattttagaggatctggctcccaattggatatctaagaaggtgataaatggagaagaaatactttacagctttgaaactatagcagatcagaattcagtgtgggaaaggcttgtagaagctgtgtgaggtgtggaatagctgggattggtttaaagctaaagaatcagccgcatagtactatgtatgtaacgctaacggaacccatcaaacagccacattttctcatcatggaatcctcaggattgctc

SEQ ID NO: 89568 - DNA, 2341 bp, Zea Mays
gttcctaatctggcatgagtatatgatccctactccctagtctgtatgaacaggaaatgtttgttggagagggcagggaaaacatctaggtcataggtttccgaacgggttggctttgatggagcaatagaacaagtgggctgaaagcttgaagtaatgaacggctcgagttgtgcagctttgccccgcatttttttttgaaaagtgcagcgttcctccgtttcgcttctcccgctcccttccgcaacggcgtactccctccgccgcccgccgaccgccgactcccgccgcaaaatcctgcgtcagaagcgccgattctcggacgtcctccggatctgagacaccgagcgcactacgagctgtagctgtagtgacctaaaaatgagtgagggggatgctactcagcttgcccttgagaaaggattaccgcaagtgtctaatgatgatggttcgagtagtcctgcaactatgcacaagttgaaagttgacacagaagatgctggaagcaaaattgaatcacccactccagagaagcttgaatctagaagcaaaggggttgttgtgagttcgttggcaaggaatttacttgcagagaggtacaaagatagatttgcaaatcagttcctggaagatgagggtgacatagatgatgaagactataatgacagtatttcgccaggcatgagccgatctcagagatcaagaagcattgaacttctggagaagcacaaggatttactgaatctttttaatagaatggagagttctataaggttgctacgcttacggaagaggatggctacatttaataatattgccacccaggtggaaatactcgcaaaaaggaagttatcgtactgtcatttggcccaaatgaagtatttgtttccagaagcaatccagattaagagggtacttctacatgacgagaaaagcctatgcatgtatgctgatatggaaatcatacttgtaatggatgttgtggaatacacaagtactgatcactctccatccatgacaatttgcgatgctttttactcgaagcttttgacatttttggatgctcatcataagggtacagacattccagaggcaatcttaccagaaccctttaacttgaggtcaaggggccagttaaatcttgaggcatcacataatggacatgctgctgagccacatctgcaaggcaccactaaggatggattctcaaatgcttcccacttcccacaatcttttcgaaagctaatgtcccagaaagtcattactgatggagctgaaaggactcaattgctacttgatccaacaaaactgagctctgtgagtgcttatgatacagaaggaacaaacagaagccctaaaaagcaagacaaacatgcttcagttacagtgaactctgaaatttctgctactccaagccgtcatttgatctctcgttgtcaagagggtacgccaaaacaagagaccttagaatcaccactgttggctcaaacaccagcaactcagacacccaaaaggcaattgcccactccacttgagaaacttgaggccacatgtggacacatttctgaaccacgttcagctagttctgcccgcagatcactaaatacatctttaaaatttgaagggggaagcccttcttatcatgatagaatggaacatgtggctacatctaaaattggaattctctcggaagattcatctagtttcaacaagtcattagaggagaatggtcctgtcttctttactgatagagacaaaatcaatctggcagacccagtgggtgtccaggaaaagatggcttcgttacgttccacatttggcatcgtctgcgatatttctcattctatcaagaattcgctaattacaaaacaggagcttttccataatattcttgccaacaacttggagatagaacagatgggagagatagaagagcagctacatattttagaggatctggctcccaattggatatctaagaaggtgataaatggagaagaaatactttacagctttgaaactatagcagatcagaattcagtgtgggaaaggcttgtagaagctgtgtgaggtgtggaatagctgggattggtttaaagctaaagaatcagccgcatagtactatgtatgtaacgctaacggaacccatcaaacagccacattttctcatcatggaatcctcaggattgctcgtcttattcaattttaattttttcttctgttgcattgctaatgtgctaattacatgcttaatactgaaatttctacaagacataaatttgcctgggtctaattctgcttaatatttcacagcactgacatgctctgtgagctttccttg

SEQ ID NO: 89569 - DNA, 585 bp, Zea Mays
aacctccagcgagcgcccacctccagcttgacaatggtggaagccaagatcctggtgctggtcgcggtccttgctctgcttcaggtatcatccaccgttgcccggcggcacggcaagccggacccctgcgacgaggacgacgctaacacggacgacctgccgggcggcctgcgccacaagaggacgccccacccgcgaagccatcactgcgcaccggcgcaccacgggggtcgtggcggcggcacccccgctgtgatgacggtgaacgggttcaagcgcggcgagagcggcggcgggccagcggagtgcgacgggcacttccacggcgacgacgagctgatcgtggcgctgtccacggagtggtacgcgcacgggcgccggtgccaccgaaggatccgcatcacgagcgcgcaccacgggcgcaccgtggaggcacgcgtcgtggacgagtgcgactccagccgcggatgccggcacaacatcgtcgactcgtcccctgcggtctggagggcgctcggtctcgacaccgacatcggacaggtgcccgtcacgtggtccgacgcctgaggcggccggccgtcacgt

SEQ ID NO: 89570 - DNA, 2265 bp, Zea Mays
ggtgtaattttttattattctaatttttattataatttctatcatgcgtgtatatgttctaataaatagaaaagtgtgaacatgtggcagagtctaagtaatgccttgtacgctatgtcgtggacctatgattgaattagagaaataaagtccaaccctagaaaactctcgcatcgtcactccaaatcagccgctagggctgcattcatccacctcgtgcttatcgcctactccaacgccgactcctgctcgtcggtcgtcgcctcgtccagctctctccgcccctccagcctagcctagcccctcctgctcactgcgtcgtctccagaatccggcctacgaccgttggcggctggtgcccccaccggcaatcggtggtcatggtctgtccctgctcactccattcagatccgctatgcgcgaggcgcaactggatctatcgtattcctggttgctctctccctctccgcgggcgatgcgcctctctaggttctaccggcgtccgtccaaccggtgttcagcgtgccttcgcaggcccccttctctgccttcgatgagtgcatttgatcagtattgggaggctgcacttgatgtgactatatgttggaagaaatcctttcttgtcattgctcgaggtgataactccagtgactatattgtcgaccttcacttctcgctacaacaaagatgcggtccttcttaccatccttttactatctgatttccctaaaataattttgtttgactattcaaatcatgcttggagaggatcatggcgtgggatcagaaagagcaccaacaattttctacatgttgtacaatggggttatgattacttgaattttgtcatttgttttagtaattatgtgatctgcaattgatctagcacaagcacattcaaattgaccaatttctactagtgctataactttattccgaatggatggcttccttccggaaagactaaactgaataattatgtcaaagttgtttcactagtttggcctaataggtattgatctatggtatctagactacatattgtactatatggttgattgttctgatttcgggcttggttaatctgacgtttctagcatccaaacatatagatatatgtcagctacctgtgtaccatgcacgaataatcctataaattcaggttgaatattttctgcatgtaacctaaaacttctacgctatggtctttcacttacaggttgttaaagaagagcagatgtgctattttggttggtctaaaatcaggggtggaccaacagggggtccaggggggccacggcacaccctaggccagcccagcaaggaccccacccctttgtcgcccagccgctagcacgtagctaccacgactagtgcccaggtcaccaccgccatgcctagcgccaagccaccactcacccgcacccaacaccaagtcgccgcaatcctagtgcccattgtacatgtgaacatataaagctaccatgatcatggaggtagcaggtgcagagacacccatcaaggtttcttcgtctctagtcatttgttacgcaaattcaaatacaggtaaaagtagcattgtataaggtgcagattgatttgtacagatgaggttgcttctgaaaattgacaggaaaattccttggtatacttgtatgcaggcttttggaaagttgaggcctatttgtgcacaatagtatactaaccattgaagattattactctcatctattgcaggtacattattctgaaactcagttcatgaaatggaatgagttcagtttcaatatagcagaatagcatgctagcagcaaacatgcacgtgcccagacttcattcaggtgacatctttcattgtctcttctcaatcatttatagtgtcatttcgagttttcatggcttgtattgtgctatgagtttttagtgcttcatggtgggcttagttgcatgaagggttctcagctttgagattaattaccaatgcaccttttgagagctcaaaagatggtcttcgcattgagctagtaagttagaattttgttaaaatttgcagatttagtaaagttattatttattggttttttaaaaaaatttgactcggcgaggataaaatagccctgggcatcatatatatagagatgaccttcttgtagtatcttatataaaaaatttgttacggcataccctatataaaaaacctaggtccgccactgcctaaaatcatatagaaaagagtgttgctttggtctacaagtctgaatctat

SEQ ID NO: 89571 - DNA, 2721 bp, Zea Mays
ggtgtaattttttattattctaatttttattataatttctatcatgcgtgtatatgttctaataaatagaaaagtgtgaacatgtggcagagtctaagtaatgccttgtacgctatgtcgtggacctatgattgaattagagaaataaagtccaaccctagaaaactctcgcatcgtcactccaaatcagccgctagggctgcattcatccacctcgtgcttatcgcctactccaacgccgactcctgctcgtcggtcgtcgcctcgtccagctctctccgcccctccagcctagcctagcccctcctgctcactgcgtcgtctccagaatccggcctacgaccgttggcggctggtgcccccaccggcaatcggtggtcatggtctgtccctgctcactccattcagatccgctatgcgcgaggcgcaactggatctatcgtattcctggttgctctctccctctccgcgggcgatgcgcctctctaggttctaccggcgtccgtccaaccggtgttcagcgtgccttcgcaggcccccttctctgccttcgatgagtgcatttgatcagtattgggaggctgcacttgatgtgactatatgttggaagaaatcctttcttgtcattgctcgaggtgataactccagtgactatattgtcgaccttcacttctcgctacaacaaagatgcggtccttcttaccatccttttactatctgatttccctaaaataattttgtttgactattcaaatcatgcttggagaggatcatggcgtgggatcagaaagagcaccaacaattttctacatgttgtacaatggggttatgattacttgaattttgtcatttgttttagtaattatgtgatctgcaattgatctagcacaagcacattcaaattgaccaatttctactagtgctataactttattccgaatggatggcttccttccggaaagactaaactgaataattatgtcaaagttgtttcactagtttggcctaataggtattgatctatggtatctagactacatattgtactatatggttgattgttctgatttcgggcttggttaatctgacgtttctagcatccaaacatatagatatatgtcagctacctgtgtaccatgcacgaataatcctataaattcaggttgaatattttctgcatgtaacctaaaacttctacgctatggtctttcacttacaggttgttaaagaagagcagatgtgctattttggttggtctaaaatcaggggtggaccaacagggggtccaggggggccacggcacaccctaggccagcccagcaaggaccccacccctttgtcgcccagccgctagcacgtagctaccacgactagtgcccaggtcaccaccgccatgcctagcgccaagccaccactcacccgcacccaacaccaagtcgccgcaatcctagtgcccattgtacatgtgaacatataaagctaccatgatcatggaggtagcaggtgcagagacacccatcaaggtttcttcgtctctagtcatttgttacgcaaattcaaatacaggtaaaagtagcattgtataaggtgcagattgatttgtacagatgaggttgcttctgaaaattgacaggaaaattccttggtatacttgtatgcaggcttttggaaagttgaggcctatttgtgcacaatagtatactaaccattgaagattattactctcatctattgcaggtacattattctgaaactcagttcatgaaatggaatgagttcagtttcaatatagcagaatagcatgctagcagcaaacatgcacgtgcccagacttcattcaggtgacatctttcattgtctcttctcaatcatttatagtgtcatttcgagttttcatggcttgtattgtgctatgagtttttagtgcttcatggtgggcttagttgcatgaagggttctcagctttgagattaattaccaatgcaccttttgagagctcaaaagatggtcttcgcattgagctataacatgtggtggtgacatggcacaacaagaacttgaagaagtagacatgttgctgctgcctgcagggtgacgtctatggtgttgtgctgcgggcaaggcccacacaatgtgatcgggctgcacgccaatgttcaacatgtgccccaaccagaatgtgtatgctactactaatataacattcgtcattggttggttcaccccaagaggtttgctgcatgttcatggagctggtggataataaattttagttgttctttttgtggtttattagatgacatcaattagtgttcaattgagccttagagtaggatgaatacaactgtcttaagtttctttgttccagcagattgtttgggggcaaggttacctatgaacttcaagaattggtcttatgatattgttagtttgtacaacttagtgttaggttgctcgacttcttcatgaatgaggtgttagacattggtcgatcatgcagggttgaaggtgcttcatataactaaatctaccatgactttctaggtaagatgttacatccatatgacctttgtgatatgtcataatgtgaggtgttcaactgtgtctaactactaattattgcctttttctatttgttgtataggaaaagatggaatggaactcaatttttggtggccgtacaagtgtggaaacttgaattcatatatacttacaatcaac

SEQ ID NO: 89572 - DNA, 2784 bp, Zea Mays
ggtgtaattttttattattctaatttttattataatttctatcatgcgtgtatatgttctaataaatagaaaagtgtgaacatgtggcagagtctaagtaatgccttgtacgctatgtcgtggacctatgattgaattagagaaataaagtccaaccctagaaaactctcgcatcgtcactccaaatcagccgctagggctgcattcatccacctcgtgcttatcgcctactccaacgccgactcctgctcgtcggtcgtcgcctcgtccagctctctccgcccctccagcctagcctagcccctcctgctcactgcgtcgtctccagaatccggcctacgaccgttggcggctggtgcccccaccggcaatcggtggtcatggtctgtccctgctcactccattcagatccgctatgcgcgaggcgcaactggatctatcgtattcctggttgctctctccctctccgcgggcgatgcgcctctctaggttctaccggcgtccgtccaaccggtgttcagcgtgccttcgcaggcccccttctctgccttcgatgagtgcatttgatcagtattgggaggctgcacttgatgtgactatatgttggaagaaatcctttcttgtcattgctcgaggtgataactccagtgactatattgtcgaccttcacttctcgctacaacaaagatgcggtccttcttaccatccttttactatctgatttccctaaaataattttgtttgactattcaaatcatgcttggagaggatcatggcgtgggatcagaaagagcaccaacaattttctacatgttgtacaatggggttatgattacttgaattttgtcatttgttttagtaattatgtgatctgcaattgatctagcacaagcacattcaaattgaccaatttctactagtgctataactttattccgaatggatggcttccttccggaaagactaaactgaataattatgtcaaagttgtttcactagtttggcctaataggtattgatctatggtatctagactacatattgtactatatggttgattgttctgatttcgggcttggttaatctgacgtttctagcatccaaacatatagatatatgtcagctacctgtgtaccatgcacgaataatcctataaattcaggttgaatattttctgcatgtaacctaaaacttctacgctatggtctttcacttacaggttgttaaagaagagcagatgtgctattttggttggtctaaaatcaggggtggaccaacagggggtccaggggggccacggcacaccctaggccagcccagcaaggaccccacccctttgtcgcccagccgctagcacgtagctaccacgactagtgcccaggtcaccaccgccatgcctagcgccaagccaccactcacccgcacccaacaccaagtcgccgcaatcctagtgcccattgtacatgtgaacatataaagctaccatgatcatggaggtagcaggtgcagagacacccatcaaggtttcttcgtctctagtcatttgttacgcaaattcaaatacaggtaaaagtagcattgtataaggtgcagattgatttgtacagatgaggttgcttctgaaaattgacaggaaaattccttggtatacttgtatgcaggcttttggaaagttgaggcctatttgtgcacaatagtatactaaccattgaagattattactctcatctattgcaggtacattattctgaaactcagttcatgaaatggaatgagttcagtttcaatatagcagaatagcatgctagcagcaaacatgcacgtgcccagacttcattcaggtgacatctttcattgtctcttctcaatcatttatagtgtcatttcgagttttcatggcttgtattgtgctatgagtttttagtgcttcatggtgggcttagttgcatgaagggttctcagctttgagattaattaccaatgcaccttttgagagctcaaaagatggtcttcgcattgagctataacatgtggtggtgacatggcacaacaagaacttgaagaagtagacatgttgctgctgcctgcagggtgacgtctatggtgttgtgctgcgggcaaggcccacacaatgtgatcgggctgcacgccaatgttcaacatgtgccccaaccagaatgtgtatgctactactaatataacattcgtcattggttggttcaccccaagaggtttgctgcatgttcatggagctggtggataataaattttagttgttctttttgtggtttattagatgacatcaattagtgttcaattgagccttagagtaggatgaatacaactgtcttaagtttctttgttccagcagattgtttgggggcaaggttacctatgaacttcaagaattggtcttatgatattgttagtttgtacaacttagtgttaggttgctcgacttcttcatgaatgaggtgttagacattggtcgatcatgcagggttgaaggtgcttcatataactaaatctaccatgactttctaggaaaagatggaatggaactcaatttttggtggccgtacaagtgtggaaacttgaattcatatatacttacaatcaacattagcgcaaacagttgaccaagtttttcaattagtattttagtttgaatttagtgtgcaataatgtatgagttatttaacaatgcttattcatgacatattgaatgatacttatatttattatatcaattatgatgttattaaatatatgtgtgcatgtata

SEQ ID NO: 89573 - DNA, 844 bp, Zea Mays
atgtttggtgacccaactctccggcccaatccgcgggagagaacagggctttcgccccaggcctcacaaggtcgggaagggtttccgcgagctcaccctctccactcgcgcacccgccgccgcttcctttatctcacgcacccgtcgtcgcctcctctccctcgcgcaattggggccagctgttgggacgacgttgaggacgagggcgatgacgtggtcggcctcctccactctgtggagacaaccaaggcggtcgcggtggcggtcgctagcatgcaaccccactgagtcgagctcatacggcagctcgacgcctcctgtgagacacgccgccacgagccgccttctccacccacatctgcacgcgcaacacaaatctcgtcgtcggcagcttccacaccgccactatggcagccagtaggagggccagcgacagccgcgtcgccgttattcctctgaccctcttgctgatcgagagaggtggctgagagaggtggaccggccgaccggatgagcttgtggctagctggaggaagaggtgaggagatgtatgatctgaatgggagtgggtagtggtggtggcctggcgacggacagcagtgcagagtgacgaccttgctgctgttgtgtcatggcgagagtgctttagtagcttctttatttgttttgaccagtctataaaataaacaaagaatcattagcaattatgtaaccacttgcttgtggattgtggtaattatgtcatatacgataaaacctgttagatatgtcacatatatgcttgttgcttgaaatactaacagcacaatgcatttattaagttctactacccttctgttcttcc

SEQ ID NO: 89574 - DNA, 749 bp, Zea Mays
atgtttggtgacccaactctccggcccaatccgcgggagagaacagggctttcgccccaggcctcacaaggtcgggaagggtttccgcgagctcaccctctccactcgcgcacccgccgccgcttcctttatctcacgcacccgtcgtcgcctcctctccctcgcgcaattggggccagctgttgggacgacgttgaggacgagggcgatgacgtggtcggcctcctccactctgtggagacaaccaaggcggtcgcggtggcggtcgctagcatgcaaccccactgagtcgagctcatacggcagctcgacgcctcctgtgagacacgccgccacgagccgccttctccacccacatctgcacgcgcaacacaaatctcgtcgtcggcagcttccacaccgccactatggcagccagtaggagggccagcgacagccgcgtcgccgttattcctctgaccctcttgctgatcgagagaggtggctgagagaggtggaccggccgaccggatgagcttgtggctagctggaggaagagcttgcatcggcgtacaaggttgatgctggcaggtgacaggttgccttgctattgatgctgagattgttgcccttcacttccttagtgcacaggtgcacatagtaaatggtcgaattgatttttgcggtgaatattgaagttgtacaattttctgttaattattgctttctatagatattgatttttctgtgcaatgaatattgaattttct

SEQ ID NO: 89575 - DNA, 732 bp, Zea Mays
atggctagagcttcgtggaatatgaactatgagaagattcttgttgacatcttgcatgagcacaatcatgtgaagtaccggggccagaatggttgggcaccagaaggttggcgttctatgactcaaatgttcaatgagaagtgcccgttggctaagtttacaaaggcacagatccaggaaaaagaaaaggaacttaaggcaaactataaggtgctgaaggaagccctcaagcaaagtggtgttggatggaatgaggccatgggtatgatcattgtggaaccaccaatatgggcaaatataattgttagtaatccaaaggtcaagaagtttcagtcaaggtcattccctttgtataatcagttgtcagcgctctatgatggtagttgtgctaccggtgatcttaattttacatcaactctaatgatggcagttgtgcaacatacatcatcccgacaacaattatatattcaagatgaagctgaagctatgagctctttcaggattgatgatgaccttggggttaaccctgatttgaatccattctcttcaaatttgcatgggttggcagcttcaagtacccatgttgagattggtggacatgaacgcacccccgcatcttcagcacaacgagcggagagtcatggaaggaagcgtaagcaaagtcagattgctggggttcttgaggaatatttggattacaaaagacaacataatgataagttgcttgatgtg

SEQ ID NO: 89576 - DNA, 2909 bp, Zea Mays
aaaaccctcccctgttctgacttctgatgttcgtcctcacagccaccaccagcaccaccacggccacctcacttctcctccgatgccgtccactcccctcgcctaaaactgtaacacttgccacgcctcctgctatcctccccttctgcatccgctcccgcttctccgcctccgcctccgcctctgcatcctccgtctctccccaaagccgtgcgaccgcggcagccgctgcaggcaaatccagggagaagaagccgccgaccgcgagggcgaagcgggccgacgcagtacctgcagcggcggcgcctggaatgtcggcctccggtggcggctccgctgggaagcgcacggtggcggacgtgctgatggggaacgcacgggccgccgccagcaaggcgaagaaagcagcgccgtctccgaagaagccgcaggcgaagaccgacggcgcagaggtcgaaccggaggctgcagcggtggcggagaaaccgccttcgccggcgaggtccaagcgggcgtcgtccccagcgaagtcccccaaattgctgcctgatgggtctacctcgtcggctaagtccaagggtccagccgcgctcgctcaattggatgcggcgaaggagaatcccccgtcgccaaagaggtccaaaaccctagccgctaaatccgacacccagccttctggtgaaggtgttgttgggcttgggcacaccgatgggaagaaggggtcaccctccccgaccaaggctaaaggccaagcttcccaatcagaggagaagaagcgggccgcttcacccaagaaggcgaaaaccacagattccccgaagacagagaagaatatcaccctagagctaaagaagaaaggcagtgagtttgacccaatggctgttgcctattggaagcctggtgaacccgtgccattcctgtttctggctcgcgcacttgatctcatctccaacgagagtggccgtattgttattacagaaatcctatcaaatgtgtttcgtacagtgatggcaacaacaccggatgatctccttgcaactgtatacctctcagccaaccggattgcgccacctcatgaggggattgagcttgggattggggatgcatcagtcatccgtgcacttgcagaggcatatggacgcaaagaggagcatgttaagaaggacctcaaggaattgggtgatttggggcttgtggcaaaagcaagcaggtcatcacagaagatgatgtttaagccaaaaccactgacaatagctcgtgtgcttagcactttccggacaatcgcaaaggaatcaggcaaagacagtcaagataaaaaaagaaaccatatgaagggacttcttgttgctgcaactgactgtgaaccccagtacatcacacgccttcttcagtcaaagatgaggattgggctagcagagaaaactgtccaaatggcgctagggcaagctgccgtatatgctgacaaaaatcctttgccaccaaaagttcaatcacctttcgaagaggctgcaaaaataattaaacaagcatattcggttcttccgatatatgataaaattgtcccagcgatactcgaagtaggagtttggaagcttccagagacatgcaaattttccataggtgtccctgttggccctatgttagcaaaagcaacaaaatctgtctcagagatcatcgacaagtttcagggtcttgaatacacttgcgagtacaagtatgatggtgaaagggctcagatacattgcatggaggatggttcagtagagatttatagtcgcaatgctgaaagaaacaccggaaagtatccagatgttgttgatgcagtttctagattccgtaaggctacagtcaaatcatttgtcttggactgtgaaattgttgcctatgatcgtgaaaaacagaaaattttgccttttcagatacttagcacaagggctcgcaagggtgtcaccataaatgacatcaaagtttcagtctgtacttttggcttcgatattctttacataaacgggaaacctcttctccaggaacaactcaaaattcgtcgagagcatctttacaactccttcgaagaagtgccaggtgtttttaaattggctactgcaattacatcaaatgacctggaggagatacagaaatttcttgacacagctgtcaactcgagttgtgaagggttgattatcaagacattggataaagacgcaacatatgagccagcaaaacgttcaaacaattggttgaaactgaagaaggattacatggatagcattggagactctttggacttggtacctattgctgccttctacggtagaggaaaacgaacaggtgtctttggatcattcctcctcgcatgctatgatgagcagaacgaagaatatcaaacaatatgcaacataggtactggattttctgagcaacagcttgaagaacgttctgcgagccttcgaagtaaagtgatagaaaaaccaaaggcatactatagatttggcgacacaatgaaccccgatgtgtggtttgagccatcagaggtctgggaggtcaaagctgccgatctgagcataagccctgtacatcgtgctgccaatggtatagtcgatccaaataagggtatctctctaagattccctcgcctattgagattacgtgacgataaaagcccagaacaagccaccacgtctgaccaagtcgctgacatgtaccggtctcaaaagatcaaccacggttataaccaggaggatgaggacgatgactgatgttgacttaattcttgttgctggatgggatggttcactgtgtaaacactagtcttcgcagtttccagcttgttctcaaccgtaacctgttgatttaccggttcctgtttctatgatcaaatgaacaggtattgaccggagattgcattttca

SEQ ID NO: 89577 - DNA, 826 bp, Zea Mays
gcactagcagtagcagcaggcgtcaaagcagatttgtagacacagaccttctccaattccaagcaatggagagtttcgtccagaagcatgtcgttggagttccatggacttcatttgcatacgccgatgaggaaagacgaggaaaaccttcctgttccgccatggttcataagaaaaataagaagggttccttcatttgctggatgaacaaactgagccacaaaacagataactacatgcaagggttcaaagaacacttgtctctgggaccaaaagtttcagaaactataaaagggaaactgagcttcggtgcgaaggttctccaagccggcggcatcgataaagttttcagagaatacttcgcagtcgaggaagatgagaagctactgaaggccttccagtgctatctttcgaccacagccggtccgatagccggaatgcttttcatctcaactaagaagatcgctttccacagcgataggcctttgaatctcttgtctcccaaaggaggcaggacaagggtgccttacaaggtgttgatccccacgaagaggataaagagtgcgtcggtgcggggaaatctatacaatccagacgagaagtacattgatgtagttactgttgacggcttcgatttttggttcatgggctttgtcagctacgagaagtcattcaggtatcttcagaatgcgattgtggagctgagatgatgcgcacggttttgtaacctgaaacatcgtaggtaccatgtcgatatggtatatgtacattgaagagatagaattgatcaatcacattgattgtgaagcaaagcttttacaaatgc

SEQ ID NO: 89578 - DNA, 82 bp, Zea Mays
caaataactataatacgccaaatccatgtctctaggttgacacggacaaagcgagcatatctagtcaaactgatgaaggacc

SEQ ID NO: 89579 - DNA, 1123 bp, Zea Mays
gtgtcttgggaaaaaaagatcgatttggattttgaaaactggatccaaacaggtccgaaatgactaggaagttgcgattctggaatttaaaattataatcagaaatgaagactagaaaaccaaaaaataaaatatgcccccatgcaggatcgaactacagaccttcagtttacaagactgacgctctaccactgagctataggggcaattgtgatttacgtctttgtgtaggatatatatgtatttttcagattttttactatagtgtacaacccaccgcccgcgtctctctcgttactcctccgtcctccctccgcgtttacacccgccgccactcctgccttggcgccgtagctagcaaaggcgatatccatggcgagccctgcacggatcgagctggacaagctgagcgtggagcagctcaaggggctcaaggagcagacggatctggaggtcaacctcctccaggacagcctcaccaagatccgcaccgccgccacccgactcgagaacgcctccgccgcgctccaggacctatccctccgcccccaaggcacggaagaagatgctcgtgccgcttacggcgtccctctacgttcccggttcactggacgacgcggagaaggtcctcgtcgatgtcggcaccggttacttcatcgagaaaaccatggctcaggggaaagaatactgtgaaaggaaaattaatttattgaagtcaaattttgatgaattggttgaggtggctacgaaaaagaaagccatagcagacgatatgggtttgctactacaagccaagctgaggcaagcgtcaccgggcccaagttcatgagagctggatgcacacctcgtctcttctacctatgttgtatcaaacatcatttagtaattttgaagttggagtcacgcagcagcgtagattgtattctttggcatcttctgtcgcacagcacactctttgaatggtttaattttgttcctactgctagcagcccgtggaactttcatgagcttgtatgggtgggaccaatcatcgttccatacttccattgtaggtctggccgatgggggtggtaccattgtaccaagcattgctctattatagtaggtgcaggctgttgcattt

SEQ ID NO: 89580 - DNA, 1151 bp, Zea Mays
gtgtcttgggaaaaaaagatcgatttggattttgaaaactggatccaaacaggtccgaaatgactaggaagttgcgattctggaatttaaaattataatcagaaatgaagactagaaaaccaaaaaataaaatatgcccccatgcaggatcgaactacagaccttcagtttacaagactgacgctctaccactgagctataggggcaattgtgatttacgtctttgtgtaggatatatatgtatttttcagattttttactatagtgtacaacccaccgcccgcgtctctctcgttactcctccgtcctccctccgcgtttacacccgccgccactcctgccttggcgccgtagctagcaaaggcgatatccatggcgagccctgcacggatcgagctggacaagctgagcgtggagcagctcaaggggctcaaggagcagacggatctggaggtcaacctcctccaggacagcctcaccaagatccgcaccgccgccacccgactcgagaacgcctccgccgcgctccaggacctatccctccgcccccaagggaagaagatgctcgtgccgcttacggcgtccctctacgttcccggttcactggacgacgcggagaaggtcctcgtcgatgtcggcaccggttacttcatcgagaaaaccatggctcaggggaaagaatactgtgaaaggaaaattaatttattgaagtcaaattttgatgaattggttgaggtggctacgaaaaagaaagccatagcagacgatatgggtttgctactacaagccaagctgaggcaagcgtcaccgggcccaagttcatgagagctggatgcacacctcgtctcttctacctatgttgtatcaaacatcatttagtaattttgaagttggagtcacgcagcagcgtagattgtattctttggcatcttctgtcgcacagcacactctttgaatggtttaattttgttcctactgctagcagcccgtggaactttcatgagcttgtatgggtgggaccaatcatcgttccatacttccattgtaggtctggccgatgggggtggtaccattgtaccaagcattgctctattatagtaggtgcaggctgttgcatttcgtgtgaaattagcacgggttgtttcaggtga

SEQ ID NO: 89581 - DNA, 2271 bp, Zea Mays
acagcgcgcgcgcacgacacgaactaaggccaagccgccgcgccgccgccacctttctttgcccagcctacgccaacaccatccgtgagcgccaccatggacaccgccgtctcgcaaaacgccacggttgccgcggcggccggtgccggaagcggcggcgggctggcgggcctgctcccggaggtgcagacgctggaggtgctggtggccgtgtccatcttcgtggccatccactcgctacggcagcggcgcacgcagggcttgccgacgtggccagtggtgggcatgctcccgtcgctgctcctcggcatccgcggcgacatgtacgagtggatcacgggcgtgctgaaggcgcgcggcggcacgttcacgttccgggggccgtggttcaccaacctccagtgcgtggtgacggccgacccgcgcaacctggagcacctcctcaagacccggttcggcagcttccccaagggcccctacttccgcgacacggtgcgggacctcctgggcgacggcatcttcggcgccgacgacgaggcgtggaggcggcagcgcagggcggccagcctcgagttccactcggccgagttccgcgcgctcacggccagctcgctcgtggagctggtgcacggccgcctgctgcccgtgctggccggcgcggaggccgccggcgccgccgtcgacctccaggacgtgctcctccgcctcaccttcgacaacgtgtgcatgatcgcgttcggcgtggacccgggctgcctccgcccgggcctccccgagatcccgttcgcccgcgcgttcgaggacgccaccgaggccaccaccctccgcttcgtcacgcccaccgcggcgtggcgcgccatgcgcgcgctcggcgtcgggcacgagcgcgtgctccggcgctccctggccgccgtcgacgagttcgcgtacgacgtgatccgcaggcgcagggaggagctcggcggcgacgacgccggggccgggcgcaggtcgtcggacctgctgaccgtgttcaccaggatgcgcgacgaggacgggcggccgtacacggacaagttcctccgcgacatctgcgtcaacttcatcctggccgggcgcgacacctcgtccgtggcgctcgcgtggttcttctggctgctccgcaggaaccccggcgcggaggccaggatcctggaggagatcgaggggatcctcgcggcgcggaaggaggccggggaggtggtcgtggaggaggaggtcgtgttcaggcccgaggaggtgaagcggatggagtacctccacgccgcgctctccgaggcgctccgcctctacccgtccgtccccgtcgaccacaaggaggtcgtggaggacgaggtgtttccggacgggacggtgctgaagaagggcaccaaggtggtctacgccatgtactccatggggcggatggagagcatctggggcgacgactgccgggagtacaggccggagcggtggctccgggacggccgcttcatgagcgagtccgcctacaagttcaccgccttcaacggcggcccgcgcctgtgcctcggcaaggacttcgcctactaccagatgaagttcgccgccgcctccatcctccgccgctaccgcgtcgacgtcgtcgagggccaccccgtcgcgcccaagatggcgctcaccatgtacatgaagtacggcctcaaggtcacgctgaccaagagagacaagaccaagctctgaactgttggtgccgagctgagcttgccaataagactctgagactgaagagagatatacagtatgaaagaagcagggctcttcatttgtttcatttacatctagtatagaacttctatatatatgtatagatacatatgtatatgtgttggcaaaacgcttgaccttcaggtgatgtaaccggtaatattgtagcagtattatttcaatacaacagcagcaagatgccatggcatctgtttggaaaaaaaaatccagcttcatccacggaattggtagtgggttgatagcttatcacaggaccgtatgatttgtccagccaatctaataggctggacaaaccattgtttatttgcctggcttcatcggcaaaaaagtaggccaggtagacaacatcatcatgggttgttgagaaatggttcgccaactgcacactttgacacaggctcaaaatctggttgttcaacctcaagccctgccactccactcttcgtagaattcagccacaaattcctccatgaacctatgccttttctcagctctccttttcccggc

SEQ ID NO: 89582 - DNA, 813 bp, Zea Mays
atggctccggcacacgaggacgggcgacggcgtggccggtggagcggcctcagctggggcaccctgttctgcttcgggagccagaaggcgttggcggcggggacgacggcaccgtgggagaggtcgcggtggaggaagaggcgcaccgtcccggtggacggcgacctggtggtggggacagcggctgattcggaggtgataattcgcggcagcggcagcggcaccggcaccgacgaggaggagtctcggcagcggaaggggcttcttcgccttccgggatgctgcttcttggacccggcgcgcgtgcctggccgcaagcgtagcaccatggacagcagaggcggcggccgcaacaaacaacggaacctagatcgcacggagtcgccgccgccgcggcggcggtcacagagcggtaacaactcaccgtccgaagcgtcgcagtcgcagatccaagccgccggtggcagcaacagcaccggcagccgctcccgcggagccgagcgaccccggagtgttccggtccagacgacgcaaacgcccaccgagccgagcaaaacggggtccggcggcgtgggcgcgttcgaattcggccctgtggtggggctgtccgtggtggtcgcggtgtccatggcgggactgctgggcgggtggctctgggccgtggcctgcgtgtgcgcctggctggccgccctgtctaggcttcggcggaggagggaggcggcggcggtcgacgaggactcggcagatcacgagaaacccgccgtgctccggggaatgctcgagcggggtcggaggaaggccgcggcgacataa

SEQ ID NO: 89583 - DNA, 699 bp, Zea Mays
atgcctgctgtgcttaacgagaacgaggatggcgccgccgctgccgatctcgagaggcagcagtgctggtgctcctgctcctgctcctgcctgccgttatgcctctggccgggcgcgtccgggtcccggggtcccaggaaacccggcggcacgggagcgaagaggaggcggtggcgtcgcaggctcaagctgtcatggctggtgtggccgtggtctccgaagagcggcaagggggatgcgggcggcggcggcgatgacagcagcaaggaggggatgaagaagcggaggaggaaggacgggcggcgcaggctcaagctgtcatggctggcgtggccgtggtcacggagaagcgacaagggggacgcgggcggcgacggggacgacagcagcaaggaggggaagaagcggaggaggaagggagggcgacgccggctgctgctgctgctgacgacgacgacgtcgctgcagctcaagaaggcgctcgcgtcggtcgtctccggggagagcgccctactgcctgcgccggccaaggtacgtccgatccgatcggtggtggagtggaggtcgattgatcgtgtcatgggcgcggtcggttctctgtcctcaccgcgactactcaccgctgcttgctcgatgggtatcgttgactttgtcgtgcttattaactatatctatatttgctctaaatatttcgggtaa

SEQ ID NO: 89584 - DNA, 1184 bp, Zea Mays
cgcgagtcaattgtccgcgaccgtaagcgctaagccgtccgccgcccgtcgccgcgtcccgcaggccgcactcccgctcggccgcgcctggcctgccggcgcgcagcggcagcgtgctgcaggctctgcagcagcttgggcgctcagttgcgggctgctccgctgctgcctgctcgcttgctggctgctccagcctggccgcctccctgctcgcctgctgcctgctcgcttgctggctgcttccgcctggccgcctccctgctcgcctactgcctgctggctgctcctgtgcttggctgcttggtgctcgctcgtgctgcagcctccagctcaagtgctcgcccgtgagcagtttcggcgacgccaagaagcaaagcaaccgcaggccacgacggccaacggcagaggacgcggcacgcggaagccgacaaccgcaaccctcggcaactgctgcgaccgcgagcaccggatcgaccacggcggtgcctgctggttctcggccggagacgacgagccagccgagccctaaaccaaccgaagggtccgctgcctccggccgcacctggcgggcgccgtcgaggcgccagcgccactcgcttcatcagcccgactgctcctgctccagcagcggcctgtggacggcggcgacgacgctgggcgtgatcgtgctcctcggccgcgtcatcgccgtggtcttcctatgctcgtgcctgtacggcgcgcgcttcgtccgggcctgggctgccggcgacgccggtgccagcgccaaggcccagctgagcggcgaaggcggcgtcgttggcgttggtagcagtagccggtgcttcagtgatccggtggcggtggccggcgacgaggtcgcggcggagatgtgcaccacggaggagcgcaagaagaaggtggtcatggcagggttgctcgacagggccggcaaggcaccctcgtcgcgctttcgtaggtgattacaagcggacgctgtaaatgatgccgtttagttagggcttcaactggtgataggctggttatcttttactttcattttttcgccatggtggagaattggcaatttgacatgaagagctgcttacacgctcaatcgctggtatatatgagattgttaggacgacattttgtgatttgcgtgggcacgtactaattggttttgaggtggaaattttcatacc

SEQ ID NO: 89585 - DNA, 1296 bp, Zea Mays
attctacagctagcacatggcgcgggacatggggggttccaaaagacattacacaggcttcgcgcagacttctacattccaaatgacagaactctggttagtgactttgtcaaatcatgtacagtctgccagaaaaacaaaaccgaggccttacacccagcagggttgctgcaacccttagaagttccctcacaagtttgggcagacatagcgatggactttgtggaaggcctcccaaaggtgcacggcaaatcagtcatactaactgtggtggatcggttctccaaatatgcccatttcattgccctgggacatccttatactgcagcctcagtggcacgagccttctttgacaacatagtccgtcttcatggatttccactttccattgtcagcgatcgtgacctagtctttacaggcagcttctggcgcgatcttttcaaggtggctggggtcaaactctgcatgagcacggctttccaccccaagacagatggacagtccgaggtcgtcaataaaactatagccatgtacctgcgatgcctaacaggagataggccgcgggcgtgggtcgattggttgccatgggcggaatattgctacaacactgcctttcactcagctctccgcactacaccattccaagtggtctatggaaggtcaccaccacccttactgtcgtatacacaaggaacaacagccacagatgcagtcgatgatctattaaaagacagagacatttttctctcggatgttcgagaaagattactgcaagcacaggcatatgcaaaacgacactatgatgaacaccatcgtgagctggaattccaggtgggtgactgggtatggctgcgacttctacacagccaggcacgagcactagttggcaacaagaagagcaaactgggtccaagatatgcaggtccgtttcaggtgctggaaaaggtgggcacggtggcttatcggctgcaacttccagatgacgctcgcatccataatgttttccatgttggcttgctcaaacccttcaaaggtgatacgccaagtgctcctccagccctcccagagatgcaccaggggagggtcctgccaacacctgagcgcgtgctgcgcgcacgactacgccgccaagaatggcaccttcttgtgcagtggtccgggtcttcagcatcagaggcaacttgggaaccactggctcggtttagagaaagctaccccaaatttcagctcgaggacgagctgtttctcgaggagccgagagatgttatggtgggcgtccagtacaggcgccgcaac

SEQ ID NO: 89586 - DNA, 104 bp, Zea Mays
cattaacgaatttccatactggacagttcacagccgaatatgtggaagcattaaaaggtatgcacgtattctctctcgaatgtaagagcgaataaaattactac

SEQ ID NO: 89587 - DNA, 1675 bp, Zea Mays
atggcgtccctcctcctacaccgccgccacggtgcgcacccacgcgccgccgccgcggcctgcgctcgcctcctccgcgccttctccgcgctccccgacatcgatccctcggcgtcctccaccgcaagccctagcccggccgcgcccacctccacctccgcccgcgcctccgtgctcgacctccagctcgccgtccgcgccgagtctgacccagcccgcatccactccctcgtcgcctccgcgctctccagccatgacatgccgcgcctccacacctcgcgccagctcttttccctggccacttcccgcttgatccgcctccggcgcgccgacctcgccgcctcgctcctcgacctcctccttgcctccaccccgccctccccgggtctcctagcgcgggcactctccctctacccgggacccgacgacgcgctccgggccttctcctcgtctccccccgccgcccgctccgacgtctccctctcggcgctcctttcggcgttcctccgcgccggccgcctcgatgacatcaagtccaccattaccctggcggaatcctcccacggggtcgcgcccggccgcgcctcccacaatgtgctgctccatgcattggtcaagaattctgagcttgctgctgcccggaagctgctcgacgaaatggccaacaagaagttgaagcaccgccctgccccagacatcatatcctacaacactgtcctcgctggttactccgtgcaggatgatgaggatgagtttgggaagcttttgaaggagatcagcttgagcaacctggagccaaatgttgtcacttacaactgccggatacagtggttctccaagaaaggcgagacagtcaagggggaggagctgcttgatgtgatggaatcaaaggagatagcgccaaattacgttacctacaatgctctcgtgcaggggtactgcaaggagggaaatgttggggcagctatgcgtgtgttcaagaggatgaaagtgatgaagaggcgggagggaaggagtgacttgggtgtttctgcacattcacaggtatatgtggtgctgtttaggagtttggtggagaaagagaagcttaatgacgcgctgtggatttgtaagagctgctttgcaatgaaggcagcaccaccgtttgaggctgttaaaggtttggttgagggtttggtgaaggcaggcaggtcaacagaggccaaggatgttgttgccaagatggagtttcttgtgaaaggcgatgccaaacttgcttgggggaaggttgttggtgagctttcttttgaagagggatcaccgaatttgaatccatgatttgctagaggcatctgtgttacttctcattaattcatgcattttggagtttgaatgatgatggtgaagaagataagcgttcaacgtgggatccaatgttgccttcttgttgtcactggactgcattttgcaaggtttgcggttagatcaggatgtaatggatgctccgtttacttcaaaacttgcttaattttatgtcttgtaataatattcgaaatgatgttaaagtttaacatttgttgaagtgtttagggcatcatgatagatgatacatctactatctatcattgtaacatgcttgttgtaatgtgtatttcatgcctcatcacataattgctctgcttttccttagaaaata

SEQ ID NO: 89588 - DNA, 1326 bp, Zea Mays
gatgaggtgttgattgctggatttgggcgtaagggtcatgctgtgggagacattcctggtgtcaggttcaaggttgttaaggtttctggtgtgtcgttgcttgcactcttcaaggagaagaaggagaagccaaggtcagcttggcggaaacgttctcctttcttcacaaactatgttgattttctgaccaagtgtccttacttacagatccatagaaaatatggtacaggtggtagcacagagaagttgaagctctgtgattttgctgtgggcacattctgtttattgtcttatgatatggcagaatcacggactgtttcgaattctgagaataagcgcactctcccagcatggatgttgaaagcaacctcaggtaatcaaacagcaaagaccgcagatcagaataagcaggcactggaatctgctgacattggggctcttgatcagagcaaacccatcaaaaggaacaacagacggccgctaaaaaacttggattcagtagctgctggtgaactgggagttttgcagcgatgtgagggtagaggaaaggccagaaggaagagcaaggatgctgtcaaagatgaagttgaagaaattgtggaattaaagagtaagaatgcaagaaaaacgagtggaagaggtgctgcaaagaatagcaagaaacggaagttggataatgtcgaatcaggaccatcatcgccagtatcaactgatgatgacatagagcttactgttgaggatcttgtgagcatagctgaagagtttgttaatgctgataaacagaagcaatgtgaactacaaactgtggaggttaccaggcataaagagcatcatctgtgccctaaaatttccactgaggtagatagagggcagtcagtagtaaatgctcaatcagtgaaaggatcgatgcagtgcgcaacagccacaagtaatacaggtgcaatcaagtatacagaagatgagagcactagccatcaagaagtgcaattttcaagtttcaaaacgacagaagatgttgctcaggatatgataaacctgttattcggtcacctattgagtaaacctgttgccaacacagagaagtctgatcctgtagaatcaacgactagaactgtaaatcaggtgccagaggggagaggctggcacagcgaagtaccaaggcaggaggaacctgtgaagaaaccagagcctgtagtagaatcaatgcctacgactataaatcatgtgccagagaagaaagactggcgtagcgagttaacaaagctgggcgaacctgtggcaaagaagaagagcagcctcagggacaaggtggccttgtttctttga

SEQ ID NO: 89589 - DNA, 495 bp, Zea Mays
atggagcctttgcagaagttgctggagactgacacagctgagagtgtcctgttcccaatcatttacagtgctgcaaaactatggatcagtatgggcgctgatgatgcagccatcttcgtaaaagtggtaatggatcgttgtctatctttgggaggatcagaagaggtttcctttggacaagctctggcgatcggcagatgcaaaaatttgggggcattgagtgtcagacctggatgtgcacagattgccactcccggtaatgctgttgacaggcagttcatcaaggccaacaccatcctcactcttggggatgaggaataccaatggacatgggtgtcgaacttctacgccgcatgcaacaagaacagaacggtcagggacgttttgcacggagtatgtttcttgaatacgaaaacagtgacagagatggcagaattgttatgctatgggactttctcagtaacagaaagacctgacgagaatgaaaccggttag

SEQ ID NO: 89590 - DNA, 1105 bp, Zea Mays
tatagacagagcctgcggcacccgttcatcacaaatcagacggcctagaatccctcagggctaaaaccctaaactagaaatgggttcgcagtgggcagtggcagccagccagtgagctagcctcccgagccctatctatccttttctcggcacctcgcgggtctcccgtccgccccgtcccgcattcgtatcctctcctcactctcgccgccgccgcttcccctgcgccccgagccaagatgaatgttgaaaagctcaagaagatggcaggtgctgtgcgcactggggggaagggtagcatgcgcaggaagaagaaggcagtccacaagactacgaccacagatgataaaaggcttcagagcaccctgaaaagaataggagtgaacaccattcctggtattgaagaggtcaacatctttaaggatgatgttgttattcagtttgtgaatcctaaagtgcaagcttcaattggtgctaatacatgggtggtcagtggaactccacagacaaagaagctgcaagatctgcttccgtccattatcaaccagctcggccctgacaacctagacaacctgcggaggcttgcggagcaattccagaagcaggcccctggtgcttcaggtgcagaggctggcgccagcgctggtgctgctcaggacgatgacgatgacgttcctgagctcgtccctggagagacatttgaggaggctgcggaagagaaaaaggagtcgtcatgattttgccacatgcccgcccttttgaagggcttataagtaaatccttgcgtagaagggacatgttgaactctgacctaccttatttgtgcctgcttacggttatgtcatgaacgagaatttggtagtccagcgctggtccccctttttcacccatatccccgtgcttgtgtggtaaaagtcttgttaatgttaaaggccacacttaaaccaaatcaaggtaccatgtctccggtaccatgcttcacgaagatttacccctaggtaccatgcttcacgaagatgaataccagatgtcagttcacctgccatttgtttgcctggactgtaggaaatgtcatcatttcatgcgctcacgtttcatctgttat

SEQ ID NO: 89591 - DNA, 1578 bp, Zea Mays
tatagacagagcctgcggcacccgttcatcacaaatcagacggcctagaatccctcagggctaaaaccctaaactagaaatgggttcgcagtgggcagtggcagccagccagtgagctagcctcccgagccctatctatccttttctcggcacctcgcgggtctcccgtccgccccgtcccgcattcgtatcctctcctcactctcgccgccgccgcttcccctgcgccccgagccaagatgaatgttgaaaagctcaagaagatggcaggtgctgtgcgcactggggggaagggtagcatgcgcaggtgcttatttttttatattcatcaaagatgacatgtcaacatttcttcagagctttactttctatttagtgttttgctttgtgttagcacgtacatttctgttgcactcacaacctctgaatagattgacttatgtggagtaattactcttttggtttaacaggatcatttttgccaattacttttgtttatttatgtatgcgttttttttgtacatgaacttgcctaaaagaatttattatttatggtactgtctgcagacttatgcaattatacctggtaatcagctatgataaaaaatggtagctaaatgatgttatatagttcaaatcatgttgttctactcatgaacttacttaatcatactcgtgctgttatatatatatggtaccattgctgtcatatgtacggtaccggtctaggaagtcctggattcttacttataagttataactagctttggttggtggcaggaagaagaaggcagtccacaagactacgaccacagatgataaaaggcttcagagcaccctgaaaagaataggagtgaacaccattcctggtattgaagaggtcaacatctttaaggatgatgttgttattcagtttgtgaatcctaaagtgcaagcttcaattggtgctaatacatgggtggtcagtggaactccacagacaaagaagctgcaagatctgcttccgtccattatcaaccagctcggccctgacaacctagacaacctgcggaggcttgcggagcaattccagaagcaggcccctggtgcttcaggtgcagaggctggcgccagcgctggtgctgctcaggacgatgacgatgacgttcctgagctcgtccctggagagacatttgaggaggctgcggaagagaaaaaggagtcgtcatgattttgccacatgcccgcccttttgaagggcttataagtaaatccttgcgtagaagggacatgttgaactctgacctaccttatttgtgcctgcttacggttatgtcatgaacgagaatttggtagtccagcgctggtccccctttttcacccatatccccgtgcttgtgtggtaaaagtcttgttaatgttaaaggccacacttaaaccaaatcaaggtaccatgtctccggtaccatgcttcacgaagatttacccctaggtaccatgcttcacgaagatgaataccagatgtcagttcacctgccatttgtttgcctggactgtaggaaatgtcatcatttcatgcgctcacgtttcatctgttat

SEQ ID NO: 89592 - DNA, 977 bp, Zea Mays
ctcagggctaaaaccctaaactagaaatgggttcgcagtgggcagtggcagccagccagtgagctagcctcccgagccctatctatccttttctcggcacctcgcgggtctcccgtccgccccgtcccgcattcgtatcctctcctcactctcgccgccgccgcttcccctgcgccccgagccaagatgaatgttgaaaagctcaagaagatggcaggtgctgtgcgcactggggggaagggtagcatgcgcaggaagaagaaggcagtccacaagactacgaccacagatgataaaaggcttcagagcaccctgaaaagaataggagtgaacaccattcctggtattgaagaggtcaacatctttaaggatgatgttgttattcagtttgtgaatcctaaagtgcaagcttcaattggtgctaatacatgggtggtcagtggaactccacagacaaagaagctgcaagatctgcttccgtccattatcaaccagctcggccctgacaacctagacaacctgcggaggcttgcggagcaattccagaagcaggcccctggtgcttcaggtgcagaggctggcgccagcgctggtgctgctcaggacgatgacgatgacgttcctgagctcgtccctggagagacatttgaggaggctgcggaagagaaaaaggagtcgtcatgattttgccacatgcccgcccttttgaagggcttataagtaaatccttgcgtagaagggacatgttgaactctgacctaccttatttgtgcctgcttacggttatgtcatgaacgagaatttggtagtccagcgctggtccccctttttcacccatatccccgtgcttgtgtggtaaaagtcttgttaatgttaaaggccacacttaaaccaaatcaaggtaccatgtctccggtaccatgcttcacgaagatgaataccagatgtcagttcacctgccatttgtttgcctggac

SEQ ID NO: 89593 - DNA, 2819 bp, Zea Mays
cgccccggcaggcccccgccccacgcgtgcgagagagagagagagagagagcgcgcgcgcgccatgggagaagagaccctcgttgccatgccgcccgcgctcccccaccaccacgcccccacgccgccacagccaccgtcggggccagttgctgcggataagggggaggaaggggaccatcgtcgtcccgcagagggcgtcgccgggccgccgcaagtccagccgcggtcggtgaccccgcacgggctcggcggcgaggagggggacgtatactacgcgcgcaagatgctccagggcgcggtgctgcggccgccgccgcacctcccgcagccagaggcgccgccggggctggccagggcgcggtccacgccggcggcgccgcacgagtacgcggcacaaggggatggcgaggacgaggagcgggagagcaagaggcccgtcgagcggtcggcctccgcgaactcggcctccacggcggtcgtggacgtggagtccatcgggcggttcttccgcgaccgccgcgacgtgctgtcgtcggccataacccgccgcatctcgtcgctcaaggagtcgacctcggcggcgaaggccggcgcctacggcgtgcaggagatccacctgcccaacgtcaaggtcacggtgcgcctcaaggacgcgatcgccgccgccgacgacaccgacaccgacacctacgacgtcgggtacaccttctcgggcggccgcatcaaaggccgggtcagcttcttctcccgctcgggctgccgcgactgcgccgccgtgcgcgcattcttccggcagtccggcctgccctacgtggaggtcaacctggacgtgttcccggagcgcgaggccgagctgggctcccgcgcgggcgccgcggcccgcgtgccccagatcttcctcaacgagaagctgctgggcggcctcgtggtgctcaactccctgcgcaacggcggcgagttcgagcgccgcgtgcgcgacctcgcgggccgccggtgccccgactcggcgccgcgcgtgcccgtgtacgggttcgacgacgacgccggcaaggcggacgaggaggccgaggacgccatggtgggcatcgtcagggtgctccgccaccgcctgccgatccaggacaggttcgtcagggtgaagctcgtcaagaactgcttctccggaaccgacatggtggacggcatcgtgaaccacctggactgcagcaggaagaaggctgtggagatcggcaaggagctggcaaggaagcacttcatccaccatgtcttcagggagaacgacttcgaggacgggaaccagaacctgtaccgcttcttggagcacgaccccgctgtacccaagtactacaacttccggggctccaccaacgacggcgagcccaggcccgccgcggccatcgggcagaggatgaccaggatcatgctcgccatcctcgaggcctacgcctccgacgaccgccgccacctcgactacggccgcatcgccgccagcgaggagttcagaaggtacgccaacctggtccaggaactgcagcgggcggacatgacccagctccccgcggaggagcggctgcccttcttcctgaacctgcacaacgccatggccatccacgccgtggtccgggtcggccagccgggcgccgtcgatcgacggcctttcttctcggacttccagtacgtcgtgggaggccacccctactccctcgcggcgatcaggaacggtatcctcaggggtaaccggcggcagccttacacgctggccaagccgttcggctccagtgacaggaggctggagctggcacagcggcgcgcgaacccgctggtgcacttcgcgctgtgcgacgcgacgcggtcgagcccgaccgtgcggttctacacggcgcagggcgtggagccggagctccggcacgcggccagggagttctttctccacggcggcgtggagatcgacttggagagccggacagtgcacctcaccaggatcatcaaatggtacagcgctgattttgggcaggacagggacatcctccggtggctcctcaactacctcgacccgaccaaagccgggctcctgtcgcatctcctgaacgagggcggcccgatcagcatctcctacatgaactacgactggtctctgaacgtctgagcagaatccgtccgggatacgtacagcagtgtaacatgcattggggtggtggtggcacgatacattgagaggttcatggccacgatacattcagcatgctgagcttattcggcagagagaagtctagatatgtatatagaattttgagtgttgattttgcactcaaaaaggatatgccccgcgtgcaacagcatccctgtcggagaaatctctcccggtgatgccatatgccgtcgtcgttaagggcaagttttctgtattccagttgctccaacagggaagaaagagtagatgtatatcatttatgtatgctgggaaaatacactgttctggtcgccgtgaaatttccgcagtggagattgtgtgtatgcgtcctggtgatgaggtagagttggatggcatatgtgcttttctgttcttagttgagacgagttcttccgtatgcactccatctcctagctgcagactaattactttcatgcggtgggtgtttgacggaatgcttcactagcaatctgtagaaacatatgcttcatgggatgatgtatcataagtttatcctataaattttggtgaaattaattgattcatcatttatatactaattattagtaatgtggaatgagatgacgacagatcaacttattctattgtataaaacaaataaaaaa

SEQ ID NO: 89594 - DNA, 932 bp, Zea Mays
aaaccctaatgctcatttcttctcaatctccccagccgccacagtaaaaaaaacacagccgccagggagcttcgacggatggcctctggccgatcgagcctttttttttttattctcatttcttcatttctattacgtgctctcttttccttctgtttttgtacaccgcggtgagctgctctctgtgtattatcttcactagtaaagtgagaagctaagtgcctgtgctgtattcttgccaccgtgatgcacaagaacgagaacggttcttggtctctatttcttctctcttatccttcgtttggccgaacgtctgtttttttttttttttttttcggccggctcaccttcacacgaccgccaggaagcactggtggctggcctctggccgaccgcgccgccctgcacagagccgcacagccgcccatctctttgctgtttttctgtttcttgttgaagctcagggctccctctccactcagcagactgccaggacacaacggctgacctcttggtgtccggctcggccggcactgtgcacggcgaaacgggccccgcaggctctctcgccggcggtcgcgaccccacgggtgggcgctcggccgtcggtagaatcgttcgtcggtggtctgttgagccagtgacgttggccgttcttttcttttgaaccagtcagtgcatctgtgcacagatctgcgtgttcctgtttcttattcgttgattcttggtcgtggatcgttggatcctgagccctgtgcgccgtctctgttgacggatgaactggttagggttaggttattaaactctaaccctgaaatatcggtctgtttaccctaaaatatcggtctgttttgttctcgggcgatgaactatgattaaaaaaatgagttcaaccactgattcgagacctttctgtgtctcaaaaaaaaaaa

SEQ ID NO: 89595 - DNA, 2608 bp, Zea Mays
gcgtcgtgtgtctgggggctccaaccgaggttagcgtgggccctcccgatcaagggcccgattaaaggaacgatagttgggttaagcccaatccagtctctattgaccggctgtagaggacacacccaacactccaatctcaggggatggtggtgggggtggaggtcaccacggcgagatggatcaatggattagggggaacggagatctgaggagaaaaccaaaacactgccgagtaggaatacctgcgagaggaaatgcacaggggtcagcaagatctcgatgacggaggatgaagaagaagaacagaggatccacgtaagcaccggagtctgggtcgaagcacaccgacggcgacagtgcacggctatgccatcggcaacaactggcgaaagaaagaaatgaagaacaacccgagtcaacaacgggagaaggtgctaatggatttgaagtcaagctactaacgagaaatctcacgcgaaacggaggcagaggcacgaaggggaaccaaaagttgttaatggcgatcagcaaaagctgttgccatatctttaaagagctcggttcggttataataccacgaatgcaattatgtgcttcgtgttgctatttctacgatgccgcatccataccggatgccaaattgccaacaggaaatattgtaattgtaacgtcaaactttccatgctcgttcgactacaacgtgctgcggttgacataagggtcccacgtgttgaagccccaccgatcagccgcaccagcttccccgcacagccgtcgtcgttatccccagtccacaccggccgcgccgcagcggcccatcccacccgtcagcgtcggcgtaggcccccgccggctccttcctctcgccgtcgcgagaccgagcagccagtagcagcaggagtgggtgctccgtgccccgccatccaacaccaaaagtggaacccctcacacccacgcgaggtggtcgacactcgacggagagccgcaaaggaggaggagctggcggtggcgggatccagcaggccgcccatgtcgagcggcgcggacggatcggatccgatcacgggccttggcccgtcgacgatcccagagccgccggaccgtgagccgcctcatctacagtctccgtcgccggcggcgcagcaggaggtggcggcgtcgcaagccgagacgccggtgccagcggtgaccatcgtgatctcgcggccaggggaggaggttcagacgcctgatgcaatgggtggctccccggcgtgctccacgcaggccggtgacggcaaggctacagccacctcggtttcgttgaccgcttcggcggctgccaaggaggccgagttggcaaggtccgacagcttcgacgactacgagcaatgcaggtattcagtcggtgtgggattccctgcgcgcaagctcagggtattttagtgaattgcgagttggaaaggggacgagggtgtgttctgcttgggagtgttccaattttgtatgggtaccttgttaggtttagtagttgcgcgttttatccatctatgaatcacctgctatggctttgggtgctccctatcttgggggcgttgcttcctcatgcggtgtagtgattgtaggtgtatcaacaaatttccatttatgatgtactgattcatttcttgaagtcaccctagaacatggatcatgtcaactggactgtttactttagctgcccttttctgtctgtaactacaccaatagatttttgcctgcagttgggtggatgttgttcatcacatataacatgcgagcaataagtttgtgaacacgttcattgtcagtttatctgcatcttcattagtattgactttgccggtgcttgtgacatgtgcttatttagaggccatatattagtgcaattaggctgtcacagagtgcaaatgggactacatagcattcctgttagctatgatattttagggtctcgagggtatttaggcgttgatgagaatgtaggttatgcttccaatgcagttgggttgaccttgatccttgaatgtagaagcaaaagatattcgcaataagtttgctgatggtaagatcatttgtgtgtagaattattaaagattgggacttcatagattcaataattcaatgaataaatatgatatttgattcttggttatgaaaggctaactggcagctatgagctgcaggtgaaaaacaatacgaggaagaatgctggaaactgataatcaacttctggctgagtatttcttgtaccacaaatgtgctgtgagcatgaactgcatgcaccgttgctttgccatgtattgatgttcttgtgttgatctttttttatatactcattgcaagtaataacatatccaatctgttttctgctggctctttgcaatttttgaatatagataggagcactatgtttactaatcagaacaattatctttaggagtttaattttcctaatatatgtacctgaaataataacatatccaatctgttttctgctggctctttgcaatttttgaatatagataggagcactatgtttactaatcagaacaattatctttaggagtttaattttcctaatatatgtatctgaaataaaaaaaaa

SEQ ID NO: 89596 - DNA, 2195 bp, Zea Mays
gcgtcgtgtgtctgggggctccaaccgaggttagcgtgggccctcccgatcaagggcccgattaaaggaacgatagttgggttaagcccaatccagtctctattgaccggctgtagaggacacacccaacactccaatctcaggggatggtggtgggggtggaggtcaccacggcgagatggatcaatggattagggggaacggagatctgaggagaaaaccaaaacactgccgagtaggaatacctgcgagaggaaatgcacaggggtcagcaagatctcgatgacggaggatgaagaagaagaacagaggatccacgtaagcaccggagtctgggtcgaagcacaccgacggcgacagtgcacggctatgccatcggcaacaactggcgaaagaaagaaatgaagaacaacccgagtcaacaacgggagaaggtgctaatggatttgaagtcaagctactaacgagaaatctcacgcgaaacggaggcagaggcacgaaggggaaccaaaagttgttaatggcgatcagcaaaagctgttgccatatctttaaagagctcggttcggttataataccacgaatgcaattatgtgcttcgtgttgctatttctacgatgccgcatccataccggatgccaaattgccaacaggaaatattgtaattgtaacgtcaaactttccatgctcgttcgactacaacgtgctgcggttgacataagggtcccacgtgttgaagccccaccgatcagccgcaccagcttccccgcacagccgtcgtcgttatccccagtccacaccggccgcgccgcagcggcccatcccacccgtcagcgtcggcgtaggcccccgccggctccttcctctcgccgtcgcgagaccgagcagccagtagcagcaggagtgggtgctccgtgccccgccatccaacaccaaaagtggaacccctcacacccacgcgaggtggtcgacactcgacggagagccgcaaaggaggaggagctggcggtggcgggatccagcaggccgcccatgtcgagcggcgcggacggatcggatccgatcacgggccttggcccgtcgacgatcccagagccgccggaccgtgagccgcctcatctacagtctccgtcgccggcggcgcagcaggaggtggcggcgtcgcaagccgagacgccggtgccagcggtgaccatcgtgatctcgcggccaggggaggaggttcagacgcctgatgcaatgggtggctccccggcgtgctccacgcaggccggtgacggcaaggctacagccacctcggtttcgttgaccgcttcggcggctgccaaggaggccgagttggcaaggtccgacagcttcgacgactacgagcaatgcagagtttgtcaacagaagacagaagaacctctggtcgaccttggatgtagatgtcgtggtgatcttgcaaaagcacatcgcacatgcattgatgtttggtttcgtactagaggttcaaacaagtgtgagatatgccagcaggttgctgccaatatcccccctccagagacgcaagcaagtacaagttattgggtttggagggttgattcgacttatggaaggggacgaggaggacgtgaaaggggatggtttagcccactttgggttgcatttgcaatcctgattggtggtctcttattggatgtgctgatatctgtttctcttggtgtttccgcacttcctgtcaatataataattggcgttcttatagttctcggattgggcaccgcccttcgtcttgctctcgagtgctgccaggaatggggctcaaggaggaacgtaggcaatatgccgaggctggagaacataccgccgactgggtaccaccctgcagtagtataatcattatgggacttgtaaatagcggtaggaacatctaaccttgtgctggctcttggattgtattagctttagctcacacgttgctcgttaatgtcgagctcaaattcaaagcttgttgattacgatcgggtccatactccactagtccaatgcaatgtaaatgcagagttactgatactcggtcttcatggactagtgctgatgccgaattgccagcatcttaattggttgtctggctaatcgttcagcatgacagcgcttggtttcttcttccttgtacggtttgctctcacaaatcacttgttgtgtttcatctt

SEQ ID NO: 89597 - DNA, 1137 bp, Zea Mays
ttcatatctttcaatctgtattggatcatttggagaatgtatgcctctagttcatatgtatatccattgtcgtttatgctcgaactaacaaactggtctatgtttatgtttagccaaattaacctacctatcgcccgttagtatctgtttgtagttttatgaacacctcattaaatataataacaactttaattggctttgttctggaagacttgtgttccacaattacataaatgaaggtcattctgaaaattgaggaggcagaatattgttaaaagtacaagtcgaattcctgtttctagtagtgaaatttacttgttttcattcaacagacaagttattgggtttggagggttgattcgacttatggaaggggacgaggaggacgtgaaagggtatttttatcactggatatgataaataagaaacagatgcattaacctgactctttctctgaaaaaatgaataatgatcatgtaaccctgtgcaagttttattttttattgaacctgcattgttcattctgcttcatattttattttgtttctctttttttgtgtagggatggtttagcccactttgggttgcatttgcaatcctgattggtggtctcttattggatgtgctgatatctgtttctcttggtgtttccgcacttcctgtcaatataataattggcgttcttatagttctcggattgggcaccgcccttcgtcttgctctcgagtgctgccaggaatggggctcaaggaggaacgtaggcaatatgccgaggctggagaacataccgccgactgggtaccaccctgcagtagtataatcattatgggacttgtaaatagcggtaggaacatctaaccttgtgctggctcttggattgtattagctttagctcacacgttgctcgttaatgtcgagctcaaattcaaagcttgttgattacgatcgggtccatactccactagtccaatgcaatgtaaatgcagagttactgatactcggtcttcatggactagtgctgatgccgaattgccagcatcttaattggttgtctggctaatcgttcagcatgacagcgcttggtttcttcttccttgtacggtttgctctcacaaatcacttgttgtgtttcatctt

SEQ ID NO: 89598 - DNA, 990 bp, Zea Mays
ttttgttttttttttctatcccacggcggccaagctgtggaaacgagggagacgaggaggacaagggaaagaaagcctaccggctcggcggctccggctcacctcccacacccccaaaaaaaatctcgcgtgccgccggcggccaccaccatcactgccatgatcagcatcctcgcgcaggtaattccccttaggccctctaaccactcgagaaaccgacgtggtcatccttggttattgtggctgattcggttcgttttctcgtggcttggcctccggatctgcgctcaggagcgcctcctcgggttcgccctgggttccgtctccatcggcggcttcgtcctccaccagcgccgggccatctaccgttcaatcgctgaagccgacgggtcgccctacttttaccaggtcagcatctggttacttcctcctagcctacagcccagtagccgtctgctttctgaactagtgtgacgattcatggcttaattttacataggaactgtgcacgacaaacttccatcagaaaagtgttgttttttgttttgtttataacgtgactttttgccgctccctagcttgacaatagacaaactataatctcagcaggtttcatttcttgggggcaattacagattgttagcttgaagaattatcttggcctttttatgacagtgcagtaaaaatagtccttcgatcaggcagacatcgcaaacacatataataagaattttttttcactcttttcactttgtacaacatattttggttgaaaaaattcaacttctaagttttggcaacaattcatcaaattatactccctctaatatttgaccaggatttaaattttgtcccaaaatacttgacactctgacttcccaatacacctttatcttttatcaatgcacatttttctcttcccaatacatctactccctccggtgtcctattgtttgtagtttagggcaacggcacggtctccaaaatata

SEQ ID NO: 89599 - DNA, 859 bp, Zea Mays
ttttgttttttttttctatcccacggcggccaagctgtggaaacgagggagacgaggaggacaagggaaagaaagcctaccggctcggcggctccggctcacctcccacacccccaaaaaaaatctcgcgtgccgccggcggccaccaccatcactgccatgatcagcatcctcgcgcaggagcgcctcctcgggttcgccctgggttccgtctccatcggcggcttcgtcctccaccagcgccgggccatctaccgttcaatcgctgaagccgacgggtcgccctacttttaccagcctggtgaaattgccagtcgaagaagctcaactgaactggctcatgtatggaacaaggcagtggacgagacccttgggcgacttgttgtgtaccttagttcgcgtgggtggtgattcaagctccatgttgaacatggtaaccgaggaagactctttttcaagccactgatgtgctcatacttccctgtacccggattgaacatgtttttttttttaaaaaaagagatacttccaatgaccgatttatctgaaattctgaaccgagctgattgattctaccgatgcttccctgagcaggtggatgttacttcgaggtcattgttgtagccctgtgaaaggcaggactcgtctaactattttttacatatatgtattggtaataaagaatgtatgttactttgctgacgttgccaacacttcaatggaaactatggtcgttctctaatggtcagtccatccctggtcaccctgagtgtcagttctgctcttccatctctaactaaggtctcagactgtcattcactatacctgtatataatctcagtctccgattcagttttac

SEQ ID NO: 89600 - DNA, 2044 bp, Zea Mays
cccgttccacccgcaacacttcgcactcttctccccctcttctcttctcgtagacggcagatctccaggggtgtcgccgtctccggccacggcggccggcgctcggagcatcggtggggttcggtgcggaggtgggcggccatgtacaagaaccagctgcaggagctggcgcagcggagctgcttcaacctgccgtcttacacgtgcctgcgggaggggcccgaccatgcgccgcggttcaaggcggcggtgaacttcaacggggagcagttcgagagccccggcttcttcagcacgctccgccaggctgagcacgccgccgcggaggtcgcgctcgccgcgctcgcgcggcgcggcccgtcctactcgctcgccgcccgcatcctggatgaaacaggggtttataagaaccttctacaggaggtagctcaaagagttggggcgccgttgccattgtatacaacagagcgatctggcgttggccacctgccggttttcacatgcactgttgagctagctggtatcacatttacaggtgatcatgctaagaataagaaacaggctgaaaaaaatgcagcttcagctgcatggtcagcactaaaacaattggtacgcgaggaagtgaattcatccaatgagacagaaaacagtgatgagcaggagcagatcaggattgcccgagccctcctcaactatcgcttgaaggagaagatggcgatggccaattatcctcatgtttcaccattccctaagaaatttcccatgcagccagagaggaagccttcttttggtcaatcttctcagtccagctactcaaagattctccctctattccgccctaaatctaactcaagatccagaccagagtcaccagcatctactgatggcgcatcacaaatgcctggccgggccatggatatccacactccaagcccaagatcaagatttccagctgcagaggcagccccctacgtgccagttgggcacttccgtatgccttgccacagcatggctccttcagtcacaattaggactgctgttcctgtgttctctgctccacctctcccaccgccgtctgcacgcccgcagcagcttcctccactcatgagccacccaccaccgattcggatggcatccccagttcgcatgaggccagcctctccaatgtttgcctcctcagctccagctcaagggccgaaacttgtgaggcctgttcaattgaaggatgtgcaagatcaaccaaggaaggaaacagctccatccgtgatccctgttcaggtaaaggacgtgcaataccaatcaaggaagagctcaatgtctcctgtgattcctgtcgtggtaaaggatgcacaacgccagcctctcccagttcagacgaaggatgtgcaaacccaaacccaagccccaaaggaatcacttgcagatccaattccagcaatcaggcctgcagtcaagattgatttgcctgctcaaggcaagaaggaagcttcagctggtgctaccagcgaagcgccatcttctgccactggcaataatggtgctatggaacgcggtacatcatcagacgttctcttggcaaggcgatcaagggctgctgtggacggggatggcgacaaggtggaagcaaagcacgaggccgaggctcaagcggtggcagaggcagccatcaggcagctggagatcaattgacttcagaaaatgcgcgccaccatcttctcccagattttgtaattagctgccttgcctcctgtgcacattccgttctgcttagtccgtgtatgtcttgttccggttagggctgtctgggcaagctgcattgtggtaggaacacctaggttttctgttgaggagaaaaaaacatggagtggtggtaggcggtttgcccagtgtttagttggagacggttattacttcgctggatatgcaattggtctgcttttacccccgaatgatgaggtggactgcgaggtgcctctaagggaaggattctgaattcctagttattgtcgaaccgccgtaatcctatccagcttcttttttacta

SEQ ID NO: 89601 - DNA, 1588 bp, Zea Mays
caggatgaaacaggggtttataagaaccttctacaggaggtagctcaaagagttggggcgccgttgccattgtatacaacagagcgatctggcgttggccacctgccggttttcacatgcactgttgagctagctggtatcacatttacagtggtacgcgaggaagtgaattcatccaatgagacagaaaacagtgatgagcaggagcagatcaggattgcccgagccctcctcaactatcgcttgaaggagaagatggcgatggccaattatcctcatgtttcaccattccctaagaaatttcccatgcagccagagaggaagccttcttttggtcaatcttctcagtccagctactcaaagattctccctctattccgccctaaatctaactcaagatccagaccagagtcaccagcatctactgatggcgcatcacaaatgcctggccgggccatggatatccacactccaagcccaagatcaagatttccagctgcagaggcagccccctacgtgccagttgggcacttccgtatgccttgccacagcatggctccttcagtcacaattaggactgctgttcctgtgttctctgctccacctctcccaccgccgtctgcacgcccgcagcagcttcctccactcatgagccacccaccaccgattcggatggcatccccagttcgcatgaggccagcctctccaatgtttgcctcctcagctccagctcaagggccgaaacttgtgaggcctgttcaattgaaggatgtgcaagatcaaccaaggaaggaaacagctccatccgtgatccctgttcaggtaaaggacgtgcaataccaatcaaggaagagctcaatgtctcctgtgattcctgtcgtggtaaaggatgcacaacgccagcctctcccagttcagacgaaggatgtgcaaacccaaacccaagccccaaaggaatcacttgcagatccaattccagcaatcaggcctgcagtcaagattgatttgcctgctcaaggcaagaaggaagcttcagctggtgctaccagcgaagcgccatcttctgccactggcaataatggtgctatggaacgcggtacatcatcagacgttctcttggcaaggcgatcaagggctgctgtggacggggatggcgacaaggtggaagcaaagcacgaggccgaggctcaagcggtggcagaggcagccatcaggcagctggagatcaattgacttcagaaaatgcgcgccaccatcttctcccagattttgtaattagctgccttgcctcctgtgcacattccgttctgcttagtccgtgtatgtcttgttccggttagggctgtctgggcaagctgcattgtggtaggaacacctaggttttctgttgaggagaaaaaaacatggagtggtggtaggcggtttgcccagtgtttagttggagacggttattacttcgctggatatgcaattggtctgcttttacccccgaatgatgaggtggactgcgaggtgcctctaagggaaggattctgaattcctagttattgtcgaaccgccgtaatcctatccagcttcttttttacta

SEQ ID NO: 89602 - DNA, 438 bp, Zea Mays
accggtattgaagtgggttgaggtgctgaccacgatgtcacacaggtccgcgacgaagcacgagctacaacgaggaattcctggggccactgcgcctaatcctggttggtaaggcttcggtaatttccccaccagcacggtgaagatcacaggtgagcaatcgggtctcgagtggtggcgtggatgagaattcgacggtggcggtggctttcggctatcgaccctcttctgtgcggcggagtctcacggcggtgatgatcgatccaaggagcagagatggggaaggaggtgctctcatcatggatttatagcttcagcggagatccaggatttatattcccagggccgtggacatctgtcgaagccactgcaatccgaccagaggaaatcttggccatctctgttgtagcacggatctcgaaacgaacgagcccacca

SEQ ID NO: 89603 - DNA, 544 bp, Zea Mays
aaacgtccacaggttatctctcccgtgccttgaagtgtctgctacctctccatggtgggcatcgtactgccgccctggccctgcccgaggtgtccagcctcgtcgtgctgatctccactggcctgggccgtgtcctcaatggagcgtcctagagcccctcgtcgccgtcgggcctgccgcgaccttcgccatcacgttctatgagcgcccctgctcgccgatgcactagagcttgatgtcaagccgggtccctccaccgccacctcgcccgagcaagatgtgcagccgcagttgccaatggcgccctcccagcaccctccgtccatgggcaactgatgcttccttcccgcggtcttggttttcttggtccttcgatctgtggtttttgttgtgggaaacaaactgattttgccattacatgatcgagatgagtcgtacgagtgttgtgatgtttaattggtcatttgaaaaacaaggttcagatctgtatcttagaaccatgcaaggcgtcgtgattgcatttgaatacgaccaccatttgtta

SEQ ID NO: 89604 - DNA, 608 bp, Zea Mays
agtagtagtagtatttaacttcaccgacggcaggcgcttcggtcccaaacgaaatcgctaggccgttgcgccacccttccgccgccgcgtgcgcgccatttaagcaggcaggcgatcagctctccaccacgccactgtcccgacgagagcaggagctagctcgcgtcgagtcatattttctgcctaaggtacgcccagctgcgagactattcttctgctgagccaagcaggcaaagcacgcgacgacggtgtcccggaggccgtagtctctggtgccgtcgtcgtcacttgcgtgaaaactgaatatcagaatatcagatgcacgactcgtttatcgcttttgtactcaggtcggggtcgcgccgtacgacgcaggcgctgcttggagatggagctggtgctggtgatctcgctgccgctcgtggccctcgtcgtcatcgtcgccatcatcctctgcatcatctgccgctgatcgcagacgatggcctcttcagcctgcacggccgtatgcgttgcgacgccggcgtcgcctgctcatcagtacctcaattgttttgtaaccacaaattaaacacataaagaaccatcttgctgtgtctgcaccaaca

SEQ ID NO: 89605 - DNA, 705 bp, Zea Mays
agtagtagtagtatttaacttcaccgacggcaggcgcttcggtcccaaacgaaatcgctaggccgttgcgccacccttccgccgccgcgtgcgcgccatttaagcaggcaggcgatcagctctccaccacgccactgtcccgacgagagcaggagctagctcgcgtcgagtcatattttctgcctaaggtcggggtcgcgccgtacgacgcaggcgctgcttggagatggagctggtgctggtgatctcgctgccgctcgtggccctcgtcgtcatcgtcgccatcatcctctgcatcatctgccgctgatcgcagacgatggcctcttcagcctgcacggccgtatgcgttgcgacgccggcgtcgcctgctcatcagtacctcaattgttttgtaaccacaaattaaacacataaagaaccatcttgctgtgtctgcaccaacagcttgtcttcgtaaccaagcgactagagatttctccagcgtttcgagtgagtcttgatgtggccacagatgtgggtaagcttgtactatcagttcactgatgagtgacgagattgccagtccgttagaggattccgcgcgccgtcacctcccgatatcattgccccagcagtttgagcctttcagggatgggatgctgttcatcccgcgctccatcctgtaggttcaggtttcagggttgttcatgttcttcatgatcc

SEQ ID NO: 89606 - DNA, 2587 bp, Zea Mays
aagccggtcagccttgcgggttgcggtctcgccgccgacgccgggcgccggggattgccgcctgcccgccttgctggagacgggagacgccatgtccttgctgctcctgcccctctgtcgaacctccgcggaccgcgccgttccctggttgtcgtaggacgtcggcaggagcccctccgccgtcacccgtcagacgcgccaccgcggcgccgcctccccaggctcccctgctctgctccacagcttcagtgctccgtggtaagtgtctaagtgataacagagttggtaggatagttactttgttgataaaattaattatttagtattttggtttggtcaaatatttgctaggctagttgataaaaataattcagtagcctctcgatcctggatccgccactggtgtccgtaaagattgaagcatacttctgatggcagtctttccctggatttaggcagtcgtttccactagtgatcaccaaaagttgtttcataattatactaatttttttccattgaagataaaatatttcatgtaggttttgtatcgaagtccagtagtctgatttaactaggagaaccattgatgtacttgtactccagatcggagtttgtagcccgcacaaggtagctttctttaactgcctcactctttagagccttcggttccatgtcagtatgtcaccaactcacgatgacaaactggaatttggaatgacatctgcttgtgtggaaatttcaaagccgaataaactatctcttcaggcttcatttgtcaaagattccaaagtatattaacatagccacccttcgttttccattggaatcttaacctgtaaaattacgccggtgcaaatgatgatggcatcaacacagccgtgactctcagatgactagacacatccgcacgcaaagatagacaaacatgtattgattatttgctgcttagtggttagatattgcaacttaagtactttgggaattgggaggcacagaagagttgacctggacttttaggttatttgctaatgacataaaagatttaatatgtgcaaggttgttcagttagagagatctttttttttgggccatgaagctgtataaaatttagacgtcatatacttgtaatgcttccagtgctaggaaatttcttgtggcgtagacctctgaactctgtccttttgcgttggccctagcggccaaaaagaagaaacctcacctcaatttccaggaatttctgaaacacttacacatagttccacatataacgtgcgatatcacctgtccatgctgaagcaagagcaggaagactcttccagtaatcatgggtgcatgtgcctcttcatctcgtggtaacaccgacttggttttcttttctgctgatattactctcttggtatggtcactcgctatacggattgcactttcctcccaggtcgacccaaccatggcaagaaccagaaatcagcaaaggtcgcggcaattccatgtactccggcagcgcaggtaggtcgtggtgctgcctcttctgaaatggaagagaagagcagcttcatttggcaaatcgatggcttctcctcgcttcttgacaagcaagaaggatggaccaactccggatattttaagatcaaggaccttaattggtacttgcagttgaacctgaaggaccggaagagtggcgacgaaagagaatacgtctctcttatcctcgtgctgtcaaaaacttctggtctggaacccgacaccattgtcgaagcatcgttcaagctcttgatatacgatcaagcatacggacgacatagcgaacatgaatttagccacagattccagactacagagagcagcaggagctccgggatctcatgcatgatcctcgtctacacactcaaggaaccctcctccggtttcatcgttggtgacagctgtgtcttcggagtggagctcatcaagttcaccactgctaaagtcaaggacggttcaggaacgctgcatgttcagaagagaattggcttctgtagtgcccgggaggcctacacctggatcatcaatgacttcttaagcctgaaggggcggtgctactcaccggagtttgagatcggtggacacaaatggtacctgaccatgtacccttctggcactggcatcgacggtgataaggaaattctctccctctacctgcatatggccaagccaaacggagacgcttccctccagaactctggggtgcttgtagaagtcagtctgtccatcaaagacaaggtgaccagcaatcgcaaaacaatgacaggccggtgccagctccaagcgacggagggcgaaggctggggatggtcaaatttcatggcgacgaagtctgtgaaggactggtaccttgtgaagggcagctgcttaatcgaggcagatgttgccattcttggatcgtccaagatgaattagggatcatacgactctctacttttgtgcgtgtgccgagccaataatggaattgtgcagcgttagaccttatctgtttcatccctaaatcatagtgattaggaaggattggagaggattgaggagaattttgactgttaggaaatttaatccc

SEQ ID NO: 89607 - DNA, 1508 bp, Zea Mays
aagccggtcagccttgcgggttgcggtctcgccgccgacgccgggcgccggggattgccgcctgcccgccttgctggagacgggagacgccatgtccttgctgctcctgcccctctgtcgaacctccgcggaccgcgccgttccctggttgtcgtaggacgtcggcaggagcccctccgccgtcacccgtcagacgcgccaccgcggcgccgcctccccaggctcccctgctctgctccacagcttcagtgctccgtgcaagagcaggaagactcttccagtaatcatgggtgcatgtgcctcttcatctcgtggtcgacccaaccatggcaagaaccagaaatcagcaaaggtcgcggcaattccatgtactccggcagcgcaggtaggtcgtggtgctgcctcttctgaaatggaagagaagagcagcttcatttggcaaatcgatggcttctcctcgcttcttgacaagcaagaaggatggaccaactccggatattttaagatcaaggaccttaattggtacttgcagttgaacctgaaggaccggaagagtggcgacgaaagagaatacgtctctcttatcctcgtgctgtcaaaaacttctggtctggaacccgacaccattgtcgaagcatcgttcaagctcttgatatacgatcaagcatacggacgacatagcgaacatgaatttagccacagattccagactacagagagcagcaggagctccgggatctcatgcatgatcctcgtctacacactcaaggaaccctcctccggtttcatcgttggtgacagctgtgtcttcggagtggagctcatcaagttcaccactgctaaagtcaaggacggttcaggaacgctgcatgttcagaagagaattggcttctgtagtgcccgggaggcctacacctggatcatcaatgacttcttaagcctgaaggggcggtgctactcaccggagtttgagatcggtggacacaaatggtacctgaccatgtacccttctggcactggcatcgacggtgataaggaaattctctccctctacctgcatatggccaagccaaacggagacgcttccctccagaactctggggtgcttgtagaagtcagtctgtccatcaaagacaaggtgaccagcaatcgcaaaacaatgacaggccggtgccagctccaagcgacggagggcgaaggctggggatggtcaaatttcatggcgacgaagtctgtgaaggactggtaccttgtgaagggcagctgcttaatcgaggcagatgttgccattcttggatcgtccaagatgaattagggatcatacgactctctacttttgtgcgtgtgccgagccaataatggaattgtgcagcgttagaccttatctgtttcatccctaaatcatagtgattaggaaggattggagaggattgaggagaattttgactgttaggaaatttaatccccttaatccctcctaacacccttgctttagggggtaacaaaaa

SEQ ID NO: 89608 - DNA, 1704 bp, Zea Mays
aagccggtcagccttgcgggttgcggtctcgccgccgacgccgggcgccggggattgccgcctgcccgccttgctggagacgggagacgccatgtccttgctgctcctgcccctctgtcgaacctccgcggaccgcgccgttccctggttgtcgtaggacgtcggcaggagcccctccgccgtcacccgtcagacgcgccaccgcggcgccgcctccccaggctcccctgctctgctccacagcttcagtgctccgtggtcgacccaaccatggcaagaaccagaaatcagcaaaggtcgcggcaattccatgtactccggcagcgcaggtaggtcgtggtgctgcctcttctgaaatggaagagaagagcagcttcatttggcaaatcgatggcttctcctcgcttcttgacaagcaagaaggatggaccaactccggatattttaagatcaaggaccttaattggtacttgcagttgaacctgaaggaccggaagagtggcgacgaaagagaatacgtctctcttatcctcgtgctgtcaaaaacttctggtctggaacccgacaccattgtcgaagcatcgttcaagctcttgatatacgatcaagcatacggacgacatagcgaacatgaatttagccacagattccagactacagagagcagcaggagctccgggatctcatgcatgatcctcgtctacacactcaaggaaccctcctccggtttcatcgttggtgacagctgtgtcttcggagtggagctcatcaagttcaccactgctaaagtcaaggacggttcaggaacgctgcatgttcagaagagaattggcttctgtagtgcccgggaggcctacacctggatcatcaatgacttcttaagcctgaaggggcggtgctactcaccggagtttgagatcggtggacacaaatggtacctgaccatgtacccttctggcactggcatcgacggtgataaggaaattctctccctctacctgcatatggccaagccaaacggagacgcttccctccagaactctggggtgcttgtagaagtcagtctgtccatcaaagacaaggtgaccagcaatcgcaaaacaatgacaggccggtgccagctccaagcgacggagggcgaaggctggggatggtcaaatttcatggcgacgaagtctgtgaaggactggtaccttgtgaagggcagctgcttaatcgaggcagatgttgccattcttggatcgtccaagatgaattagggatcatacgactctctacttttgtgcgtgtgccgagccaataatggaattgtgcagcgttagaccttatctgtttcatccctaaatcatagtgattaggaaggattggagaggattgaggagaattttgactgttaggaaatttaatccccttaatccctcctaacacccttgctttagggggtaacaaaaaggatttgactactatacttttagggtataatataccagtaactattttatgtgaagcatgcacaaaaacgtaagtgatttagtggtattgtgtcatttacccggtgtgtagagtggatcataggtagtgcttggttttggagtaggtagtgtttggttttagagtatggtgggatagagccactttattcataatttgttgttatttggattggttccatttggaacagagtgattctaaaaaaaaagaaaa

SEQ ID NO: 89609 - DNA, 1491 bp, Zea Mays
tactctcttggtatggtcactcgctatacggattgcactttcctcccaggtcgacccaaccatggcaagaaccagaaatcagcaaaggtcgcggcaattccatgtactccggcagcgcaggtaggtcgtggtgctgcctcttctgaaatggaagagaagagcagcttcatttggcaaatcgatggcttctcctcgcttcttgacaagcaagaaggatggaccaactccggatattttaagatcaaggaccttaattggtacttgcagttgaacctgaaggaccggaagagtggcgacgaaagagaatacgtctctcttatcctcgtgctgtcaaaaacttctggtctggaacccgacaccattgtcgaagcatcgttcaagctcttgatatacgatcaagcatacggacgacatagcgaacatgaatccacagattccagactacagagagcagcaggagctccgggatctcatgcatgatcctcgtctacacactcaaggaaccctcctccggtttcatcgttggtgacagctgtgtcttcggagtggagctcatcaagttcaccactgctaaagtcaaggacggttcaggaacgctgcatgttcagaagagaattggcttctgtagtgcccgggaggcctacacctggatcatcaatgacttcttaagcctgaaggggcggtgctactcaccggagtttgagatcggtggacacaaatggtacctgaccatgtacccttctggcactggcatcgacggtgataaggaaattctctccctctacctgcatatggccaagccaaacggagacgcttccctccagaactctggggtgcttgtagaagtcagtctgtccatcaaagacaaggtgaccagcaatcgcaaaacaatgacaggccggtgccagctccaagcgacggagggcgaaggctggggatggtcaaatttcatggcgacgaagtctgtgaaggactggtaccttgtgaagggcagctgcttaatcgaggcagatgttgccattcttggatcgtccaagatgaattagggatcatacgactctctacttttgtgcgtgtgccgagccaataatggaattgtgcagcgttagaccttatctgtttcatccctaaatcatagtgattaggaaggattggagaggattgaggagaattttgactgttaggaaatttaatccccttaatccctcctaacacccttgctttagggggtaacaaaaaggatttgactactatacttttagggtataatataccagtaactattttatgtgaagcatgcacaaaaacgtaagtgatttagtggtattgtgtcatttacccggtgtgtagagtggatcataggtagtgcttggttttggagtaggtagtgtttggttttagagtatggtgggatagagccactttattcataatttgttgttatttggattggttccatttggaacagagtgattctaaaaaaaaagaaaa

SEQ ID NO: 89610 - DNA, 1853 bp, Zea Mays
atgcctgccgccgcaccgcacccaccgccggcgagcctggacgcgcgcacgggcggccgcatcctgcgccgcgcggcggggcatctccttcacccagcatccctcccgccactcctcctcgcagcgctcctcctccttctcttccgctccgctctcctggccggcacgctccgcctcgcctccttcgcggaccgtgacccggccctccgctcccttctcgcccgcctctcccctcccaacacgccgtcgccgccgcctcccccgcaccacctcccacggcgccgctcgccgttcacctccccctcgtcctccctctccgacgacgatatcctagtcagcccccttgatcccgctgcctcagccccctcccgccgccgcaacgcctcctactaccatgtgctagtcacctcctactccgccgcgcccaaaccctatccgttgccgctccccaacccgctcccggcctccgcttcccccttcttccttgccgtctacaatgagacggcgcctccgaagcccgcctcgccgctgggcagagaattcggttttcttgccctgaccaggcgcgacgcagcggccatcgtcaacctcctcgcgctgctctcctccgcacatatcttcgcgatccttggctacatcgccgtgcactccgccgcgctgggcgcagtgtttgcgtccgtggcggggcaccacgtacctgggcggcgtctagtgttcctcctcacctgtgctgcgaggggcgctaagagactcacagggttcacgttcctgcggtgggccacgcgggacgccgttgtgcagatgctctgcctctggttctttgcggatgtgcacgatcaggcccagctgttcaggctctttgtggtcgccaaactgatgccattctccacatccgttaacccgtggcttggtgcagtcgttgcaggcccagagctcgatggtttctttgttgcctgggctgttcttgatgcagtggtgtcagttttgttcactgtggtgccttgggtggttgtcatggaccgtgatccacggccgcctgggcacaatgctgtgaaggaagggtgctatcttgtgtctctgatggcaactgatgccacatttctcaagtgctgggaaacagttgtgtgtggcagcatggggcggctcatcatggtgacattcggcggaaatgtttttggtggatttctgcattcaattgcgcaggtctacttcatggtggtatggctgctgttctactttgcagcaaggagtaaggaggtgaggatgggtggtcgtcagtttggactggaggatgttgcagctgctcttgatggatttaggtagtgtccagttgtcgattgccacttggatcatcattacttgaagagaagtatattcatggcccatagtgcttattgatgaaaaactgctggtcttggcaaagtagaggttttttgtagttatcctgatcttataaatcttgccaagatggtaaatgactcggatgagcgaaagagaacttgacaatgttgcatgtacagtttttatctcggatgggtaatctgcttatagccacatactcacatcacatggcatacaaagaaaggctgtttggttccccttttccatggaaggttagaagcaagatgcctggtaataggtgcaacatgaagtttatatacctgtgttctgcctgcaaaatttatctgggtaatactttagatcaaaacacgtgatgtacatccaatcatgggtatagtttgttgatatccacccttctgtttgtaaaaacctcccaaatcccatctcataaccctctttagacgtggttggcccatgaatgaattgctctatataatgattacttttatctg

SEQ ID NO: 89611 - DNA, 1472 bp, Zea Mays
ccgcggccagcacgcagcacagccgcgggcgggcccagccagcgcacgccgcacggtgagcgcgcgcgggcgcgcgcgcacacacacacacacggacgacgggaccccacccgagcaaaacgcaggcgggcgagcgagcgtgcgtacgcgcagtcgcgtctcacctcgctcgcagacgcacgttttgcaaatctgccccggcggcgacggcgaccctccctcccactcgctttccccgctccctcctggcctgcccataaatagccccccgccgaggacacgggacacagcccgtccccgtcgtgcttcaattcgccactctcctggcccctgctgccgtcgccggcttctacagctactagcagctcggaggaccgggagcagctcccaacacccgcggagccagccagccgcttgcgcttggacccccgatcgatcgtctcgtcgccgcctgcccgggcggccgatggggagggcgccgtgctgcgagaaggaggggctgcggcggggcgcgtggagcgccgaggaggaccagcgcctggtggcctacgtccggcagaacggccaccccaactggcgcgcgctgccacgccaggccggcctgctccgctgcggcaagagctgccgcctccgctggatcaactacctccgccccgacatcaagcgcggcaacttcacccccgacgaggaggccctcatcgtccgcctccaccgcgagctcggcaacaggtggtcagcgatcgcggcgcagctgccggggcgcaccgacaacgagatcaagaacgtgtggcacacccacatcaagaagcgcctggaggacggccacggggaggagaagaaggcgcgcaaaggcaagcccgccgccaagaaggccgccgacgccgtgggccgcagcagcgagcacgggccgttcctgaccgcgtcgccggggctgtcgagcagcggcgtcacgttctccgccgcggcggactccgccgcggccgtgtcgtcgtcggccgacaacgcggccaccaccagccaccacccgcagcaggtcggcgccagcaaggcggagtcgtcgacggagttggacagcggcctcagctccgccgagttcccgcccctcgacgacagcttctggtcgtcggcggacgtcgtggacatgggcctcggcgccacggacgaggagctgggcctcgcgtgcccgccgccgctgtcgtcgtcgtccaccagggacgaggacatggagttctggctcaacatgctgctggaggccggcgacatgagggacttgagcgtcttgtaactaggatgcaggatcggaagcctcaggcgcctgctatatctgaggactagagcatcgcatcttctttcttttttcttgtcatcttgttgccctgttttctggtgatgagaaaatgctgagaaactcggtcgggtgattttcaccttccgcacaagaaagaatactagcatcaaccattttgttcgtt

SEQ ID NO: 89612 - DNA, 147 bp, Zea Mays
atggtcaaggtaggagaggtagcaagccaacagaagtcgacaaatttacctacgcgaaacagggggctcaaagtgttcgagcagcccaacacgactatagaaggtggaacagccacatccgtcagctataggatgatcctatcctaa

SEQ ID NO: 89613 - DNA, 1569 bp, Zea Mays
cccgtcacatcacctttcactgcatactgtctcctccatctcacgcattcacctgcagtcctgcactgtgccacagcccctccccttctccaatctcgccgccaattaatactcgccccctcccttccatccgctcctcccctccccttctcgccaagctcagcgccgaggcatgctgtgagcgagagcgatctgtgcggcgtcagctccggtgatcttggaggcgccgctagcagcttggtgccgcgggctggctggttgtccgtctggccggagctagctacctagctctcgagcgaggagaagagggcgggagccaactgaagtgaagcgaagcgaagcgaggcaagtgtgtgctgtaccagtagtagtggagtggtggtcgcgaacactatttatagcgccccggcccgccccagcgtgcggcgctctctcttctctctcacaggaccacggttcgcgcgcgcgggcaccgactccgaaatagatagatctcagctcagctcagttggcacttgctccgtccgaagcccgccctagctgctcttcttgctgatggtcgtctcttgattgcttgtcagatggacctggtgccgcagctggacagcccgcactcggacaacggcggcggcggcggcagcggaagcttggcgtccggggcgctgtcgccgggggcatcgtccgcaggcacggtgtcggcgctggcgtcgccgagccggtacgagtcgcagaagcgccgggactggaacacgttcgggcagtacctgaggaaccaccgcccgccgctgtcccttgcgcgctgcagcggcgcgcacgtgctcgagttcctgcgctacctcgaccagttcggcaagaccaaggtgcacaccgccgcctgccctttcttcggccacccggcgccgccggcgccctgcccgtgcccgctccgccaggcgtggggcagcctcgacgcgctcgtcggcaggctgcgcgccgcctacgaggagaacggcgggcggcccgagaacaaccccttcggcgcgcgcgccgtcagactgtacctccgcgaggtccgcgaccatcagtcccgcgccaggggcgtcagctacgagaagaagaagaagcgaaagaaggccccgccgcaccccgtccctgccgccgtcatctcctcctcccacgacggcaacggacaccactacgagcaccagatgccgccgccaccaccgcccggcgcagcggcttgactagccggccggccccatgtatgctactactaccactgtaccacatgcactactggtcgatctctctagctagctgaagctcctgtcaccgactactatatatggagtacccatctatctatctatagttattggcttcttgctactgtatatctatcgatcgatcgatcgatctgtagttatagtttagcgcgctgccactactagtacaaagacaaaccccctgctgctgctacaaattacttagccggttgctctttcatatgatttgctgctggtattgctactggaactactactgcttcctaattagatcagttgtcgatctgatcattttctagcttaa

SEQ ID NO: 89614 - DNA, 1271 bp, Zea Mays
atctcgccgccaattaatactcgccccctcccttccatccgctcctcccctccccttctcgccaagctcagcgccgaggcatgctgtgagcgagagcgatctgtgcggcgtcagctccggtgatcttggaggcgccgctagcagcttggtgccgcgggctggctggttgtccgtctggccggagctagctacctagctctcgagcgaggagaagagggcgggagccaactgaagtgaagcgaagcgaagcgagatggacctggtgccgcagctggacagcccgcactcggacaacggcggcggcggcggcagcggaagcttggcgtccggggcgctgtcgccgggggcatcgtccgcaggcacggtgtcggcgctggcgtcgccgagccggtacgagtcgcagaagcgccgggactggaacacgttcgggcagtacctgaggaaccaccgcccgccgctgtcccttgcgcgctgcagcggcgcgcacgtgctcgagttcctgcgctacctcgaccagttcggcaagaccaaggtgcacaccgccgcctgccctttcttcggccacccggcgccgccggcgccctgcccgtgcccgctccgccaggcgtggggcagcctcgacgcgctcgtcggcaggctgcgcgccgcctacgaggagaacggcgggcggcccgagaacaaccccttcggcgcgcgcgccgtcagactgtacctccgcgaggtccgcgaccatcagtcccgcgccaggggcgtcagctacgagaagaagaagaagcgaaagaaggccccgccgcaccccgtccctgccgccgtcatctcctcctcccacgacggcaacggacaccactacgagcaccagatgccgccgccaccaccgcccggcgcagcggcttgactagccggccggccccatgtatgctactactaccactgtaccacatgcactactggtcgatctctctagctagctgaagctcctgtcaccgactactatatatggagtacccatctatctatctatagttattggcttcttgctactgtatatctatcgatcgatcgatcgatctgtagttatagtttagcgcgctgccactactagtacaaagacaaaccccctgctgctgctacaaattacttagccggttgctctttcatatgatttgctgctggtattgctactggaactactactgcttcctaattagatcagttgtcgatctgatcattttctagcttaactggtgactactatttgctgctactttatt

SEQ ID NO: 89615 - DNA, 127 bp, Zea Mays
gccatggactgcgccgggcgattgcgtgtggtgagttccggcgtctgtgccagtctactgctggcgcggctgctattgcggactgctacactcttttggggctcttttccgtttcttttaatggcaa

SEQ ID NO: 89616 - DNA, 609 bp, Zea Mays
ttgatcttccttcaacagccggtataagcttatatgataaaatcgatggccacctcactttacaaaaacaagctgaccggccaacgcaaaatcaggcccatggtagatcaccattccgcgtgatctgccagcgtatcacactttgttgttgagataatacaacacaacttatctccctccccaaatacacaatttacggcacatgtacaaaggagaaacacgaaagaattacgatgcttactgacctatctatgctctgaacaaatctgaactgtatgccgccgcaactcaaacctgtatgaactgagagagaaaaaattccgaagatgacagtgagctagccttgcatcaacaccgactcggtggcttttctcaacttgaaactatgcatgaactggctctctaaacttgccttgcagagacatccagttgtcacatctgttgtggaaccactgtgaaggtcaaatcgtgaggccgcaaggcactctgaactaggtcctgcactgttttgtttcgtctacagacatctgagatttcaccaaatctatctgttatggtatggagactggacccagaagcagcatcagatatggtgttgaagaagcgcaa

SEQ ID NO: 89617 - DNA, 734 bp, Zea Mays
catggagtttcagcgcatcacgacataagtagctcaatacgcaaagcgcaaagcactttcaagtaagataacctaaaatattctccaaatttacaccttaacaaaaattggacccaatccacagcttctcggtaacgttacaacctgtgttactatgcacccaatccactgcttctcggtaatgttacaaaatgactaagtatccattcttcaaggtcacggatcattcctcccaagatgcaccaagaatggcaacacaactacagaacaccatgctgatgagaaagcagaacctgaaagctacatgccatgatcttagttgtgtgatggaattggtagcctgcgcttccaagatttaacaaagaaatagcagccaaacattaacagttcagccccaaaatttgcgcacaattgaataacagatatccacctaaggatcaatcagaacacaaatggagtcgaccgttgatgactgctgaggttgttgccttgaaactgcagggcgcccccaccaacctccctccccaattttccagcaaagcaaaaatgtttgcccaacaagataactgacaaatattgaatcagatctgcacagtaaaacttttaagtagcctttgatgttactgaatctgctgtgagcctacaatggcctcaacagggtagccaccaaatttacaatccttccgcttcacaaccataatcatccatgtccaaccaaattcatgcagcaagac

SEQ ID NO: 89618 - DNA, 1228 bp, Zea Mays
aacaaagctgccacatacccacagcccacggtcccataccacacgcgtacgcggcattctcctcggcgcgggttgccgagacgcgtacgcggcattctccttaggtgcgggggttcctctcgagtctcggcaacgacgaaaacgaaaataccgagtcgagtcagcgatgaatcccttcgccaaaaaaccaactccgcgagaggtgatgcggagcagcaagcgggacctgacgaatgctacgcgagggatcgagagggacattgcgtcattacagcaggaggagaagaaactcgttgctgaaattaaaaggacagcaaaaactggcaatgaggcagcaacgaaaattctagcccgtcagctgatcaggttaaggcagcagatttctaatttgcaaggtagccgagctcagattcgggggattgcgacacatactcaggcaatgcatgccaacacttcagtggctactggtttacaaagtgcgagcaaagcaatgggagctttgaataagcaaatggaacctaccaagcagatgaaaataatgcaagaattccaaaagcagtcagcacaaatggatatgacaaatgagatgatgtctgattcaatcgatgatgtcttagacgatgaccaggccgaggaagaaactgaagaacttgctaatcaggttctggatgagattggtgtagacattgcatcacagttgtcctcggctcccaaaggaaaaattgctgggaagaaggttcaggttgatggaagttcggagttggaggaactagagaagagactggctgctctaaaaaatgcataagatcagtttacaaccctctcctctatgcacatagcaagcctgccgtgtaccttaattccaaatcttcattcgacacgcaaagtcactgtgatttgtatgtatcaaaaggaagatgatgcaaacccccaagtttttgggcgaatcgatgttgctgctgttcgtacacactcacgcataagatggggctgtgctgccttattagcgacatgattcagagcaagggattccatagtcttgtaaagaagtttgattatttttacatgacagccttttgtttttggtcgttcgttacatgacggcgtttttttatccttgtgggaactcacagtaacgccgcacgtcatttttttaagtgcctaggctttccttgaattgattgctttcagcctttctgggcatttcgacataacattgggacatcgt

SEQ ID NO: 89619 - DNA, 857 bp, Zea Mays
caatgttgattgtcaggttatttttattttgattttgtggcaaatcgtgtccttaggcaatgcatgccaacacttcagtggctactggtttacaaagtgcgagcaaagcaatgggagctttgaataagcaaatggaacctaccaagcagatgaaaataatgcaagaattccaaaagcagtcagcacaaatggatatgacaaatgagatgatgtctgattcaatcgatgatgtcttagacgatgaccaggccgaggaagaaactgaagaacttgctaatcaggttctggatgagattggtgtagacattgcatcacagttgtcctcggctcccaaaggaaaaattgctgggaagaaggttcaggttgatggaagttcggagttggaggaactagagaagagactggctgctctaaaaaatgcataagatcagtttacaaccctctcctctatgcacatagcaagcctgccgtgtaccttaattccaaatcttcattcgacacgcaaagtcactgtgatttgtatgtatcaaaaggaagatgatgcaaacccccaagtttttgggcgaatcgatgttgctgctgttcgtacacactcacgcataagatggggctgtgctgccttattagcgacatgattcagagcaagggattccatagtcttgtaaagaagtttgattatttttacatgacagccttttgtttttggtcgttcgttacatgacggcgtttttttatccttgtgggaactcacagtaacgccgcacgtcatttttttaagtgcctaggctttccttgaattgattgctttcagcctttctgggcatttcgacataacattgggacatcgtcatttgttt

SEQ ID NO: 89620 - DNA, 387 bp, Zea Mays
ctcgcatatataggcatccctacggcttcataacctagggagatccttctgttaggatccgacgccaggagatcctaccggcccagcgaaggttgcggctatggcgctgcgaggcggcctgaccaagtgggtccaccatccggtgtctgggtgctagccgatgcgcgcgaggggatgctgacgaggcggggccacctgtcggcgcagggcaaccacacaaccacaggtgcgtgcggagggattggactagtttcgacccatgatccaaggagagcttctcttttttttatttccttttagttatttattttctcttgttttgaatttctttatcaactgcgatttttaatattaaaaatcaaacttatttgtgagttcctcacaaaa

SEQ ID NO: 89621 - DNA, 801 bp, Zea Mays
atggtcaaatggagggattctgcaataacaccttaaaactagtgccagatcgacagaatcaagattgcattgtactttggagttgtcttccctcttggagtttggggagagcgttatactatacgctggggtttggggaaagggtgcattttcatggcagccttgtaaccatccatccatcatctatttgccgatttgctttagctgcagagagcaaggatcccgcaaaagttcctcggcctagtaaccgccttccactctcagaattcgtcggcgtggtcctcggcagctcacttcctcctgctggtggtgatggtgaggcgctcgaggctgcggaacgtcgtgttgtcccgcgaggcggagcctcccctcccggccgcgttccgggccacgggggagcgcggggacgacctgctgttctcggcgcctcccgagtggtggagcctctgcgcgggggacgggcgcccgctgccgccactgctgccggagacccaccggcggttctggtcactgcagtcccccgaagaggtcggccgggtggacggagctgcgggcattttcgacgagctccctccccgggacaagatgcgcgttttctctgatgagtcggcaacctggtgcgtgccagataagcgagaacaatggtcacattagcggggtcactcagaagaaagggagcgacaatagtggaaatatgagacgaactccggcgggattacaatgttcgtgttggcaaaaagaagtacctctgccgaggtaagcattttcttttcactaattttatcatacttttgtttctta

SEQ ID NO: 89622 - DNA, 934 bp, Zea Mays
atggtcaaatggagggattctgcaataacaccttaaaactagtgccagatcgacagaatcaagattgcattgtactttggagttgtcttccctcttggagtttggggagagcgttatactatacgctggggtttggggaaagggtgcattttcatggcagccttgtaaccatccatccatcatctatttgccgatttgctttagctgcagagagcaaggatcccgcaaaagttcctcggcctagtaaccgccttccactctcagaattcgtcggcgtggtcctcggcagctcacttcctcctgctggtggtgatggtgaggcgctcgaggctgcggaacgtcgtgttgtcccgcgaggcggagcctcccctcccggccgcgttccgggccacgggggagcgcggggacgacctgctgttctcggcgcctcccgagtggtggagcctctgcgcgggggacgggcgcccgctgccgccactgctgccggagacccaccggcggttctggtcactgcagtcccccgaagaggtcggccgggtggacggagctgcgggcattttcgacgagctccctccccgggacaagatgcgcgttttctctgatgagtcggcaacctggcgagaacaatggtcacattagcggggtcactcagaagaaagggagcgacaatagtggaaatatgagacgaactccggcgggattacaatgttcgtgttggcaaaaagaagtacctctgccgaggaattaaacaaatcttccaagcttgggccaagaagatcgatcaccataacattgtactccccctcaacaccataccacttgaggctcctgacagatcaaaccaaagaaaaggtgaggccttgaaccaaacgcttcagcaaaggtatatccagactctagataagagacatgttatactacattaaatgcaaac

SEQ ID NO: 89623 - DNA, 336 bp, Zea Mays
atgacaactatccctcgaagttgtaactgtcagaagctatggtcgattaaaaatgtccatcctcttgtagccgcaactaattctagaattataactagagctattgatgatcaagggaaggtgtattatatgtcatatccatataggcgtttgattgattgggtattatatgagggtaaaatgcaacggaaccagtacaatgcaaatgtatgggcccagcagcaggcttttctctcgggtttacaaacacgtcctccaacggttacagcacctggagatggatctgcccaagacgacgtagtggcttcatgggcaaacaacctcttcaccaactag

SEQ ID NO: 89624 - DNA, 1950 bp, Zea Mays
agcccaccccaggtcgccacgcccgccacaagaagcagcagccttacccgaaccgaagacgaaccctaccgcgccttgatatcatatcgtctccgtgtcgttctcgcagcgcagcgagcgagccacgcgctcctgcgcagtagcgtaatggcggtgcaaggcggcgaggagagggagagcgggaagggcgccgccccggcggtggtgtcaggcggcgaggcgggcccgccgggccggaggacggcgaggggccacccgctcctgcgcggcgggtggaggcgcgaccggtacacgcacgggatgcggccggcgcagatggaggcgctccgcgccatgtgcggcgcgctcatcccctcgctgcccgccgacgccgacgccggccgcggcgacccgcccggcggcaaggacctcgagcgcttctacctcgcctccgcggccgactccaccatccccgacgaggtcgcggagctgatggtgaactggtcggcgagtatccggacgccggaggaggtgacgcaggagtgggcgcgcgagcacgggctcccggtgttcgcgagccccgggtatgcgcaggccatggacgcggtgtgcgcccggctcggcgtcaccgacgggtgccaggaggaggggttccagaacaaggtggtccgccgcgggtgcgaggctctcgggctgtgcgccgacgctgtgccgcgcaactcgtcggatgctcacttctgcgggagctgcaacttcggttgcccgaccggggacaagcgcggcaccgacacgacgtggctcgtggacgccgtcgcgcgcggcgcggtcatcctgaccggctgcaaggctgagtacttcgtcctcgagaagaaccacagcagcggcagcggaagcgggcggggcaagaagtgcgtgggcctggtggcgacctgcgcgagcaacggcgtcaccaagaaactgcgcatcgaggccaaggtttcgatcgcggcttgtggggcgctgatgacgccgccgctgctgcggcgtagcgggctcaagaaccggcacatcggcagcaacctccacctccacccggtgtccatggcgtggggttacttcccggagaacaagcaggaccccccgctctctggcaagtgctacgagggcggcatcatcaccagcatgcaccgcgtcacggaccgcaccatcatcgagacgccggcgctggggcccggcgccttcgccgcgatggtgccgtgggagtccggccgcgacatgaaggagcgcatgcgccggtactcccgcacggcgcacgcctttgcgctggtccgcgaccgcggcgtcgggttcgtggacggcgaaggacgcgtgcgcttcaccccgagccgcgaggacgtcgacgagctccgcaacggcctacgccgcgtgctgcgcatcttggtggcggcgggggccgcggaggtcgggacccaccgcagtgacggtctccggctgcggtgcaagggcctccgcgacgaggacctcgaggggttcctggacgaggtgaccatcgagaaggggcccatgcactcgagggttgacaagtgggctctccactgctcagcgcaccagatgggcagctgtcgtatggggtccagccctaaggacggcgccgtggatggccgcggcgagagctgggaggcagagggcctgtacgtgtgcgacggcagcctgctgcccacggcggtgggcgtcaaccccatgatcaccatccagtctatcgccttctgcctctccaagggcatcgccgagaccatggcccaggggcagggcaagggacagtagcctatgattgagacgcgcctggcgatggtttaattcatgcgtgcaacactgcaacatgtgtgcgttcttgttaatcgagtgtggtgaaagcgtcgaaaaatgtgtttgtgcattgtgtttgtgcaaatggtacgcgaatcacaatacatcctgtttcctgccccggtc

SEQ ID NO: 89625 - DNA, 2732 bp, Zea Mays
agcccaccccaggtcgccacgcccgccacaagaagcagcagccttacccgaaccgaagacgaaccctaccgcgccttgatatcatatcgtctccgtgtcgttctcgcagcgcagcgagcgagccacgcgctcctgcgcagtagcgtaatggcggtgcaaggcggcgaggagagggagagcgggaagggcgccgccccggcggtggtgtcaggcggcgaggcgggcccgccgggccggaggacggcgaggggccacccgctcctgcgcggcgggtggaggcgcgaccggtacacgcacgggatgcggccggcgcagatggaggcgctccgcgccatgtgcggcgcgctcatcccctcgctgcccgccgacgccgacgccggccgcggcgacccgcccggcggcaaggacctcgagcgcttctacctcgcctccgcggccgactccaccatccccgacgaggtcgcggagctgatggtgacgcggtgcatccgcgaggcggtggcgctggcgtgggtggtgctttgggcgctgagcacgcgggcgggcacgctgctgctgtgcggccggctcagcctcggcgccggcttcccctacgtgcgcaggttcgccgacatggcgccggagcggcgggaggcggccctgcggcgctggaaccgggtgcgctggctcttcccgctccgcatcgccttcgccatcgtcaagatcctctgccactacgtcttctacgccatggtgaacgagaactccgagaatccatactggaaagcgataggatacagcgtggacgagccacgggaggatcgggctcggacggcgacaccgtcgccgtcccggcccctcgacgtcggcgtcgtggagaccaggctgctggacgacaacaagctgctcagatcgctcgtggggaggggcctcacggtgaagccggcgtcgtcggacgcgaaccaccacacagtgcaatgcgacgccgtcatcgtggggtccggctgcggcggtggcgtggccgcggccgtgctcgcgtccgcggggtacaaggtggtggtcgtcgagaaaggcgactacttcaccgccgaggactacagctcgatcgagggcccgtccatggagcgcctcttcgagcgaggcggcatcttctgcacgtccaacgtgaccaccatgatcttcacgggcgccacggtcggcggcggctcggcggtgaactggtcggcgagtatccggacgccggaggaggtgacgcaggagtgggcgcgcgagcacgggctcccggtgttcgcgagccccgggtatgcgcaggccatggacgcggtgtgcgcccggctcggcgtcaccgacgggtgccaggaggaggggttccagaacaaggtggtccgccgcgggtgcgaggctctcgggctgtgcgccgacgctgtgccgcgcaactcgtcggatgctcacttctgcgggagctgcaacttcggttgcccgaccggggacaagcgcggcaccgacacgacgtggctcgtggacgccgtcgcgcgcggcgcggtcatcctgaccggctgcaaggctgagtacttcgtcctcgagaagaaccacagcagcggcagcggaagcgggcggggcaagaagtgcgtgggcctggtggcgacctgcgcgagcaacggcgtcaccaagaaactgcgcatcgaggccaaggtttcgatcgcggcttgtggggcgctgatgacgccgccgctgctgcggcgtagcgggctcaagaaccggcacatcggcagcaacctccacctccacccggtgtccatggcgtggggttacttcccggagaacaagcaggaccccccgctctctggcaagtgctacgagggcggcatcatcaccagcatgcaccgcgtcacggaccgcaccatcatcgagacgccggcgctggggcccggcgccttcgccgcgatggtgccgtgggagtccggccgcgacatgaaggagcgcatgcgccggtactcccgcacggcgcacgcctttgcgctggtccgcgaccgcggcgtcgggttcgtggacggcgaaggacgcgtgcgcttcaccccgagccgcgaggacgtcgacgagctccgcaacggcctacgccgcgtgctgcgcatcttggtggcggcgggggccgcggaggtcgggacccaccgcagtgacggtctccggctgcggtgcaagggcctccgcgacgaggacctcgaggggttcctggacgaggtgaccatcgagaaggggcccatgcactcgagggttgacaagtgggctctccactgctcagcgcaccagatgggcagctgtcgtatggggtccagccctaaggacggcgccgtggatggccgcggcgagagctgggaggcagagggcctgtacgtgtgcgacggcagcctgctgcccacggcggtgggcgtcaaccccatgatcaccatccagtctatcgccttctgcctctccaagggcatcgccgagaccatggcccaggggcagggcaagggacagtagcctatgattgagacgcgcctggcgatggtttaattcatgcgtgcaacactgcaacatgtgtgcgttcttgttaatcgagtgtggtgaaagcgtcgaaaaatgtgtttgtgcattgtgtttgtgcaaatggtacgcgaatcacaatacatcctgtttcctgccccggtcaatatttttctattatgatgcataagattgctcattgtaaaatgtatggctgccgccgcttgccc

SEQ ID NO: 89626 - DNA, 762 bp, Zea Mays
cacgcccgccacaagaagcagcagccttacccgaaccgaagacgaaccctaccgcgccttgatatcatatcgtctccgtgtcgttctcgcagcgcagcgagcgagccacgcgctcctgcgcagtagcgtaatggcggtgcaaggcggcgaggagagggtggtgctttgggcgctgagcacgcgggcgggcacgctgctgctgtgcggccggctcagcctcggcgccggcttcccctacgtgcgcaggttcgccgacatggcgccggagcggcgggaggcggccctgcggcgctggaaccgggtgcgctggctcttcccgctccgcatcgccttcgccatcgtcaagatcctctgccactacgtcttctacgccatggtacgccggccgcacccttctctctcgtacgcaccgtgctggccgcaataaatctaggcgtctatactaatcggcaggagattaggttctggaaccctccaattagtaacgggcggctttccactgttcctgaacgcgggtactactagtgtggtacgtcagccagttctctgaaatctgaatacagcgatagggaatcatgcatgcatggtccactccagccacaccggcgaatctgaacacaacaagaacgtcaggatcaggaacaacatatatagcgccgacacggcatttaaagtgtttactgcagagatctgaagctagtgttattattatgcatggtagcttgccgctgctcattcaggaggtactacaacttactatct

SEQ ID NO: 89627 - DNA, 1619 bp, Zea Mays
cacaagaagcagcagccttacccgaaccgaagacgaaccctaccgcgcctcttcgagcgaggcggcatcttctgcacgtccaacgtgaccaccatgatcttcacgggcgccacggtcggcggcggctcggcggtgaactggtcggcgagtatccggacgccggaggaggtgacgcaggagtgggcgcgcgagcacgggctcccggtgttcgcgagccccgggtatgcgcaggccatggacgcggtgtgcgcccggctcggcgtcaccgacgggtgccaggaggaggggttccagaacaaggtggtccgccgcgggtgcgaggctctcgggctgtgcgccgacgctgtgccgcgcaactcgtcggatgctcacttctgcgggagctgcaacttcggttgcccgaccggggacaagcgcggcaccgacacgacgtggctcgtggacgccgtcgcgcgcggcgcggtcatcctgaccggctgcaaggctgagtacttcgtcctcgagaagaaccacagcagcggcagcggaagcgggcggggcaagaagtgcgtgggcctggtggcgacctgcgcgagcaacggcgtcaccaagaaactgcgcatcgaggccaaggtttcgatcgcggcttgtggggcgctgatgacgccgccgctgctgcggcgtagcgggctcaagaaccggcacatcggcagcaacctccacctccacccggtgtccatggcgtggggttacttcccggagaacaagcaggaccccccgctctctggcaagtgctacgagggcggcatcatcaccagcatgcaccgcgtcacggaccgcaccatcatcgagacgccggcgctggggcccggcgccttcgccgcgatggtgccgtgggagtccggccgcgacatgaaggagcgcatgcgccggtactcccgcacggcgcacgcctttgcgctggtccgcgaccgcggcgtcgggttcgtggacggcgaaggacgcgtgcgcttcaccccgagccgcgaggacgtcgacgagctccgcaacggcctacgccgcgtgctgcgcatcttggtggcggcgggggccgcggaggtcgggacccaccgcagtgacggtctccggctgcggtgcaagggcctccgcgacgaggacctcgaggggttcctggacgaggtgaccatcgagaaggggcccatgcactcgagggttgacaagtgggctctccactgctcagcgcaccagatgggcagctgtcgtatggggtccagccctaaggacggcgccgtggatggccgcggcgagagctgggaggcagagggcctgtacgtgtgcgacggcagcctgctgcccacggcggtgggcgtcaaccccatgatcaccatccagtctatcgccttctgcctctccaagggcatcgccgagaccatggcccaggggcagggcaagggacagtagcctatgattgagacgcgcctggcgatggtttaattcatgcgtgcaacactgcaacatgtgtgcgttcttgttaatcgagtgtggtgaaagcgtcgaaaaatgtgtttgtgcattgtgtttgtgcaaatggtacgcgaatcacaatacatcctgtttcctgccccggtcaatatttttct

SEQ ID NO: 89628 - DNA, 2468 bp, Zea Mays
cgccgtcccgtcccgggcgctggcactgagaaactgggcaagacatcccgtccgctgcacgggaaagtagcggtgcacgcctgagtgatcctgtcacgacttttgaatcgcttgctccctagaagtagcagtgccagcaactagtactgtggtatcgacgttacacctcatgctaactcgtacacgtgagaagacgtcgcggagctgatggtgacgcggtgcatccgcgaggcggtggcgctggcgtgggtggtgctttgggcgctgagcacgcgggcgggcacgctgctgctgtgcggccggctcagcctcggcgccggcttcccctacgtgcgcaggttcgccgacatggcgccggagcggcgggaggcggccctgcggcgctggaaccgggtgcgctggctcttcccgctccgcatcgccttcgccatcgtcaagatcctctgccactacgtcttctacgccatggtgaacgagaactccgagaatccatactggaaagcgataggatacagcgtggacgagccacgggaggatcgggctcggacggcgacaccgtcgccgtcccggcccctcgacgtcggcgtcgtggagaccaggctgctggacgacaacaagctgctcagatcgctcgtggggaggggcctcacggtgaagccggcgtcgtcggacgcgaaccaccacacagtgcaatgcgacgccgtcatcgtggggtccggctgcggcggtggcgtggccgcggccgtgctcgcgtccgcggggtacaaggtggtggtcgtcgagaaaggcgactacttcaccgccgaggactacagctcgatcgagggcccgtccatggagcgcctcttcgagcgaggcggcatcttctgcacgtccaacgtgaccaccatgatcttcacgggcgccacggtcggcggcggctcggcggtgaactggtcggcgagtatccggacgccggaggaggtgacgcaggagtgggcgcgcgagcacgggctcccggtgttcgcgagccccgggtatgcgcaggccatggacgcggtgtgcgcccggctcggcgtcaccgacgggtgccaggaggaggggttccagaacaaggtggtccgccgcgggtgcgaggctctcgggctgtgcgccgacgctgtgccgcgcaactcgtcggatgctcacttctgcgggagctgcaacttcggttgcccgaccggggacaagcgcggcaccgacacgacgtggctcgtggacgccgtcgcgcgcggcgcggtcatcctgaccggctgcaaggctgagtacttcgtcctcgagaagaaccacagcagcggcagcggaagcgggcggggcaagaagtgcgtgggcctggtggcgacctgcgcgagcaacggcgtcaccaagaaactgcgcatcgaggccaaggtttcgatcgcggcttgtggggcgctgatgacgccgccgctgctgcggcgtagcgggctcaagaaccggcacatcggcagcaacctccacctccacccggtgtccatggcgtggggttacttcccggagaacaagcaggaccccccgctctctggcaagtgctacgagggcggcatcatcaccagcatgcaccgcgtcacggaccgcaccatcatcgagacgccggcgctggggcccggcgccttcgccgcgatggtgccgtgggagtccggccgcgacatgaaggagcgcatgcgccggtactcccgcacggcgcacgcctttgcgctggtccgcgaccgcggcgtcgggttcgtggacggcgaaggacgcgtgcgcttcaccccgagccgcgaggacgtcgacgagctccgcaacggcctacgccgcgtgctgcgcatcttggtggcggcgggggccgcggaggtcgggacccaccgcagtgacggtctccggctgcggtgcaagggcctccgcgacgaggacctcgaggggttcctggacgaggtgaccatcgagaaggggcccatgcactcgagggttgacaagtgggctctccactgctcagcgcaccagatgggcagctgtcgtatggggtccagccctaaggacggcgccgtggatggccgcggcgagagctgggaggcagagggcctgtacgtgtgcgacggcagcctgctgcccacggcggtgggcgtcaaccccatgatcaccatccagtctatcgccttctgcctctccaagggcatcgccgagaccatggcccaggggcagggcaagggacagtagcctatgattgagacgcgcctggcgatggtttaattcatgcgtgcaacactgcaacatgtgtgcgttcttgttaatcgagtgtggtgaaagcgtcgaaaaatgtgtttgtgcattgtgtttgtgcaaatggtacgcgaatcacaatacatcctgtttcctgccccggtcaatatttttctattatgatgcataagattgctcattgtaaaatgtatggctgccgccgcttgccc

SEQ ID NO: 89629 - DNA, 2457 bp, Zea Mays
tgtatcatcaaggtcaccaaccatagccacaagcatggcagtggaccagtgggacggatagggctcgagtcccctctactgctcttgtgcctatggagaccctctaaatcttaaacgtatatggtataataatatagaagggtttcatatatatagtagtggtttagtttagtccattctaaaaataatttctggctctgtccttgcatggcacaaattcatcctgttgttgcacaccgaaagaaaagaaaactgtggccatactattccgggcaaaccattgatgctatggattttatccgttttgttttagttgtcgctggatagtgtaaaattaaactatccaacgacaactaaaaaacggagcgagtacaatgtttttcacagtcatcctttttcatctcaaaaaagatcataggcagacatccagtgcaaagatttctctcttgacatgcaggtgaacgagaactccgagaatccatactggaaagcgataggatacagcgtggacgagccacgggaggatcgggctcggacggcgacaccgtcgccgtcccggcccctcgacgtcggcgtcgtggagaccaggctgctggacgacaacaagctgctcagatcgctcgtggggaggggcctcacggtgaagccggcgtcgtcggacgcgaaccaccacacagtgcaatgcgacgccgtcatcgtggggtccggctgcggcggtggcgtggccgcggccgtgctcgcgtccgcggggtacaaggtggtggtcgtcgagaaaggcgactacttcaccgccgaggactacagctcgatcgagggcccgtccatggagcgcctcttcgagcgaggcggcatcttctgcacgtccaacgtgaccaccatgatcttcacgggcgccacggtcggcggcggctcggcggtgaactggtcggcgagtatccggacgccggaggaggtgacgcaggagtgggcgcgcgagcacgggctcccggtgttcgcgagccccgggtatgcgcaggccatggacgcggtgtgcgcccggctcggcgtcaccgacgggtgccaggaggaggggttccagaacaaggtggtccgccgcgggtgcgaggctctcgggctgtgcgccgacgctgtgccgcgcaactcgtcggatgctcacttctgcgggagctgcaacttcggttgcccgaccggggacaagcgcggcaccgacacgacgtggctcgtggacgccgtcgcgcgcggcgcggtcatcctgaccggctgcaaggctgagtacttcgtcctcgagaagaaccacagcagcggcagcggaagcgggcggggcaagaagtgcgtgggcctggtggcgacctgcgcgagcaacggcgtcaccaagaaactgcgcatcgaggccaaggtttcgatcgcggcttgtggggcgctgatgacgccgccgctgctgcggcgtagcgggctcaagaaccggcacatcggcagcaacctccacctccacccggtgtccatggcgtggggttacttcccggagaacaagcaggaccccccgctctctggcaagtgctacgagggcggcatcatcaccagcatgcaccgcgtcacggaccgcaccatcatcgagacgccggcgctggggcccggcgccttcgccgcgatggtgccgtgggagtccggccgcgacatgaaggagcgcatgcgccggtactcccgcacggcgcacgcctttgcgctggtccgcgaccgcggcgtcgggttcgtggacggcgaaggacgcgtgcgcttcaccccgagccgcgaggacgtcgacgagctccgcaacggcctacgccgcgtgctgcgcatcttggtggcggcgggggccgcggaggtcgggacccaccgcagtgacggtctccggctgcggtgcaagggcctccgcgacgaggacctcgaggggttcctggacgaggtgaccatcgagaaggggcccatgcactcgagggttgacaagtgggctctccactgctcagcgcaccagatgggcagctgtcgtatggggtccagccctaaggacggcgccgtggatggccgcggcgagagctgggaggcagagggcctgtacgtgtgcgacggcagcctgctgcccacggcggtgggcgtcaaccccatgatcaccatccagtctatcgccttctgcctctccaagggcatcgccgagaccatggcccaggggcagggcaagggacagtagcctatgattgagacgcgcctggcgatggtttaattcatgcgtgcaacactgcaacatgtgtgcgttcttgttaatcgagtgtggtgaaagcgtcgaaaaatgtgtttgtgcattgtgtttgtgcaaatggtacgcgaatcacaatacatcctgtttcctgccccggtcaatatttttctattatgatgcataagattgctcattgtaaaatgtatggctgccgccgcttgccc

SEQ ID NO: 89630 - DNA, 2639 bp, Zea Mays
ggtttcgacaagaagcgtaagctagctatggcaacggggaggaggggaagcccgctgctgcggaggtgcaagcgcgaggggtacacgcacgggctgcgcccgccgcagatggaggcgctccgggccatgtgcggcgcgctcatcccgtccctacccgtggagggcctccacgtccagcctcagcccggccgtggcaaggacgacctcgaccggttcttccgcgcgtccgccgccgacggcgccatccctgacgaggtcgcggagatggtgacccgatgcgtatgggagggagtgctgctcatgaggattgtcctgtgggtcctgagcaccaggattggcacgctggcgctgtgcgggcggctgtgcttctccgccggcaagtcgtcgttcccgtacgcctgcaggttcgcggacatgccggtggagcggagagagcgggtgctgcagcggtggagcggcgcgcggtggctgttccccctcaagatcaccttcgtcatcgccaagctcctgtcccactacgcgttctacacaatggtaaacgagaactcggacaacccgtcctggaaagcaataggatacagcgtgcccgtgccggcggcggcggcggacgtggacaggctacggccacgggaattaggtccagcggaggcagaggcgccgtcaccgcggccactggacagcggcgtcgtggagaccagatccctgaacgacgccacgctgctcaagtcactgacggagagaggagtggcggtgaaagcgggcgtgtcgggcgcgcaccacaccgtgcaatgcgacgtcgtcatcgtcgggtcaggctgcggaggcggcgtggccgccgccgtgctggcggcggcggggcgcaaggtcgtcgtcgttgagaagggggactacttcacagccgagagctacacctccgtggagggcccgtccatggagcgcctctacgagaaggggggcatcttctgcacgtccaacgtgacgaccatcatgttcgcgggcacgacggtcggcggcggctctgccatcaactggtccgccagtgtccgcacgccggagtgggtcacgcaggagtgggcgcgcgagcatgggctccccatgttcgggaggccggagtacgcgcacgccatggacgcggtttgcgccaggctcgccgtcaccggcgggtgccgggaggaagggttccagaacaaggtgctccgccgcggctgcgaggcgcttgggctgcgtggcgacgccgtgccgcgcaactcgtcggagggccacttctgcggtagctgccacctgggctgccccaccggcgacaagcgcggcaccgacacgacgtggctcgtcgacgccgtcgcgcgcggcgcggtcgtactcacaggttgcaaggccgagcgttttgtgctggagagcaacccaggcggcagggacggccggagcaacaggtgcgtgggcctggtggcgacgtgcatgagcgacggcatcaccaagaagctgcgcatcgaggccaaggtttccgtctcggcgtgtggcgcgctcatgacgccgcctctgctccgcaacagcgggctccagaacagccacgtcggccgcaaccttcacctgcacccggtgtctatggcgtggggctactttccggacagcacgccggaggcagagctcagtggcaagtgctacgagggtggcatcatcacgaccatgcgtcgcgtcaccgcgcgcaccatcatccagacgccggcgctggggccaggatgctgggcttcgctggtcccctgggagtcgggccgcgacatgaaggagcgcatgctccgctacgcgcgcaccgcgcacgccttcgccctggtccgtgaccgcggcgcggggcacgtcgacggcgagggccgcgtgcgctacaccccgagccgggaggacgtggacgagctccgcaacgggctgcgccagacgctgcgcatcctggtggccgccggagcggccgaggtcggcacccaccgcagcgacgggctccggctgcggtgcgacggcctccgcgacgaggacctggaggcgttcctgaagcaggtgaccgtagagaaaggtcccatggtcccggggcatgacaagtgggcgctccattgctcggcgcaccagatgggcagctgccggatggggtccagcccgaaacacggcgccgtggacggccgcggcgagagctgggaggcggaggggctgtacgtgtgcgatggcagcctgctgcccacggcggtgggcgtcaaccccatgatcaccatacagtccaccgcgtactgcgtctccaagggcatcgcggagtctctggcgcgtgacaataaatagtagcctggtttgagaccgtcggatcgtgctcgcgcgcaaatggttgttgcccctgccagtggctgtgtgtgtgcatgttggatgtgtcttcatccttgtaatttgttgcataaaaagcccatcggctcgtattttcatacatcattttttaacgcttttcctatatacttagttgaggtcattgaacttaaaaataatttcagaggacaatattgtaccattaactagcccaagtatagtttattatttgttttttgttataatatatcaagttgttgtctctatctgaccataaaaacaattatatattgttaattattttt

SEQ ID NO: 89631 - DNA, 895 bp, Zea Mays
gtatctggaactggaacccatctcgacactattcttgtagacaaggagcctccggtacagccagagtatgaacagcagctgcaccgcggagacaagcaggaggatgaccaggagcgttggcccgattctccacagcctccacttgttattcgagccgcgcttcctgtgccgatggcgccgccgagatgccatcctgcgcaagtgccgcattgagtcgacgagccgagcgcgcagggtgtccgtgtcggtgtcgacccacaccgcggtgtacacctttggcgcctgctgagaatcgtcggccttggcgtcgatggagcatggcgcgtccttgtcgatacggctatcgttcagcgtcttgttcatcgacagtttttttgccatggtggcttctgcctttctcatggctgcttccaacagggatcggttgatgttcgtgtctgtttcaccagatgaacatttcgctgattcaccagcacatctgctgctggctgtctccgtgaccttgctttccatgcagaggcttttcttcatggatgaagcgtctgagtcaccaccgttttgatctgcagaagctgcctgtagcgtcttcattttctgttggttgctgcaggcaaaaccggcaagcgatttgcaaggaccttgttactacaccaccagctactgatccatcaccaggggagacgttgaagccagacttggtggagaaacaggtcggtcgcaagcgccgcgccaatgtccgtatttctggtcctgagtgggtgtaatgtcttgtggctgacaggcgggtctgggctaccagtgcctgctagtataaataatgagtgtgtgtgttcaggaagggtatgcttgtaatgaaaactattctgaatctctaagaaactctccgttccctgcc

SEQ ID NO: 89632 - DNA, 110 bp, Zea Mays
ctgaaatttcaccgagagccccgacaagcaacgtcgctggtgcacccccatccaccgcgcgaagggaaacgacgaaaggccagcatcggaagaactcggagtgaagtgac

SEQ ID NO: 89633 - DNA, 565 bp, Zea Mays
gagcggaagcatttcgagaggtttcaggggagagttcaagaattggcacatcatacctggtctttgtgaaagttcgccggtcatggagaaccagttctctatatttgtatctcgagacgggggtaataagaaatactcatcagttttggctcctggacatcatgaaggtctgaagaaaaatagtgactctggaatttcttcatgggactggaatttaagtggtcaacactcgacctatcatgcattgttccctcgggcatggactgtttatgatggtgaacctgatccagaccttaaaatctcatgtcgtcaaatatcacctttcattcctcatgattacaaggatagcagtcttccaacatctgtatttgtgtatactctagtaaacactgggagagatcgtgcaaaagtaagcctgttaatgacatgggcgaattctattggaggtttttcgcataattcaggaggccactacaatgagcccttcattgcggaagatggagtatcaggagtgcttctgcatcacaaaacagccaaggataatccacctgtcacttttgctgtt

SEQ ID NO: 89634 - DNA, 2254 bp, Zea Mays
ctcagaatgtgaatgtgacagtcttgccagtgtttggtctttctggagaaaaccatgtttccgcaaaggaaatgtggaacaccatgctacagaatggtcactttgatcgggaaaatttcagtgctggtcccagtatgccttcttctccaggacagaaactctgtgcagctgtctcagcctcaacttgggttgagccacatggtagatgtactgttgtgtttgctctggcttggtcctcacctaaagtaaagtttcaaaaaggatgcacatataacaggaggtacacccaattctacggaacttctgagaaatcggctgttaatttggtacatgatgccttaacaaaatataaactttgggaagaagaaattgagaagtggcaaaaccccatactgaaggatgaaaggcttccagaatggtataagttcactctttttaatgagctttactttctggtagctggggggactgtttggacagatggtcaacccccagcaatcgatgagaaaaagagtcctggttttaatcaccagaagtcctcaaagaggggtactaaagacaccaatcagggatctgttaaagatagacatgtcaacctggcagtggagcaagtacctcatggtggttacatggctaatggtgatgatcacagtgtatccaagttcgcagcagttcatggatcagaaatgcaagaacaaatcaatggactcaagtcagaagagccaattccttacttgatttcaaaggatggccctgaacacgttggcaagtttttgtatctagaaggagtggaatacatcatgtggaacacatatgatgtgcatttctatgcatcttttgctctccttgatttgttcccaaaaatagagttgagtatccaacgtgattttgccaatgctgtgctgtatgaagatcggcgcaaagtaaaatttttggctgatggtacatccggaatccgcaaggttaaaggtgcagtgcctcatgacctcggaacgcatgatccgtggcatgaaatgaatgcatataacatacacgatacaagcaaatggaaagatttgaaccccaaatttgtgctccagatatacagagactttgctgctacaggtgatatgcaattcggtcgagatgtttggcctgcagtctgtgctgctatggactatatggatcagtttgaccgtgatggtgatggtctcattgagaatgatggatttcctgatcaaacctatgatgcttggactgttcatggaatcagtgcttactgtggttgtctttggcttgctgcacttcaagctgcagctacaatggctcatcgccttggggatcggcactttgctgagaagtacaagctcaagtttataaaagccaaagcagtatatgaggcgaagttatggaatgggtcatatttcaattacgacagcggcacaagtagcaacagtagatccattcaggctgatcagctggcaggacagtggtatgctgcctcgtcgggcttgcccccgcttttcgatgagcacaagataagaactgctctgcaaaaaatatttgaattcaacgtgatgaaggttaaaggaggacggatgggagctgtaaatggtatgactccaaagggaaaggtggacgagacatgcatgcaatcacgtgaaatctggactggtgttacatacgctgttgctgcaaatatgctgctccatggaatggagcatcaaggctttacgaccgcagaaggaatttttactgcgggatggtcagaagaaggatatgggtattggttccaaacaccagaaggatggaccacagatgggcattatagatccctcgtatacatgcggcctcttgccatttgggcgatccagtatgcagtttctcctcccaaggctattcttgaggcccccaaagttaacctaatggaccgaatacatatctcccctcacatggtccgagcaattagcgagataagcattagaaaggtagcacccgacaatagatgtttccctagctctgccttccactgtgaatgctgatccgaaggtaaacatgcagctgctgagcaacttgcaaccttttttttggcttttttcggtttctccttgccccccccccccctttcaaggtccaggtgggggggctcaggagttcttttcttggatcagagggcttatccaaaccaccaccaaactcgtgactcaagagagttcatgttgtataattgtacagcaaactgttagtcacataatctttttttttcactttgaaa

SEQ ID NO: 89635 - DNA, 2687 bp, Zea Mays
ctcagaatgtgaatgtgacagtcttgccagtgtttggtctttctggagaaaaccatgtttccgcaaaggaaatgtggaacaccatgctacagaatggtcactttgatcgggaaaatttcagtgctggtcccagtatgccttcttctccaggacagaaactctgtgcagctgtctcagcctcaacttgggttgagccacatggtagatgtactgttgtgtttgctctggcttggtcctcacctaaagtaaagtttcaaaaaggatgcacatataacaggaggtacacccaattctacggaacttctgagaaatcggctgttaatttggtacatgatgccttaacaaaatataaactttgggaagaagaaattgagaagtggcaaaaccccatactgaaggatgaaaggcttccagaatggtataagttcactctttttaatgagctttactttctggtagctggggggactgtttggacagatggtcaacccccagcaatcgatgagaaaaagagtcctggttttaatcaccagaagtcctcaaagaggggtactaaagacaccaatcagggatctgttaaagatagacatgtcaacctggcagtggagcaagtacctcatggtggttacatggctaatggtgatgatcacagtgtatccaagttcgcagcagttcatggatcagaaatgcaagaacaaatcaatggactcaagtcagaagagccaattccttacttgatttcaaaggatggccctgaacacgttggcaagtttttgtatctagaaggagtggaatacatcatgtggaacacatatgatgtgcatttctatgcatcttttgctctccttgatttgttcccaaaaatagagttgagtatccaacgtgattttgccaatgctgtgctgtatgaagatcggcgcaaagtaaaatttttggctgatggtacatccggaatccgcaaggttaaaggtgcagtgcctcatgacctcggaacgcatgatccgtggcatgaaatgaatgcatataacatacacgatacaagcaaatggaaagatttgaaccccaaatttgtgctccagatatacagagactttgctgctacaggtgatatgcaattcggtcgagatgtttggcctgcagtctgtgctgctatggactatatggatcagtttgaccgtgatggtgatggtctcattgagaatgatggatttcctgatcaaacctatgatgcttggactgttcatggaatcagtgcttactgtggttgtctttggcttgctgcacttcaagctgcagctacaatggctcatcgccttggggatcggcactttgctgagaagtacaagctcaagtttataaaagccaaagcagtatatgaggcgaagttatggaatgggtcatatttcaattacgacagcggcacaagtagcaacagtagatccattcaggctgatcagctggcaggacagtggtatgctgcctcgtcgggcttgcccccgcttttcgatgagcacaagataagaactgctctgcaaaaaatatttgaattcaacgtgatgaaggttaaaggaggacggatgggagctgtaaatggtatgactccaaagggaaaggtggacgagacatgcatgcaatcacgtgaaatctggactggtgttacatacgctgttgctgcaaatatgctgctccatggaatggagcatcaaggctttacgaccgcagaaggaatttttactgcgggatggtcagaagaaggatatgggtatgccctgtctcacacattgttgagcagaagtttcagattttttttttcagtggtgcagcttttcacattaccttagcagtgcatctcttatctcgttattaacttggcagtgcattccttatctcatttataacttagcagtgcatttcttatctttcttttttttgttgcttctattatatatattccatgagaaacctaggaatcagatgttctagtgcggcttatcgtatgttattcctaaatctgtatagagcagtctacttttaccttttttctaacacatgccaaattgtctctaattaaatgaagttttgagtagtgtttgttttgagtcatgttcatcaatgagatacataacatgggtttaccgcggtgctgcaggtattggttccaaacaccagaaggatggaccacagatgggcattatagatccctcgtatacatgcggcctcttgccatttgggcgatccagtatgcagtttctcctcccaaggctattcttgaggcccccaaagttaacctaatggaccgaatacatatctcccctcacatggtccgagcaattagcgagataagcattagaaaggtagcacccgacaatagatgtttccctagctctgccttccactgtgaatgctgatccgaaggtaaacatgcagctgctgagcaacttgcaaccttttttttggcttttttcggtttctccttgccccccccccccctttcaaggtccaggtgggggggctcaggagttcttttcttggatcagagggcttatccaaaccaccaccaaactcgtgactcaagagagttcatgttgtataattgtacagcaaactgttagtcacataatctttttttttcactttgaaagttttgtgctgttcacttgaatagagctagaaataaaagaactggg

SEQ ID NO: 89636 - DNA, 908 bp, Zea Mays
atggtcgccaacagcttcccggaggcgtgcctcccggaccggaagctgcacgtggctcgacagctcgtctctgtcgtctatggtggcggcggcgcaacagcagcgggagaaggcggcgtcgcaggtgtggcgggcggtggtggggtggatcggcttccttgttcaggttctgcttcagatccttcggggcacgccgtcctgcgcccagctctttccttcatcggcgtccggtacccgctcctctccgggcccgcagccttgaacccgtcgttagaggtggccttcatgccgctccgctccgaggtcccagctgacgcggcacctgccccgacacctgcgcctgagcccgtgggccgcctcacgctgatccagtacacgggctgttatactgtaagggcaccggtgctgtactacgttctcctgacgttgcaggacagcgtgcacaaggtcttctacgccatcgtcgaggccgctgcagttcgcgcagacaacagccatcttggaggtcagctgcttgtttttcgtctcccattttcgattgctcggtcacagtatctaattccaatattgtatgtctcggttgaacttgtgaaggcgttgcaagcacatatcattaattgggatattcatatgtttgatgaggagatcggcaatactactcaggtttgtggagtggacttgactgacaaagtagtggacataattttccatgtatttgatgctaactgtgatggtaagctgagctcagaggagttcttgaggtcattacaaagaagagaaaatgacattcgccagccagcaacttctggttttctaggggtgatcacctgctggttgaactgtacaaagtgttctcttcaacaaatgctgccccagtagattcttttgatagtcgtgacactttgttc

SEQ ID NO: 89637 - DNA, 112 bp, Zea Mays
atgttttgtttaccatctctattgtcaagattaaagctctggatatcttttcaaggccatgctgagtgtacaggtaatccagtccagaaaattgtgtttatttttaaattgt

SEQ ID NO: 89638 - DNA, 272 bp, Zea Mays
tattgattcttttgatgtctctacatgtgttgctgcggaggaagccgacagcgcggctatggtcgctgagaagaaggttgtcgcgtctgtgtagcttgtcgccgttgctgcgcacaaggcgggctgcgccgtggatgctgtctgtttgtattacttttcgttggttgcattaagtgttgtactgtgtgtttggtaatgcagttacttttgtattcagtgaactgtttggtaatgcgattccttttgtatttagtgaattgtgtggtactgcg

SEQ ID NO: 89639 - DNA, 1084 bp, Zea Mays
cgggctccctcctgtgtacaccactcccgccccgcctaccattttatccccgcctctcctggcctctgccgccccgtcgcacagaatcgcttggtgcaccctgcgagggcctcctcgaaaccctagcttgcccagcccctccgggccatgggcaagtacatgcgcaaggccaaggcttccagcgaggttgtcatcatggatgtcgccgccgctccgctcggagtccgcacccgagcgcgcgccctcgcgctgcagcgtctgcaggagcagcagacgcagtgggaggaaggtgctggcggcgagtacctggagctaaggaaccggaggctcgagaagctgccgccgccgccggcgaccacgaggaggtcgggcgggaggaaagcggcagccgaggccgccgcaactaaggaggctgaggcgtcgtacggggagaacatgctcgagttggaggccatggagaggattaccagggagacgacgccctgcagcttgattaacacccagatgactagcactcctgggtccacgagatccggccactcttgccaccgcagggtgaacgctcctccggtgcacgccgtcccaagttctagggagatgaatgagtacttcgctgccgaacagcgacggcaacagcaggatttcattgacaagtacaacttcgatcctgcaaacgactgccctctcccaggcaggtttgagtgggtgaagctagactgatggattcagagggacgagagagcagcaggcatggaatggaactcactccccgctccctccacaccaccccagcgttgtggcagaggcgcataccgtcgtgttagcttcgtttctgctgtaaaaaaaaacccttagtgttttatttagcatgtagccttaactggtcgtgtgttacagtacagaactgatgctgagttacaacaccctgatctgatccctcaactccaatgtaacccttaacagctcattctgtaaggaacctgtcaccctgttacctgttgctgaactaatgaagtagagctagataatgacgttttatcgtagttattattaataacttatcctctgtgatgttgcacctgaa

SEQ ID NO: 89640 - DNA, 104 bp, Zea Mays
ttttttcttttttggagagaaacagtgtctgaataatcaggcacccctagcaatcccaaacacgaaaccaaatctgtgtgaggctgtgagctatactatactac

SEQ ID NO: 89641 - DNA, 2657 bp, Zea Mays
aattcgcctgagttccttggaataaaagaagatttgcgatccttaagcctcacgttccttgatctgctggtgtggaagttgatcttgatcatgttcccgttcgtcgtcttcatggacaatttgatttggagatggggccggaaatgatagagcaggatggatggtaggaaaaggaaggggaaattcaggaattctctcaggcgtatggctatggagtgcctgtgctctggtgagcagttgaaggcgtcagatgagaccatgcggtcatctgattctacgatcacaaaggatttctcggccagtgggtactcttctcggaatggagagattgagcagtaccttgataatggcaacatagaggaagccgagttgtcgctccgggagggcatttgcctaaattatgaggaagcaagggcattgctaggaaggctagaatatcaacggggtcatgtagaggcagcactccgtgtctttgatgggatagacatatctgcattagttcctaagatgaaaatctcaattgctagaaaaacagaccgtcggaagactcattcacagtgggattccccaccaatgcccttgcatgctgtcagccttctcatggaggccatatatcttaaagcaagagcacttcatgatcttgggaaagataaagaagctgcacaagaatgtagaatgatattggatattgtggaagcagctgtacctgagggcttgccagcaggctttgggaaaggctgtaaattgaacgaaataatatgcaaggctgtagagttgctccctgagctgtggaaatcaggggggttttcacttgaaaccatttcttcatataggaggtcacttcttaataattggaatcttgatggagagacaatagcaaggatacaaaagaaatttgctgtttttctcctatatagtggttgtgaagcacgccctccaaatcttcattctcagttggacggttcatttgtacctcgcaacaatattgaagaggctatccttcttttgatgattcttttgaggaagtccaatctcaagaggattgagcaagatccctctgtgatgcatcaccttacttttgcactgtccatgtcaggacagctaattccactggctggacagtttgaagaattgttacctggtgtgttagacaaaaaagaatggttgtacagcgttgcattgtgttatttagcagaagaagatgatctgagtgccctgaatctactcaaaattatactaaaatctggagaggactccgttcaactcatagaactgcttctagcttcaaaggcttgcattgagatgagtattcatactgaaggtgctttttatgcaaggagagccattgcaaatatgcagggaggatgcaaaccaatggcaggacttgcaaacctattgcttggtgttgcactttctaatcaggctagaagtgcaatatctgatacagatagagcttcttggcagtgcgaagcactggaagcccttgggaatgctgaaaaaaatatacatgggaaagattctagggcattatacagtctcagccttgaaaatgctgtgcagaggaaattagaattagctgccttttatgcaaagaggctggtgaaacttgaggctggatcagagttgaggagttggctccttttagctcgaatacttagtgctcaaaagctgtttgctgatgctgaaacagttgttgatgctgctctagatcaaactgggaaatggtgtcaaggagatttattgcgaaccaaagccagaattcaggctgcacaggggcaatttagagaagcggttgaaacatacacccaacttcttgctatcattcaacttagaacgaaaagtttaactgctggagtttgcttgccaaagggcaacaaggatgataaaggcctggaaacagagacctggtatgatctagctctcttatacctaggtatggcacaatggagggatgcagaggtttgtgtattgaagataagatccatcagtccttattctgcattggcttggcatgctacaggaaaaatatatgaagcaaaaggtcttagaaaagaagctttgggagcttttttcagagccttagatcttgatcctaaacatgtcccaagtttaatatcaactgccactgttctacaacaacttggtgacaggccattgccttctatacggtgcttcctgactgatgcattacaactggatagaactaatcatgttgcgtggttcaatcttggccttctttacaaagaggaaggtggcaggtcagcagctgaggctgctgaatgcttccaagctgctgcttttcttaaagaaactgcaccttcagaacctttcagatgacatctacaggggctatagatgtaagctgctgtatgtatttttgatatatttcactgatgaaatagtggattacagagttctaaaaatgatcttcttgggagatcacagcattggaaactgttggaaaaaatgtttaacaattcaatctatagttccaattgttgcctgtatagcaacaagaaagacgatgatcttcgccttgtgtaggaacagtgcttactgtgatatatatatatagatagatgaccagtacattgtgtatcttgagtaaaatggtttcacatataaggtatcagactactctctccgtttgttaagaa

SEQ ID NO: 89642 - DNA, 233 bp, Zea Mays
attatttttcactcatttgttgtccaattggtttgagttggtctatacaggtaaacatctggaaagttcaaccatggatatattgagttgtaatgtatgtagctatatggaacatggagtcagtaagtaggatactagaaatgtatacgtataccattgttctcaatgacatctactagggttttatgtgtttttttttgacatctctgcaaataaggcaagatacccagctt

SEQ ID NO: 89643 - DNA, 3644 bp, Zea Mays
atgaagcgggcgatcgtgagtgccggcgagggtggtgacacgcgagggcctgggggaaacgcccctggtgctagtgacggtggagaaagaagccctagtggatcacgaggtgaggagaaactctatcaaacatggtggatgaaagcgcatggagagtgggggaaagaaagcaaaaaagagaggaatctgtgggctaacatgtatgacgagaagatttgggatgtcgagatcggccctgagatcattgacgaggcgctccatcctgccaccgtaggccgtggcatcatcgagctcgatgtgtggcctgcacccagtcatgagcagattgtgcggcttgagaccccggtgtcggagagggcggacaaggatgagggcagggcacgtaacggagggagagagagcagcagttgcagccgccactacctcctctccagcttcgcgtccactcccctcaaaaccctaaacgcgctcaggaccctagttgtcatgtcgtaccgcggagggcgcgggggcggcgggcccaactcgcaccgcgggcgcgggcggggcggcggcggtggggcgggacgccgcggcggcggcgggggacgcggggagcagaggtggtgggacccggagtggcgagccgagcgcctccggcagatgcatggggaggtggaaaaggtcgatgagaatgaatggtggaacaagattgggcaattaagagaagggtcccagcaggagctagtagtcaagcggaattttggacgggatggacaaaatatacttgcaaacatggctcagagacaaggaatttactttaatgcatacaacaaagggaagacacttgttttcagcaaggtacccttacctgattatcgagcagatctggacgacaggcatggatcaacacaaaaggagattaagatgtctaatcagacagaggcgcgagtcgaagaccttttgtccaggtcaaagtggaacaacaattctgcaagcacatcaactgtctcaacgagacaaattttccctggcgcatcctcgtctgtagttgaaccagcagcaccaattgataaagaaaagctcagttcccagcttagggagttgcagaattcaaggaagacgacagcaagtgctagatcaatgcaatcttttagggagaaattacctgcattcagcatgagagaggggtttctgaaagcagtggcagccaatcaggttctggtcatttctggcgagacaggctgcggcaaaacaactcagcttccacagttcattctagaagaagaaataaacagcctccgcggtgctgattgcaacataatttgtactcagccccgccgtatatctgccatttcagtagcagcaagagtatctgctgagagaggtgaagaactcggcgaggctgttggataccagattcgccttgaatcaaaacggtctgcacaaacacggttgctgttctgcactactggagttttgcttagaagactggttcaagagcctgacttaattggggtgagtcatttactagttgacgaaattcatgaacgcggcatgaatgaagattttctcatcataatactgcgtgaccttctaccaagacgtccagatcttcgccttgtactgatgagtgcaactataaatgctgaactattttccatgtactttggagatgctccagtgatgcacatcccggggttcacttttcctgttgctgagttgtttctggaagatgttctagaaaagacacgttacaggatcaattccgaacgtgataattttgcaggtagttcaaggagaaagaggttttcatcagttaagagtgatccactatctgatgtttttgaggacattgacattactaaggagtatggaaattacagcagttcaacaaggcagtcccttgaagcttggtctgctgctgaactagatttgagccttgtggaaaatacaattgaatatatttgtcgctatgaagcagaaggtgcaatccttgtgttccttactggctgggatgaaatttcgaagcttctggacaagattaaagggaataatttccttggcagtcctaatagatttcttgttcttcctttgcatggttctatgccaactgtgaatcaacgcgaaatttttgacagaccaccagctaatatgagaaaaattgttttggcaaccaacattgcggagagtagtatcactatagatgatgttgtctatgtgattgattgtggtaaggccaaggagacaagctatgatgccttgaataagctcgcatgccttcttccgtcatggatatcaaaagcttctgctcatcagaggagaggtcgtgcaggccgcgttcagccaggtttttgctatcggctctatccaaagatcattcacgatgcaatgccacagtttcagttgcctgaaattctcaggactcctttgcaagagctatgccttaccatcaaaagcttacagcttggagcagtatcctcctttttagccaagtcactgcagccaccagatccactttctgttaagaatgctattgagcttcttaaaaccattggcgcactggatgatatggaggagctcacttctcttgggcgacatctctgtactctcccactggacccaaacatcgggaaaatgctgcttatgggatctgtattccagtgcctggatccagtattgacaattgctgctgctctcgcatatcgaaatccatttgtgctcccaatagatagaaaagaagaagctgatgctgtcaaaagatcatttgctggtgactcgtgcagtgatcacattgctcttgttaaggcgtttgtagcatggaaggatgctaaaaggagtggtagagaacgcactttctgttgggaaagttttctgtcccctatgaccctgaagatgatggacgacatgcgaaatcaattttttgatctactatctgatattgggtttgttagcaagacagcaggagtgaaggcatataaccgctatggtaatgatctggagatggtttgcgctgtcttgtgcgctgggctgtacccaaatgttgtgcaatgcaaaaggcgaggcaagaggactgctttctacaccaaagatgtgggaaaagtggacattcatccatcatcagtcaatgcattcgtaaaccaattcccgttacctttcttggtttacagtgagaaggtgaagactgctagcatttatgtaagggactcgacaaatatatcagactatgcccttctactctttggtggttcgcttagtccgagcaaaactggagaaggcattgagatgcttgggggttatcttcatttctcggctccaaagcgtaccatagagttgattcagaaattaagaggtgaattggacaaactccttcagaaaaagattgaggaacctggactcgacatcttttcgcaaggaaagggtgttgtggcggcagctgtagaactgctacacagtcaaaatttcgaccattagatgccaaatattacatgttatcaggacaagtttcacactagacgaaagcaaaatcagcgtattcttttgtaaatctcacctctgcgtgttagcatatttctgttgctttttttagaaaccagaatttgagcccagcaacaaccacaacgatatcgttgcggagaaaggacttatacaaggtgattctctgt

SEQ ID NO: 89644 - DNA, 770 bp, Zea Mays
acctcctctcattgtgcctgccttccctttcagaaaaaaaattgtttacatccgaaatgcaaagaaactcttttatacctctcacatccacccggtctatataaatagaaaaaacaaattactaaataattaagttataaattttgatctgtttttgtttttatggtcatccaagtggtggatgtgatgaactataaaagaggtcatttgtattcgagatatatagaatttcttcccctttccctttctctcccctgtaatgcgagcgagcgacacagcttgcgagcaattttcagcgagaaaaatgcgaaacaccacgcacatcatttcatcaatcgggccgcggggcgcgggacgcgtaaggatctttcgtgctccttcaagtcaagctatggccgtggcctcaccgcctcctggccagctggaacgtgcgcttcaagaactggttggcggcctcgtcgtcgcggtggcacagcacccggaggatggtgttcgggtcggcggggtcccacctccgcgtcgtgggcggcagcggcgtgcacccgcctgcgccggcgcggccgtcctcgctgatggagtcgcacgtggcgacgctgaacgcgtcgatgaggtagtccgtggagcgtgccatgagctccacgacggcctcggccgtctctgcctcccgcgccaccacgtcctcggggaccagcccttccccgcacgtggagaaggcgcgcctcaggctccggaagtcctcctccaccgtggcgtggtcggcgcgcacgaag

SEQ ID NO: 89645 - DNA, 132 bp, Zea Mays
ttatccgagaaaattcaattaaacgaactaaatctaatagttataggaaacacttttataattatgtaaaaatggtacatataagtctacatagtgtaagcacaaaccaaaaaagtttggctagaaaaataa

SEQ ID NO: 89646 - DNA, 762 bp, Zea Mays
atgctggggtggaccccgaacgcctccgagatgtcgccggtgaagcggttcccctccagccgcacccggtacagctcggagcagttcttcaagcacggcggcagcctgccgctgaagttattgtggttcgccgtgaagttgtgcagcgcgaagccgtcgcagaggccctgcggcagctcgccggagaagctgttgttcgcgaagctcacatcggtcaacgccagccctgcgccgaggtccggcggtacggtgccactcatgttgttgtcgaacactgacaggtaccggaggttcctcagcaacgagacggtgggaggcagctcgccttccagattgttggtgttgacgtccaagatttgcagcgccgtcatgttgccgatctccggcggcaactggccggtgagctcgttgaagaagagctccagccgcgtgagctgcttcaggttgccgagtgagtttggtatcgatcccctaagtaggttcgccgacaaatccagttgggtcaggttcgccaactcgccgagctctggcgggatctcgccggtgagattgttgctgaagaggtataagattagcagcttcgtcgccttgccgagctccggtgggattctgccctgaagcgagttgttctgcacttggaaagatatgagctccggccagctcgtgaatagccgccctgggatctcgccggtgagattgttggatgatatgccgaactcccgcatcttctgcatcccagcgaacgacgacggcaagttccca

SEQ ID NO: 89647 - DNA, 348 bp, Zea Mays
atggtagaacatatttggaagaatggatttatgccggactataatcggtggatctttcatggtgaagcacatcgtacgagagaggaggtgctgagacaatgcgtcgagcattatgatgctgatgcgggggtagcagatatgttgaacgactatcacgaggcacagtacgacggaggatgtacagatgacgagccagagccgactgtaaaggcgttctacgacatgtttgacgcggcacagaagccccttcacggccagacaaaggtttctcaactggatgccattgggcgtgtaatgacgttcaagtcgcagtacatcaagagtcgagatgcttcgatggcttgttga

SEQ ID NO: 89648 - DNA, 445 bp, Zea Mays
ccaccaaaaacccttccgccccgagccgaccggaaccctacccatcctgcagcgccgccgcccgcccgccccgccccttcagtccttcaccccctaccccttcaccccctaccccttcttgcgccgtcatcccgatcccctacgctcgctgaggcattatgggtaaatcaagcaagaagtccagtgttaaggctgcacctgctgctgtctcagttccagaggggaaatctgcaaagaaggggaagagaaatgcagaagatgagattgagaaggccgtgagtgcaaagaagcaaaagaccgtacctgaaaaagctgtgccggttaagaagcagccccctccaaagaaagttgagagcagcagctctgaggaggattcttcagattccgaagtggaggtgatataacattcttctcttttggctcatgtttctcctttagttaaaaa

SEQ ID NO: 89649 - DNA, 102 bp, Zea Mays
cccactcagaggtttcttccaaactgttgctagcaggcctgaaggaaatttttttatgcgacttcattttgactctatgtatgcccatatctgcaatctaac

SEQ ID NO: 89650 - DNA, 1034 bp, Zea Mays
atgcttgcgtactgcaaatctttggatgagctctctcagaatggagcaacaattgtccactggataaaaaaggttgtaagaggggatttcatcatctacttcaacaaaatttttgatgctttatgcaagctttctgcagattccgatgctaatgttcaaagtgcagctcaccttcttgacaggcttgtcaaggtatattcacctggactgtactcatatgtctacaacttgtccttgtttctcttcttaattatccctgataatataactatatcaaccaggatatcataaccgagagtgaccagttcagcatagaagaattcatgccgcttttgagagagcgcatgaatgtgctgaatccttatgtaagacaatttttggtggggtggataacagtgttagacattgttcctgatattgacatgcttggtttccttcctgattttctcgatggtttattcaatatgctgagtgattccagccatgagataaggcagcaagctgatgcggcactttctgagtttctgcaggagataaataactcaccaaatgtagattatggtcgtatggttgaaatactcattcggagggcagaccctactgatgaattcacttggttgacgtctatcacatggatcaacgagtttgtgaagcttggtggggaacaacttgttccttactatgcagatatattgtgtgctatcttaccatgcatatctgacgaggaggagaaaatccgagtggttgcacgtgaaacaaatgaggaactatgtgctataaaagctgatccaactgagggatttgatattggagcaatcctttcaatcgcaaaaaggttctctatcaagtcctttggaaatgaaattgtgtgctatcttaccatgcatatctgaagacatacaaaaagttcgaggcagaaatatatgtcctcacaaaggatgaaggtggccggcacactgcctttgtcacaaattacagcccccaattctacttcaggacagctgatgtcactggaagggttgagctgcttgggg

SEQ ID NO: 89651 - DNA, 502 bp, Zea Mays
acctaccgagccggaaccgagtctagtagatcgggccgaagtggaagatgtgggccatgggccttctagtttattttttatttttggaaaaatataaaacttaaattcggtaaattctgattaaaatcgacaaccaaagaaaaacagttggtaatactttaaatcgattttgatactgattccgaaatacaataccgattaccgattatgttatcgaaaaatactgttatcggtgaatcgaatcgaaaacgatttccgaaaaccgaaaaattttgaaactgttttcatccctatttagagctattggaaatacaacgggcgtgtctggtgctgacatcaatggtgcacctgacatgttcggtacctccaaaatatactcaaggaataactattggatttctttggggaatataaatagaacttgtgcctatcctttactagcatattagcaccctattcacttgtatacatctcttcagagctaataaacacactccacaca

SEQ ID NO: 89652 - DNA, 980 bp, Zea Mays
atgaggccgcgggccgccccttccgaagaccgcagttccgcttgggttattaggttcgggtaccgcactgttaaacccgaagttcgctgtaaaaattcggcgtccgccgcccaccgcctacacggctacaccttcctctctccggcgacctcccgaaacagaactgactcgcatggtcttcgctccgtcgcgaggcccacgttagcggagcctcccactctctggctcaactgcctacgtctggaccagatcctccatgagctcgcgggagtgcattggtggcgcgacgcgaccaacgtcgtctcgaccctccttagcggcaaccgaagacctgaatcctacaaaggcacatgcatgtggtaagcaaccatgcctaataaaacttgcattttttactttgatttagttggtggcgtttttttatgtaaatgatatgttggataaaaggtggccaggaggaggctcagatctggaatccagtccgaatgttcctgacaagccaactgcaacaacgattattgcttcaattttagcgatctattttttctaacttgcaaaccaacatgctcaaaattgcagtcaaattagcaatgttgtcagataccaatcctccaactctgaaattcgtgaggttgctgcaacgaccagactgaacattattcattttgtttaaaagtatgtactacaagagaataatcggttgtcatatgaatgtcataaacagggtatgtgcttctaacacttgcatatttggatggatgatgtttatggacggatagagatgttcccctaatactttgtaccgtcaaaagatgctatggacactataatggtctattaacaagtaagaataatttggatagtcctccaaggtgatgtttgtggtgaatctgtagtagatgcatgcaacacgagaggacacacattaaaaatttccttgctcgtgatttttttcaacttttatggtgcacacaaatgat

SEQ ID NO: 89653 - DNA, 958 bp, Zea Mays
atgaggccgcgggccgccccttccgaagaccgcagttccgcttgggttattaggttcgggtaccgcactgttaaacccgaagttcgctgtaaaaattcggcgtccgccgcccaccgcctacacggctacaccttcctctctccggcgacctcccgaaacagaactgactcgcatggtcttcgctccgtcgcgaggcccacgttagcggagcctcccactctctggctcaactgcctacgtctggaccagatcctccatgagctcgcgggagtgcattggtggcgcgacgcgaccaacgtcgtctcgaccctccttagcggcaaccgaagacctgaatcctacaaaggcacatgcatgtggtggccaggaggaggctcagatctggaatccagtccgaatgttcctgacaagccaactgcaacaacgattattgcttcaattttagcgatctattttttctaacttgcaaaccaacatgctcaaaattgcagtcaaattagcaatgttgtcagataccaatcctccaactctgaaattcgtgaggttgctgcaacgaccagactgaacattattcattttgtttaaaagtatgtactacaagagaataatcggttgtcatatgaatgtcataaacagggtatgtgcttctaacacttgcatatttggatggatgatgtttatggacggatagagatgttcccctaatactttgtaccgtcaaaagatgctatggacactataatggtctattaacaagtaagaataatttggatagtcctccaaggtgatgtttgtggtgaatctgtagtagatgcatgcaacacgagaggacacacattaaaaatttccttgctcgtgatttttttcaacttttatggtgcacacaaatgatatctttctatagcaaaaaattttgtcgtgtgtttcagtttgatacatcatgaaaacctattgcata

SEQ ID NO: 89654 - DNA, 1087 bp, Zea Mays
accaagacccattttttaaattttaaacaatccagtttctgcttattttctgaatgacctgaaagctagcgatatgcccatatatataactacttttgatcaacctgaacactttctcaagtcattgcatacagagcaaaaatcttgatatttgcacccactaacaagatttatttctgtgtctcagtccctctgcatggtccacaatgatctgattcctttggtaactgttgtttatctgcagtcgaggattccagtgttgacgtatcagcagcgacagaaaatttccagagcttaagcctacataatgatgagttagctgcaaaaaagactgctgaagataaccctgtagtgttaattcctggtcatttgcaagttaccaatacagaatgtgttagtttgagctttggcagttttggatctggtgcattttctaggctactcccacaaaagaccactgatagcaatgtggaattccttgtttgagaggattctgcaacagtagatccaatagatgccaggaatcaagattactatgaaagtggtgcaataacttcaccagcagaagaaaatcttgaggccatgctaggaactaacatggagaagtcgatgcaccttctgtttcacaggctaatgagctcagtcaggacgtacttgatccttttgtacttaaatatgacgtgccatcagtttcaagtcatgcttattcaaacatgaacactccacaacctagcacaatagaggacccacaaggaaacaaccaagcacatactctttcccatttgtctaacatgatgcctacaacaacccaagttgccgacctgctttgctgtctgttagaggacatattcttcctcccccacaaccaggtatggcatattggccgccaccaccatggggatatcctacacatccaatgaggccttggggacgccccccatggccaacacaaccacttccatcaccagcggattatggctctcatcaagtgactcctccccctcacgatgactttgcggacagatgtctcaattctagtggtgcagctacgaacaacaatctgatgtcctgatcgagagcgatggag

SEQ ID NO: 89655 - DNA, 1904 bp, Zea Mays
atgatctacaggttttctgtaacctatgtcgtctccaattcgataataacaaacggaagagggaggaacagatttctccttgctatccataattgcggagttcgtcgtgatccgccatgctcgacgaccatccctttgctgatggcatctcgagccccatagcagcgcacatctttgacttctgcgacaatggcagcggcggcgacctcttcacggccgtgaacgtggcctcagacctgttcacggcgccatcagaggatgcctcgtcgtcgtccgtagtgacgacgcctcccgcgccctgcggccacggcgacgacatgccgttgggcaccgccgcggcgcctgctgcctcggccttctcccccatgccgtccttcgactccaccctctccgctctcctcgaagaagaagacccatcggttccaaacccagaactcctcctacccatcgactacccgttcgcggcggcggcggctggagacgagcctcaccccgaacagcagcagcagcagttcgcgcaggtgccagtaatgcttccactggccggtgcggcccagcacccgggtctgcagacgcacagcacggcgtccgagctgatgcagctagacgagtgcttcgcggcggcaatggctggaggaggagggtacgtgggcctaaacgagtccatgtgccagcagccgcagcccggcgcgttgttctccaccaccggcggcatgatggaaaccggcgcgccgggctgctactttgacaaggacatggcggcggcggcggcggcgcagggtggcttcttggggaccggttgcaatggcatgatgatgtcgataatggggatggaggagatcggcgagtaccagcggatgatggagggcgccagcgactcgctggccggcacgcacattcccgacgcggactgtgccgccgcggcacagatggcgttcagcggcaacgccgttgccggggagatgcagatgggcggcagcatgagcccggggcggctgccggcggcgacggcgacggaggcgtcgagcctggaggacgccaacttcaagagcgcccgcatcaccgtggaggagaggcgggagaagatcatcaggtacatcaagaagcggaacaaacgcaacttcagaaagaagatcaagtacgcttgcagaaagaccctggcggacagcaggccccgcgtccgcggcaggttcgccaagaatgacgactacggcgagccgtcgtcaagggtgatgcagaaccacgaggagtacgaccaaatggcggccagcatgaaggcagaagacattctcgatcccgacgccgcgcacttcaacgggatgaattcctacttgttcaaccacaccgtcgaatcctggctgtgacgcgaacgaacgccggctaaaccaccctgaattttccggatccttcggcttcctgatcctgtgcagagttctcagcagcgcctttaatttttcgttgtttcggccccatggaataactggtcacgtgtaggttattatataaatcacgcgcgcagctccatcgggcgctagataaatggctcgtcaagctaaagtttagctactaaacagaaaaatagaaaaataactcttcaacagactaactatttaactcgtcagttatccgactcttaaattggcttcaccaccagcggaacttacactctgacgagccaaactagatagatagtctgttggagtaagatgctatatatatagtgcaatctttatgtaaaagtaaaatagaaggttaaatagagagagaaaaaaataaaagtcacttggagatgctctatgtagtctcttgtcactgtatatgcaaatctgatttcaccagcttgcggtagaacctgtgggtatatagttgagagttttgaagaaaataaagcttggatatacaaa

SEQ ID NO: 89656 - DNA, 1883 bp, Zea Mays
cattttaagatcggcgcaaataaaattgtacgacagtttttagaactatacgatgattagaatttttatcctggaggatggcatctcgagccccatagcagcgcacatctttgacttctgcgacaatggcagcggcggcgacctcttcacggccgtgaacgtggcctcagacctgttcacggcgccatcagaggatgcctcgtcgtcgtccgtagtgacgacgcctcccgcgccctgcggccacggcgacgacatgccgttgggcaccgccgcggcgcctgctgcctcggccttctcccccatgccgtccttcgactccaccctctccgctctcctcgaagaagaagacccatcggttccaaacccagaactcctcctacccatcgactacccgttcgcggcggcggcggctggagacgagcctcaccccgaacagcagcagcagcagttcgcgcaggtgccagtaatgcttccactggccggtgcggcccagcacccgggtctgcagacgcacagcacggcgtccgagctgatgcagctagacgagtgcttcgcggcggcaatggctggaggaggagggtacgtgggcctaaacgagtccatgtgccagcagccgcagcccggcgcgttgttctccaccaccggcggcatgatggaaaccggcgcgccgggctgctactttgacaaggacatggcggcggcggcggcggcgcagggtggcttcttggggaccggttgcaatggcatgatgatgtcgataatggggatggaggagatcggcgagtaccagcggatgatggagggcgccagcgactcgctggccggcacgcacattcccgacgcggactgtgccgccgcggcacagatggcgttcagcggcaacgccgttgccggggagatgcagatgggcggcagcatgagcccggggcggctgccggcggcgacggcgacggaggcgtcgagcctggaggacgccaacttcaagagcgcccgcatcaccgtggaggagaggcgggagaagatcatcaggtacatcaagaagcggaacaaacgcaacttcagaaagaagatcaagtacgcttgcagaaagaccctggcggacagcaggccccgcgtccgcggcaggttcgccaagaatgacgactacggcgagccgtcgtcaagggtgatgcagaaccacgaggagtacgaccaaatggcggccagcatgaaggcagaagacattctcgatcccgacgccgcgcacttcaacgggatgaattcctacttgttcaaccacaccgtcgaatcctggctgtgacgcgaacgaacgccggctaaaccaccctgaattttccggatccttcggcttcctgatcctgtgcagagttctcagcagcgcctttaatttttcgttgtttcggccccatggaataactggtcacgtgtaggttattatataaatcacgcgcgcagctccatcgggcgctagataaatggctcgtcaagctaaagtttagctactaaacagaaaaatagaaaaataactcttcaacagactaactatttaactcgtcagttatccgactcttaaattggcttcaccaccagcggaacttacactctgacgagccaaactagatagatagtctgttggagtaagatgctatatatatagtgcaatctttatgtaaaagtaaaatagaaggttaaatagagagagaaaaaaataaaagtcacttggagatgctctatgtagtctcttgtcactgtatatgcaaatctgatttcaccagcttgcggtagaacctgtgggtatatagttgagagttttgaagaaaataaagcttggatatacaaatttgtacttgatttcttaatagaaacaaagcttgtgggatcat

SEQ ID NO: 89657 - DNA, 957 bp, Zea Mays
aaaaaggcacctgaaatcggcatttgcccggagcattcccacgatcgcctcgtagtggatgtcgtcgtcacccacgtcgtgagcctggggcccgtggccggcagacctggccaagcagtatatgcccagccgtcctgagcctataaaccctgcagccgggtcttcagtcttcacgcttgagctagctttcacaagacaaaacaagaacacaactgcagtgtaagtagcgctacgcggccggggagagatagggaaagcgggaagcaaggacgatggcgtctctgctcagcctgtacggcggcgacgccgccggcggtcggaggaggatgagccgaggtagcggcacggcgccggcgccggtgaggcgtctgctgaggaggctgaggtccagcttcatcagacggagcgcggcgcggccgaggacgagggcggcggcgaggttcgcctacgacctgcgcagctactcccagaacttcgacgacggcgtcatttcgtcgtcagctccggcggccacggctcgtgcgtagctgcgactccaggaggattctgcttcttctgtgtagtaacaagtaactgtagccaagatgttagctactagctagtgtggtttagtgctagtgcttcctcactgagctagagactcataatcgagtccagtgttaatttcttgtgattagctatctcatccagttattgtgtatatatggaagttactttgtctgtttttttcccttctgtcacgctatacacagtaattaatcagctgttggaattaatggatgggtatgcaaattaaaagggaatggaatggatggaaattataatataggggaacggtttttctgtaaccttctaaaccgatacgagacacatgcagacacggcggcgtagaagatttgctggagttgctcagcaaatgcgagtttttaagaaagtaaatcctctatgtgccaaacc

SEQ ID NO: 89658 - DNA, 225 bp, Zea Mays
atggcgtctctgctcggtctgtacaccagcggcagcgcccggggcaggagggtccacgccgccaggagcagtggccgccgccagtcggctgcgccgttgaagcagctgctgtcgaggttgaggtgctcctggaggagacgcgcggcgcggccgaggcgcggcgcggtcaggttcgggtatgacctgcatagctactcgcagaacttcgacgatggcgatgcctag

SEQ ID NO: 89659 - DNA, 234 bp, Zea Mays
atggactacacggtgtttgagattgctgaattggatggagcagcaatgatttatcacactaacagcaaaatgaaagatggccaaacggcggcccagcacgagccagacgcctgcgggccacaactctggcccaggcacgtcataccggcctggttaaaaaatggtgcagaaggtaggattcgaacccatgtcccgatggatgaagggtgggagccactggataaagctatctaa

SEQ ID NO: 89660 - DNA, 1814 bp, Zea Mays
cagttcccctcaccgccgtggacgcgcgaaccaacacccaaaccgtctgttcccaacagataacaccctcggctgcggcagctgcagcgccctcgctgccggcgcaggtccggcgaggcggccagccaagttctaggcctccgcctccggggccaaccctagccaccactcgcaacgccagaggcggggggcgccatgctgttccaagtgggagggcagggcgcgcgacccaccttcttcgagatgtccgccgcgcagcagctgcccgccagcctccgcgccgccctcacctattcgctcggggtttttgctctaagaagaccattactacacacagttttggattatgaagacgatttttttgctttgttaatgggtgtccttgagtcccatagcctacggacaacagatggttccttttcagagtcattatatggtctcaggaggagacctgttaaggttgcagtgaagagaaagagtcctggtacagaatccaatgacaaagtctatggttctgctctaaggaagcgccagaaaatcctttcagttgtttttttggttgttttgccatattttaagtcaaagttgcagtctatatataacaaagaaagggaagccaggttgcaggcaaccctttggggtcaggatgatgttagatttgatgaagttgactttgtattagatcaggagcagacttctcaagcacagactgaacctacaactggagaaatgtcaaatttgacacgttttaaaaagaattttgcctcacttataggtgtttgctatccatggattcatgcaactaatgaaggtctctcgtttgcataccagctcttgtatctgttggatgcaactgcattttatagtccagcactacatgtacttgggattcatgtttgtcgtgctactggacaagagctgatggattcatcttctaggatatcaaggattagaagtcgtgaacttgagaggcttcgcggtcctccatggttcaaggctgtgcaacgagtgttccttagttgtgtgtacacaactctagattatgcacaaaccggtttaattgctgcagtcttctttttcaagatgatggagtggtggtatcaatctgctgaagaaagaatgtcagctccgactgtatatccaccaccccctcctcctccaactcctaaggttgccaaagacgggattccgttgccacctgacaggacgctctgccccctgtgctgccagaagcgtgctaacccctccgttctttctgtttctggttttgttttttgctacagctgcatattcaaatctgtctcacagcataaaaggtgccctgtcacgctaatgcctgccggcgttgagcaaatcaggcgtctcttccacgatttgtagccatggaagacccgaaaacttcttttctaaagaccagggacgtcagcaactcagcatacagaaacatatatcagaaccaccattttgtaaactataagaaactcagcatacttttttaagcaaatgcatggatggcactttcttcccgatttcctttgtacggttattcttcgtccattggaaattgcacaggaaaagcaagctggagtttgagcttgacagtcttaggttgggggtgtataatctgttgttaggtgatactagcatatccattgagataggctgttgttaggtgatactagcatatccattgagataggcgttaattgtgtacctgcatgactgtatccactctcttcatttgtttgtaaaaaaaactgtctgtaattttggattggtcctgctcgacgtcacttatattggctgtttggagt

SEQ ID NO: 89661 - DNA, 785 bp, Zea Mays
atcgtagcccaaacatttcattagctagctctgaagataagagttgtaggaagctgaactctgcctcgctatcttcagttccgtcacagagtttcagtagttcagttttctccaacatcttatcttcagctcctctatcggtagctgttgcagagtgaagtacatgtgatgagttagcttggttagggtgagcactctgttcggcagttgaattcgagaatcggatggaaccaaatctgattgcaaaagcaagccaagacttggttttctccaatatctcatgttcagttggtcagatgatgtgtatgtgtactggtgcactgcagcttggacatgacttgtctgaagaatttgaagctgaaggtgagtgttggagggaaccaaatctccagctgcatgcacagcacaaggtttggtttcctccaatgtctcatcttcaactgtctcaaatcaatgcaactttgcaggcattttcaggatcattatccttatccttatccttatccttatccttcacagagtgaccaaatacagtattttcagttaaccaaatagtgagctacaattgattggaagctaatggtatctgagttgctccatatcttgttatacaattgattggaagctacaagcaagataggtgatatcactatctggaatatgtaaatggtgtggacaaataaaatatgagaactatgattgaaaacataatattattaattatccactatatgcaccacatcaattttgtaaacatatttatacaccgattagaatgttttgaa

SEQ ID NO: 89662 - DNA, 1395 bp, Zea Mays
atcgtagcccaaacatttcattagctagctctgaagataagagttgtaggaagctgaactctgcctcgctatcttcagttccgtcacagagtttcagtagttcagttttctccaacatcttatcttcagctcctctatcggtagctgttgcagagtgaagtacatgtgatgagttagcttggttaggcttggacatgacttgtctgaagaatttgaagctgaaggtgagtgttggagggaaccaaatctccagctgcatgcacagcacaagagtgaccaaatacagtattttcagttaaccaaatagtgagctacaattgattggaagctaatggtatctgagttgctccatatcttgttatacaattgattggaagctacaagcaagataggtctctcgtttgcataccagctcttgtatctgttggatgcaactgcattttatagtccagcactacatgtacttgggattcatgtttgtcgtgctactggacaagagctgatggattcatcttctaggatatcaaggattagaagtcgtgaacttgagaggcttcgcggtcctccatggttcaaggctgtgcaacgagtgttccttagttgtgtgtacacaactctagattatgcacaaaccggtttaattgctgcagtcttctttttcaagatgatggagtggtggtatcaatctgctgaagaaagaatgtcagctccgactgtatatccaccaccccctcctcctccaactcctaaggttgccaaagacgggattccgttgccacctgacaggacgctctgccccctgtgctgccagaagcgtgctaacccctccgttctttctgtttctggttttgttttttgctacagctgcatattcaaatctgtctcacagcataaaaggtgccctgtcacgctaatgcctgccggcgttgagcaaatcaggcgtctcttccacgatttgtagccatggaagacccgaaaacttcttttctaaagaccagggacgtcagcaactcagcatacagaaacatatatcagaaccaccattttgtaaactataagaaactcagcatacttttttaagcaaatgcatggatggcactttcttcccgatttcctttgtacggttattcttcgtccattggaaattgcacaggaaaagcaagctggagtttgagcttgacagtcttaggttgggggtgtataatctgttgttaggtgatactagcatatccattgagataggctgttgttaggtgatactagcatatccattgagataggcgttaattgtgtacctgcatgactgtatccactctcttcatttgtttgtaaaaaaaactgtctgtaattttggattggtcctgctcgacgtcacttatattggctgtttggagt

SEQ ID NO: 89663 - DNA, 1087 bp, Zea Mays
atctctatctcatcgtcatcattagaaaggccgaagccgtctccgttcctcctcgacgcgtctcttccacagccgcaacctctatccctcgtctggtatcgtctcccacacccctctgccccaactcagaaaaaccctcgaaaagcggcggcggcgcgacatggcggaggtcgaggctccagctgctgcggttgcggcggcgacccctgaggtggcgacggtgaccgagggcggagccgctacggaggcgaagggtccgcacaagctgcaccgccagtggaccttctggtacgacatccagtccaagcccaaacccggcgctgcgtggggcacctccctcaaaaaggcgtacaccttcgacaccgtcgaggagttttggggcttgtatgatcatgttttccgtccaagcaagttgcctgggactgctgattttcacctattcaaggctggagtagagccaaaatgggaagacccagagtgtgcaaatggtggcaaatggactgtcccatgcaacagaaagccaacctttgagaccatgtggcttgaaacgttgatggctcttgttggggagcagtttgatgaaacagatgacatttgtggaattgttgctagtgtccgtccaagaggagataagcttgcattgtggactaggactgccagcaatgaagctgtccaggtaaacattggcaagaaatggaaggatgtcatcgactacaatgacaagatcatctacactttccatgacgactcgagaagggataagccaagcagaggtggacggtacaccgtgtaagttgcacacgaagaaggtcgttgttgttcggactggacagagggtgagagtggagttttgtgctgagatcggcaccagctttcatttaatacagcctcagcttacctgaggcaattttcgcacctgttatgatgttgttttgctctcagataggtttatgtagcacaagaaagatatgttggagacgttgacgattttgtatgcaactaaatttctatcttaatatgccccgattcaacagcacccagtcgagtcattgcgttctggagattcttgcagcgcatttccatgttt

SEQ ID NO: 89664 - DNA, 976 bp, Zea Mays
gacgcgtctcttccacagccgcaacctctatccctcgtctggtatcgtctcccacacccctctgccccaactcagaaaaaccctcgaaaagcggcggcggcgcgacatggcggaggtcgaggctccagctgctgcggttgcggcggcgacccctgaggtggcgacggtgaccgagggcggagccgctacggaggcgaagggtccgcacaagctgcaccgccagtggaccttctgcttgtatgatcatgttttccgtccaagcaagttgcctgggactgctgattttcacctattcaaggctggagtagagccaaaatgggaagacccagagtgtgcaaatggtggcaaatggactgtcccatgcaacagaaagccaacctttgagaccatgtggcttgaaacgttgatggctcttgttggggagcagtttgatgaaacagatgacatttgtggaattgttgctagtgtccgtccaagaggagataagcttgcattgtggactaggactgccagcaatgaagctgtccaggtaaacattggcaagaaatggaaggatgtcatcgactacaatgacaagatcatctacactttccatgacgactcgagaagggataagccaagcagaggtggacggtacaccgtgtaagttgcacacgaagaaggtcgttgttgttcggactggacagagggtgagagtggagttttgtgctgagatcggcaccagctttcatttaatacagcctcagcttacctgaggcaattttcgcacctgttatgatgttgttttgctctcagataggtttatgtagcacaagaaagatatgttggagacgttgacgattttgtatgcaactaaatttctatcttaatatgccccgattcaacagcacccagtcgagtcattgcgttctggagattcttgcagcgcatttccatgtttaagaccttattatgaaatgtctggcattcgtggatc

SEQ ID NO: 89665 - DNA, 4397 bp, Zea Mays
atggcggaggtcgaggctccagctgctgcggttgcggcggcgacccctgaggtggcgacggtgaccgagggcggagccgctacggaggcgaagggtccgcacaagctgcaccgccagtggaccttctggtacgacatccagtccaagcccaaacccggcgctgcgtggggcacctccctcaaaaaggcgtacaccttcgacaccgtcgaggagttttggggcttgtatgatcatgttttccgtccaagcaagttgcctgggactgctgattttcacctattcaaggctggagtagagccaaaatgggaagacccagagtgtgcaaatggtggcaaatggactgtcccatgcaacagaaagccaacctttgagaccatgtggcttgaaacgttgatggctcttgttggggagcagtttgatgaaacagatgacatttgtggaattgttgctagtgtccgtccaagaggagataagcttgcattgtggactaggactgccagcaatgaagctgtccaggtaaacattggcaagaaatggaaggatgtcatcgactacaatgacaagatcatctacactttccatgacgactcgagaagggataagccaagcagaggtggacggtacaccgtaaaactgggcagggcagggcgcgctcagcacgtttgcttcggaaacactgcgagtgtgcgacacatttcccggcttgatctcgaagcgagccctgatgtgtttgtcatgcacctgcctgccttggcttgtgctctaatcaacgccggactccccaactcacggttggtgcgggacgccaccccgccaccttaccgcccgcctcggcgcctcaccagtcaccacacctcgcgcctgccatcagctatatcaccgtggccacttccgtgtcccttcacggatacctcacccccacagcccccggtcgatcgctcggcaatcggcatggacgccggctcggtcaccggtggcctcgccgcgggctcgcacatgcgggacgagctgcatgtcatgcgcgcccgcgaggagccgaacgccaaggtccggagcgccgacgtgaagacgtgccgcgtgtgcgccgacgaggtcgggacgcgggaggacgggcagcccttcgtggcgtgcgccgagtgcggcttccccgtctgccggccctgctacgagtacgagcgcagcgagggcacgcagtgctgcccgcagtgcaacacccgctacaagcgccagaaagggtgcccgagggtggaaggggacgaggaggagggcccggagatggacgacttcgaggacgagttccccgccaagagccccaagaagcctcacgagcctgtcgcgttcgacgtctactcggagaacggcgagcacccggcgcagaaatggcggacgggtggccagacgctgtcgtccttcaccggaagcgtcgccgggaaggacctggaggcggagagggagatggaggggagcatggagtggaaggaccggatcgacaagtggaagaccaagcaggagaagaggggcaagctcaaccacgacgacagcgacgacgacgacgacaagaacgaagacgagtacatgctgcttgccgaggcccgacagccgctgtggcgcaaggttccgatcccgtcgagcatgatcaacccgtaccgcatcgtcatcgtgctccgcctggtggtgctctgcttcttcctcaagttccggatcacgacgcccgccacggacgccgtgcctctgtggctggcgtccgtcatctgcgagctctggttcgccttctcctggatcctggaccagctgccaaagtgggcgccggtgacgcgggagacgtacctggaccgcctggcgctgcggtacgaccgtgagggcgaggcgtgccggctgtcccccatcgacttcttcgtcagcacggtggacccgctcaaggagccgcccatcatcaccgccaacaccgtgctgtccatcctcgccgtcgactaccccgtggaccgcgtcagctgctacgtctccgacgacggcgcgtccatgctgctcttcgacgcgctgtccgagaccgccgagttcgcgcgccgctgggtgcccttctgcaagaagttcgccgtggagccgcgcgccccggagttctacttctcgcagaagatcgactacctcaaggacaaggtgcagccgacgttcgtcaaggagcgccgcgccatgaagagggagtacgaggagttcaaggtgcgcatcaacgcgctggtggccaaggcgcagaagaagcccgaggaggggtgggtcatgcaggacggcacgccgtggcccgggaacaacacgcgcgaccacccgggcatgatccaggtctacctcggcaaccagggcgcgctggacgtggagggccacgagctgccgcgcctcgtctacgtgtcccgtgagaagcgccccgggtacaaccaccacaagaaggcgggcgccatgaacgcgctggtgcgcgtctccgccgtgctcaccaacgcgcccttcatcctcaacctcgactgcgaccactacgtcaacaacagcaaggccgtgcgcgaggccatgtgcttcctcatggacccgcagctggggaagaagctctgctacgtccagttcccgcagcgcttcgatggcatcgatcgccacgaccgatacgccaaccgcaacgtcgtcttcttcgacatcaacatgaaggggctggacggcatccagggcccggtgtacgtcggcacggggtgcgtgttcaaccgccaggcgctgtacggctacgacccgccgcggcccgagaagcggcccaagatgacgtgcgactgctggccgtcgtggtgctgctgctgctgctgcttcggcggcggcaagcgcggcaaggcgcgcaaggacaagaagggcgacggcggcgaggagccgcgccggggcctgctcggcttctacaggaagcggagcaagaaggacaagctcggcggcgggtcggtggccggcagcaagaagggcggcgggctgtacaagaagcaccagcgcgcgttcgagctggaggagatcgaggaggggctggaggggtacgacgagctggagcgctcctcgctcatgtcgcagaagagcttcgagaagcggttcggccagtcgcccgtgttcatcgcctccacgctcgtcgaggacggcggcctgccgcagggcgccgccgccgaccccgccgcgctcatcaaggaggccatccacgtcatcagctgcggatacgaggagaagaccgagtggggcaaggagattgggtggatctatgggtcggtgacagaggatatcctgacggggttcaagatgcactgccgggggtggaagtccgtgtactgcacgccgacacggccggcgttcaaggggtcggcgcccatcaacttgtctgatcgtctccaccaggtgctgcgctgggcgctggggtccgtggagatcttcatgagccgccactgcccgctctggtacgcctacggcggccggctcaagtggctggagcgcttcgcctacaccaacaccatcgtgtaccccttcacctccatcccgctcctcgcctactgcaccatccccgccgtctgcctgctcaccggcaagttcatcattcccacgctgaacaacctcgccagcatctggttcatcgcgctcttcctgtccatcatcgcgacgagcgtcctggagctgcggtggagcggggtgagcatcgaggactggtggcgcaacgagcagttctgggtcatcggcggcgtgtccgcgcatctcttcgccgtgttccagggcttcctcaaggttctgggcggcgtggacaccagcttcaccgtcacctccaaggcggccggcgacgaggccgacgccttcggggacctctacctcttcaagtggaccaccctgctggtgccccccaccacgctcatcatcatcaacatggtgggcatcgtggccggcgtgtccgacgccgtcaacaacggctacggctcctggggcccgctcttcggcaagctcttcttctccttctgggtcatcgtccacctctacccgttcctcaaggggctcatggggaggcagaaccggacgcccaccatcgtcgtgctctggtccatcctcctcgcctccatcttctcgctcgtctgggtcaggatcgacccgtttatcccgaaggccaagggccccatcctcaagccatgcggagtcgagtgctgagctcacctagctaccttcttgttgcatgtacggacgccgccgtgcgtttggacatacaggcacttttgggccaggctactcatgttcgactttttttttaattttgtacaagatttgtgatcgagtgactgagtgagacagagtgttgggtgtaagaactgtgatggaattcactcaaattaatggacattttttttcttcaactgcaa

SEQ ID NO: 89666 - DNA, 1100 bp, Zea Mays
ctcgcccccacgtctgatccgcgtatggatcccccgtccctcaacaacctccaccgcaggtgctcgacggaatgtcccaccgcccaccggcgccaatgctggacaccctctcggatgccttcgccgctgcggtgctcctctcctccaccgacaagtcggacactctgcccccagggaggctctcacctgtctccccgctcctgcactcctccaagcacgggcaccaccacccgaccccgagctcctcctcgggctcctctggctccgtctctcgggccccgatcgcgcccgcctccggtctcgcctcgcgccggagccactccggcgtgatcccgctcccttccgacgcgccaccgccgcacaggctccggcccactcatcttcacatccgggtcgtgctccagctccgccacctcgccgctcaccaacgcgctccccgcgggcaacatctgtcccttcggtcgcctcgccaaaccgctcccctccccctgccccaccgcgaccccgcgcctctcaccacgacgtgctcggcttcgggatcgccaactacggccacgggagcatcgtccgctcccatggcgagggcgtcgtgcccgccgccaccgacgacgacgcggtcctcaggcgcgccatgtcgaccgccgaccccgaggaggtcaagagggtcgggaacgacctatacatgaagggctgcttcgagggggccctcaggctctacgaccgcgccctcgccctttgccccaacaatgctgcgtgccggggcaaccgcatcgccgctctcattggcctcgaccgcctcggcgaggccgtcaaggagtgtgaggaggcgctatggattgattcgtcctacggccgcgcgcaccaccgccttgcgtcgctgcatataaggtgaatggattgcttgggccttggggtggtgccgtggtggccggcacagagattgcttctcggatctatgcaacttcttttctatagaatgggcttgctttgctccaccgatctcatcctcagctaaataaaaaatactagagtgatctgccaccattatgtatctcgagttcgaatctaaattttgctatttttagcagaacttgcgaaaa

SEQ ID NO: 89667 - DNA, 462 bp, Zea Mays
atgaacggccattccaggagtgtgcattgtcactttcgtgaaagaaaccaccatgtcggcgtggtgatgctggagatgctgttggggcagcgggcactggactcgaaccggccgagcgggcagctgagcctggctgactgggcgaagccgtacctggcagaccgtcggaggctggcgcggctcatggacccgtggttcaagggccagtacaactccaggcaggtgttcacgcaactgacgctcggctgcctgaccggcgagctccacagccggccctcgatgaaggaggtggtggagacgccggagcgggtggaggcgatgaagagccagacgcgctgcggtgggtccgggtctggccgcaccggtgccgtggcgcaccagcggtcaccgcgcgtcggcggcggcacccgtgacgcgtctagttccaccgccaacggccacaacgccaggcccacgcgatga

SEQ ID NO: 89668 - DNA, 228 bp, Zea Mays
atgatctgcatggtcgtcactgctcggatcatgatgccaagggcaatggtggggctttcagcaggccgaatactgttctccatgccagagcaagcactctgcttccttagtggggccaactcaatctttgctgacgagaaacttctcacaaccgcgaacaacgactttgccgcggaccaggcgatgtttacattccgttcacctatatatgcctatgttatttattga

SEQ ID NO: 89669 - DNA, 1378 bp, Zea Mays
ggcttggttccccgtgacgacttgccagccgcgctagatacacactcttcatcacccggagtcccggacggacgcacacgcatcgcttgcttgtcgttctccactcctcttcccccgctgctcgcctctcgattccgcctcatcgcgtccgcgaactccatgtccactgcgaccgcgaccctggccgccgcgcgatccccggctgtcgcgcttctcagcctgcgccgccgcgcacccgcggctgcccccattcgcttccccggtctccgcgtcggctctggttgccgtcacatagctatggcttccgcggcgcactcccgcgcccccaccgacccgcttcccaagggtgctgatttatttttccgggcagtaatctcgaacatggaaaaggtttatttgagcaggaatcctacagccaaaaccattctggagcttgtcaatggttatggtataaactcactttctgattttttcactgattttggttatttacctcgcgaagaactcagatttccagctaaaaagcttagggcactatggttttccccgcccactaatgatggctactctggaactggtacatatggacctttgccaaggatattcatttcagaacttcttgtggatgagttgactactcaaagccaggaaattatacataaatacattaaaacttctggcaatggaaataatcatgctgctattgcaagtacatctggggagctaacatgggagaagcccatttattcagatttccagattttgtctagggaaagtgaatatgctgcatggactcttgttaatggctatgcactaaatcatgccacaattgccacccatcgcctagaatcagatatcagaagtattaataagttcaacaaatttgtggaggacaatggcttcaagttaaattcagaaggagggattctgaaagtgagtcctgatggtctccttcaacaaagttcaacagtagctgactcatcattgtttacgtttgctgatggaataactgaatctattcctcgatcatacattgaatttgctgaacgtctcctgttaccacagttcaaagatttacaagatgaagaggtgaaagaataccacaggcgtgatggttttgaggtgggcaatgcggacaagatattcgaaagtacatcgaaggatcagctgacgcggagatctgcatgaacagtgaactctagatctgcatatgaccccgtgaactctctagatctgcaaacaacccagtgtgcctcttggaagtgtgttggtgactgtgaaatgattgtacctacttgggtgaaataaagcatgggagtcaataaaaagtaactgtttctttattctacatctgttgaatccaaagagagaattagtt

SEQ ID NO: 89670 - DNA, 1450 bp, Zea Mays
ggcttggttccccgtgacgacttgccagccgcgctagatacacactcttcatcacccggagtcccggacggacgcacacgcatcgcttgcttgtcgttctccactcctcttcccccgctgctcgcctctcgattccgcctcatcgcgtccgcgaactccatgtccactgcgaccgcgaccctggccgccgcgcgatccccggctgtcgcgcttctcagcctgcgccgccgcgcacccgcggctgcccccattcgcttccccggtctccgcgtcggctctggttgccgtcacatagctatggcttccgcggcgcactcccgcgcccccaccgacccgcttcccaagggtgctgatttatttttccgggcagtaatctcgaacatggaaaaggtttatttgagcaggaatcctacagccaaaaccattctggagcttgtacgatcttatgatggtgatcacatttgctatgatcactttgctttccggacatttggggtcaatggttatggtataaactcactttctgattttttcactgattttggttatttacctcgcgaagaactcagatttccagctaaaaagcttagggcactatggttttccccgcccactaatgatggctactctggaactggtacatatggacctttgccaaggatattcatttcagaacttcttgtggatgagttgactactcaaagccaggaaattatacataaatacattaaaacttctggcaatggaaataatcatgctgctattgcaagtacatctggggagctaacatgggagaagcccatttattcagatttccagattttgtctagggaaagtgaatatgctgcatggactcttgttaatggctatgcactaaatcatgccacaattgccacccatcgcctagaatcagatatcagaagtattaataagttcaacaaatttgtggaggacaatggcttcaagttaaattcagaaggagggattctgaaagtgagtcctgatggtctccttcaacaaagttcaacagtagctgactcatcattgtttacgtttgctgatggaataactgaatctattcctcgatcatacattgaatttgctgaacgtctcctgttaccacagttcaaagatttacaagatgaagaggtgaaagaataccacaggcgtgatggttttgaggtgggcaatgcggacaagatattcgaaagtacatcgaaggatcagctgacgcggagatctgcatgaacagtgaactctagatctgcatatgaccccgtgaactctctagatctgcaaacaacccagtgtgcctcttggaagtgtgttggtgactgtgaaatgattgtacctacttgggtgaaataaagcatgggagtcaataaaaagtaactgtttctttattctacatctgttgaatccaaagagagaattagttactgtttccctt

SEQ ID NO: 89671 - DNA, 525 bp, Zea Mays
cggaggggcggtggcggtggcgaccggcggcggcagcgctggggcgcggagtggggagggtgtggcgacggcggcgaggtgatcacctgaaggatttgctatcgtggtaggcaagtctgattcttggctgatgtcgtcctcctacacaatggcaaaacagtgtcttctttttttttttctttttctttctctttctctgtcccttttccggttctcccttctgttggggcactggattttctttcgactctctcatccatcaggtcctgcggctcacgtcgatctgttcagaacagttgctcgagtgtctctgctcatctgtcgtgtgtatggagttgtgtgctgccatggtgcgttgtgtgtgtgtgtgtgtgcgtgtcctggtcttaaggatactatatatgtaaacacagtctgagaggaatggcgggtgttgtgataaggaggcaaacgaaaatgcataggttgcgtgtttggtgaataattctgggcgttttgtagtcatgttattaaagtttaaacgtg

SEQ ID NO: 89672 - DNA, 1233 bp, Zea Mays
atggtcgttggagggagaaaactgaaagggaccatgctcgtgaaaagagcagtagaggagttctacatcaagtcaaggttgctcctaagagatccagaaatggcatcgacactatttggcaagcaggatgagagtgtactgcagggagttacacatgtgatatgttgtactggaactacagcatttccatctaaacgctgggatggagagaatactccagaacgtgtagattgggatggcatcagaaatcttgtaagtgccttgccacagacaatcaagagactggttcttgtgtcatctattggtgttacaaaatacaatgagataccatggagcatcatgaatctgtttggtgtgctcaagtacaagaagatgggagaagactttgttcgtaattcaggaataccattcacgattatcatgtattcagaaggtagagataatacccagaaaacaaccgaattgttgctggaagctggtgagcaagagcttttacgcacctgggaagacccaatggacaagcagtgcaaacaggacagcaaggactcgattcggagaacaatcgtggagcatgataaggtgcatgagctgcatcgtttgtaccatgtacataaaacattgatggctgaatgcgatagccacaggtatcaaccgagagcagaaggaactcatgaagtggtgcagggatcaaggtcgaacctcaactgcagtccttctaccttaaggacaaaccaatctgctctccttggtaatgcacaatacccagctccgcaacaagtacatgaagatttgagtctccatgaatgcaagccagtgaactgcctcagcctcttcggtgaagaaaactcagcagccaaagaaaggtctctgctgattgacctggagccaagagtgatcaatggaatccagaacagcgagtacaggaacctgtacaaccacgagaacatatttgtcgctgagcatggtggtggtgccgggaacaactgggccagtggttgcaggcttgcagatactacccagaataaaatgcagaaagatcattttcaaagatgcagaatggagcgccaattggccaatttggaaaggttcagaataatttatgtactcctaagaatgtttcctctggatcctcttgacgcaggaccgaatgcatattctggtggcggtggcgtctttgttgacgatggcatcaaacaatccagtgagaccaaacttgcccttgccgagcactag

SEQ ID NO: 89673 - DNA, 96 bp, Zea Mays
ccacagcaagtataaaataagtttctttggaaagcaagaacgaagtaggcgaggaaaggcatacataggtcagaaaagtatgcatggtcgtcacgg

SEQ ID NO: 89674 - DNA, 1997 bp, Zea Mays
cgaaatgaaagaactgctgtttttagcaattgaaagttggggaaatcgctcagttggttagagtgctggctctgggaatccacggatcacgccacactcggacagttcgcccattgccaatatgccagatgatggattccttggttttagttagtcgctgctctttctatggcagtggttgatcctctcgtcgtgggtcggtttagtcattagctcgagaggacaggggagagataggagacaatctatgtaaccttagcctaccccaatagtaagtatcggaaaaaggaatccttctcgaaagagataggcagtcatcgcattatctacttgattatgatatttatttttatccaacggataatgcaaatcgcctataaattaaagtgaaagttcagtacgaactggtagagcgagagcagctagtttagaaggaaaagaaaaagggcgcctactcagtggtaagttaggtcattcctttccggctatcagaaaagagtatgatcgagggtcccataaggcaaagggaaggtgctcccccgacctactaccctcggagagattcctacggttgcaatggtgagttgtgaactttgtagagcttcgttctagttccatcatttttctgcattctttctaaagtgctagtttcctctatttctaatatcagagtaacacgggaattctctctgggaatccgctccccctgcttgcttgtattgggcatttggcagaggcaggttctccatcattaagaggcttctcactttggtatcgatatgcgtctgaactcctccactctttcactaggggtacacacaactctggacttgtgcagctaatagattactttctcaaaacagcctattttggaggaaatgcccatgggaatacggttcttgggataccacaggggagtaccatctcaccggtccttatgaacagctttccccactgaatcattagatcacccgcttatgttccctagttgtccaggtgtgacctagtttgcttagtaagtatggaaggacaaaagacgagtacagatgactactattctccggcagaaagtcactcatttcctcttaaaggtcccaaagatatgagtaaaaaactcttccaaatcaaagatttgcctattcttcgtagtacgagaatactcttacttctcattgacacagacgagaaagaagtaagtagaataaaggaagaatgttagtatagtaaaaggaaaagaaaaatccattatatatgctatatctcattcactgagtagtgcaataagcaactattcgttgacaccaactcacttatacttgaagacaggaacatagtaaagtcagctaatccattgacacattctctattctaagacaagaaaaaagtgtaactgaagaatagtactctttctattgttcatttcctatgaatctttcttcattcacttcattgaaaagatattgtgcatttacctaatttcctgtcatagatagtctagtgaagctagcttactaatgccaagaactactactcaccaaaacctatccttactaatacacggctatatgatattcttatttattattctatttctatatttactcatattctagtttcgtaaagctatactttagagaaggaaagagagattctaggaccacttgcccataagaataagaccgaacttaactacctgtaactgccccaactgcccatgtgtactaaccccccgaaatcactttccctactgctacgttgaaatgaaaatgcccgcctccaatccgcttagttagaccagactctcagacatatgattgttgagttagccaagtgaggggttcgttcagcccgtcaataaagctattctcggtatagaaatagataagaagagctccaattaggggcaggcgcaataaggaaggattgacgagacccaccggaacttcaactttcagtcttctatacgttacctgcctggaaacatgttgggtcgtgtc

SEQ ID NO: 89675 - DNA, 559 bp, Zea Mays
cttctatcctatcttattatgccgacgcctttctcggctaaatgatagaggcgcttcggacaggtagaaggactaattcagtctattggtgtggctatcgaaacttcttcgtctagtctagattggctgtacgggttacagttcttctttgttattggagtcgaggtagccaccaccgggaaaaggaaataggccttcattcgttttcttcctcgtagtcgtcccccggctaaggtatcatcagatatagaagaagtagagactggggggatatagctaaaaaggaatataactcgtccgagggcgtgggcgcaggtgcagtgccagtttcaagaaatgcgtatcgagataccagtatcgggctggtattggctcagggcccagcttcacctaagaacagcccttttataatatccatagcgtatatgaccgtagttaccaagccctataacggaattcccaacaacggatgcctatacggctttgtgaaatctagttgtagtaaagtaaagtatagagatttgaaagcagctggatcccaagagcactcttattcctc

SEQ ID NO: 89676 - DNA, 855 bp, Zea Mays
cttgatagctatcatgaaatcctgcctgttcagagtaagaaaacggatgcgctttagctttcgcgctagaaagagataatgaatgcgagcaagtgagtaacgtagattctacacgttatacgttactcatttgtgtagaacataagagagccctccattagtgcaaaaaagaatgaatcccttgataaggcccccgggtatcgacacgcggcttaatcccgatcacatcctgaggcaataatagagcgaataatgaaaagagtactccaccacgagcagcgaaagcacgctcagccaatcctcactcgacggctccgtccttgcttaaggaaaaagccgaaccactcgcagatggatctttttttttctacctttactgctcactctgtcagtccactaacaccaaacatattcacgtcatgaaagaatagattccagataaaaagtatactagcacatattcacgtcattaaagattagattccagattttgggtataaagtatactctcacagattcatccttgagtgcgtgaagatagggcaaggtaatgcggagaatgccacgactcttatatgtttcaaatcgggatggcatgtgtcatttcttataaggttcaggggcgtagcgagagagagagatagctaacctagccattggcggagagagggaggcaactgaagcttttagagtcgggtttaggtcttctttttgcttgccagaatccatcaacaggggctccacagggaggtatttattccataaagttatcaagttatagtggaattaccaaccggactggctttctccaagagagggttttgtcttttccgcttcgtcgcgcaaagaaaaaaa

SEQ ID NO: 89677 - DNA, 209 bp, Zea Mays
gctttactcaaaaaagtcagatttggctcgggtgcatcaaaacttgcaaccctcagagtatcctgatattgatgaggtggccttttcctttgccctttttctttcgccctttaacccggaagaagaacgaagaggatcttgtccaaaagatgatgtcggatattttatttaagtgatgccaaaaagcgctagcttctagtctaagtctg

SEQ ID NO: 89678 - DNA, 2857 bp, Zea Mays
ttacaaacaatctggtaagcttgagtggaccgactgagatctaaaatactatggttatggttatggttatggttatggtatggttaggaacagcttgacttatctcaacaagtgcaatttctttcaggcttattcactgaaatattagaaacccttttttctttcttaatgacttcgctcttcacttacttcatatccaactattgatagccggcctagtttcaaaggatacccagggcgctaagcatgaataggagacagtgaaaaacagcaatcagtataagaacgaaaacaaatagtagaaaggagttaacttgggtataggtttctagcttgggtgggaggactcactcactagggaggtagccgcaaaaataggaaacatagggagtagcagcaatttataataggaaagtaggtgtaagcagctacccgatagaagtctaacgaaagtaggaaagagtttattgagtgacttgaggataacgaaaccactatctatatagataggatttcctatgcataagatttctgagtagtacttgaagcttagcactagcattggcatttagtagtagttctggcaatgagtgactacctctatataccttgctcagggaaaggaataggcatatttctataaaggataagctggcaagcacaggtttctaaacaggagttaggtatgggttgtgtgatttgaacgaccaagtaacggatacaagacataggcccactataaaaaggagttcatttttgcgtaacggtgcagtaccggtatatccatatggtttaggtcaagtagttggataagctggataggtcaacaagtgagtacgttgagggagccgagccgtagttgatttgttttttcgttttcacgggcagagacaggtatagttgtttttacaagggctattgtttagccaatagagacatattgaataggtcaatgctaggaatatgcagtcacagataagataagtaaagaataagtgagtatgtacgagtcaactcataggtttagtagggctactagaaagaggagcttgggacagagctagcaagatatgaaccacgagcagaggttgtcccttgaaagaagcaccgaccgaacaggtatcgagatatgcatctggataggttgttttagctagctaggcatttgcttgtgattaatacttcttttcttaaggttaaggtagttagctaagcaagtatgtattcacggagaagcaatggtataggttgaggtttagaaagctaagtaaagtatttcaagtatgcatgcgtgataagtcaagcaaaacccggacggaagagatggatttttttatttgttagaggaaggtgtaatatgtgtatgtaataggactagaaagaggcatgtatggtataagtaaggaataggctttcacagaaaggcatggaatagcttagagggatagtatagtatttaacaaagaagcacgtaccgcatctggttaggtcaacaagttgttggttggcattcaaggtatgtgtaacgttgagaaacaggtgctaggtatgaacgagtaagctactaaaaataggcgagatatggtttcaatagcctaagagttcatggaaagggattcacagataggcgtgggcatgggaaagtaaagttatgtatgcaagagacaggtatgcacggaatagggataagcgagcaccgggagagatatgccagtaataggactaggtttagagaaataggcatatgtgaatagggctactagatcattaaagtataggttttgggtaagctcgctcatatcgaaagaagaaatcgaaggaaatgaagcataagctgactaggtcaaatcctaggctgtttcgatagacaaaagaaaatagaaaaaagtagtgagtgagaaagaaataagtaaaaaaataaaagacgacccagacgaaacaattagtgaaatcgttctatttcctccatatcctcaaacatatgcctatccccgcacatgttcttactcgcatattggacttacgaaaggtaagccttattcccagctatttaactcaaaaaaaaactcttaacgcccatatgttcattctttctttgcttctcatgtttccatgctcctttctggtggcaggaggcaaagaagagacataatggagataatgatggttcaaatccaaccattccttgggcgtggttcgagcgagaattcaatgatcagtatttagatgttatgtcccgggaagcgcttcgacagcaattcgttagcctaaaacaagggagtggtactgttcaggactacaatatgaaatgcgacaacttgatgaggtatgctcccgacattgtggcagatgacttccgcttgcgacggcaatatctggaaggtcccagatttacacaaataatcgaccttcctggtacagtgagactagtggatctgatggcacatgcgctacgagtggagtcatatgagcgggtcagcaaagctttgttctcaatgtaaagccacgagggatcatcaatcaaggccaacaatgaattccccgccatcagcaaatccagctaagcaaaattctggcgttgtgaattacgagaaggtttggtgtcgatattgtcaagggagacatcatgagtcaacttgctacaggaagaatggcacttgttacaattgtggtgggctcggtcatttcgctagggagtgtcccaagccaaattcaaaactcatgcttggtgtacagaccgaaccaaaccgatgacacagggagtagtggcgagaggtggcggtacacaacagccgagaggtcgtggaggtcccatctctcagcgggacgtgagatttggaggcagaggaggcgcgcg

SEQ ID NO: 89679 - DNA, 3354 bp, Zea Mays
gttttttcgttttcacgggcagagacaggtatagttgtttttacaagggctattgtttagccaatagagacatattgaataggtcaatgctaggaatatgcagtcacagataagataagtaaagaataagtgagtatgtacgagtcaactcataggtttagtagggctactagaaagaggagcttgggacagagctagcaagatatgaaccacgagcagaggttgtcccttgaaagaagcaccgaccgaacaggtatcgagatatgcatctggataggttgttttagctagctaggcatttgcttgtgattaatacttcttttcttaaggttaaggtagttagctaagcaagtatgtattcacggagaagcaatggtataggttgaggtttagaaagctaagtaaagtatttcaagtatgcatgcgtgataagtcaagcaaaacccggacggaagagatggatttttttatttgttagaggaaggtgtaatatgtgtatgtaataggactagaaagaggcatgtatggtataagtaaggaataggctttcacagaaaggcatggaatagcttagagggatagtatagtatttaacaaagaagcacgtaccgcatctggttaggtcaacaagttgttggttggcattcaaggtatgtgtaacgttgagaaacaggtgctaggtatgaacgagtaagctactaaaaataggcgagatatggtttcaatagcctaagagttcatggaaagggattcacagataggcgtgggcatgggaaagtaaagttatgtatgcaagagacaggtatgcacggaatagggataagcgagcaccgggagagatatgccagtaataggactaggtttagagaaataggcatatgtgaatagggctactagatcattaaagtataggttttgggtaagctcgctcatatcgaaagaagaaatcgaaggaaatgaagcataagctgactaggtcaaatcctaggctgtttcgatagacaaaagaaaatagaaaaaagtagtgagtgagaaagaaataagtaaaaaaataaaagacgacccagacgaaacaattagtgaaatcgttctatttcctccatatcctcaaacatatgcctatccccgcacatgttcttactcgcatattggacttacgaaaggaggcaaagaagagacataatggagataatgatggttcaaatccaaccattccttgggcgtggttcgagcgagaattcaatgatcagtatttagatgttatgtcccgggaagcgcttcgacagcaattcgttagcctaaaacaagggagtggtactgttcaggactacaatatgaaatgcgacaacttgatgaggtatgctcccgacattgtggcagatgacttccgcttgcgacggcaatatctggaaggtcccagatttacacaaataatcgaccttcctggtacagtgagactagtggatctgatggcacatgcgctacgagtggagtcatatgagcggggagtagtggcgagaggtggcggtacacaacagccgagaggtcgtggaggtcccatctctcagcgggacgtgagatttggaggcagaggaggcgcgcgagtcacagttcaggcacatcacagcgaggctgggggaccaatcgacagactagatcagacagatgacactaccgtggccacagaactgatagcaggtatcttcaatatttctgggtgctttgcttacgtactgattgatactggatgcagtcactcagtatcatctaaagcttgggtcaaaagatgtgggctggcgacaatagagagtggaaaaacaatgttgatcggaacctttgaattcttcattcaggaattgaggaaggtgacattccagaaaccggggactaagccattttcattgcaattcagacaagttggtgatcgaatcacgacaatctcagctttacaggcacaacatctaatcgagtcaggttgtaccgcctaccttgtatcagccatgcagacgaaatcggagctccaagaaaagaatcagaaattgaacctttccaccaagagccagcctatagtgaaattggtaagttgagggcgctaagccttttgtttaagatgagtaagggctcctttttttcagggaataagaataatccgaaagtcgctagattaggaaagcataggatcgaagtcttgaacggactcattcactgcctcagaatatgcccacgctgcgcgcccttgacattttgcatcactgtacatcttttctccattagccccacacgaaccagatttgctttttgaagcactagaaaagccaagcaaaactccaaagtgcccgggcctgcgaaagctgaatgagggtagcctctcaattccttgatattagtaggaaacggcatccccagtatgtcttttgttttggcgggatacaccctttctttcgtactcagaatccgaggttataatatgctcgactgatcctatttcactgtcaccacctttgcttcttcggttgatgagtctcaggtgactctattagattcttgggtcggggagttttcagtttctctagtgggagaaatggtgtttgacaggagggccaacagtgttaagaaaaaaaaggagattctggcggatacataaaaaccaaatgcttaatgtaggggattttcatactgtcagatcaagaagggttaggggaaccattcaatgccagagtaagctgggattaatacagcttaactgaagacttctttctctttttaccgaagatcattcttcccgaatagagtacgcgtaaggatcttcacttttttattagtaaggagtagcgaaaagagactttctatttctcagaagcctgccgcagctttttttctcacgaaagaccctttgacttgatagccagaacgccgatgaaagagaacgtaagtaagtctcctaaaaataagtagtagccctatccgattcattctcctatgcctacagatcgattttgagccgatgatcagagtgtttgtttggaaggaggtagtcccatcccatgtaagtggatgtaggcagatagccttcccttgttgaagaggctagtctttgtttcggattcccatgttgacgaagaaagtgcccgagctatcacatttcttattcgagggatttttatgtttacgatttgcgtgtttgggtgaaccttgaccagcctcggtatctagtgagccaatgaaattttcttccagagaggagccttacctaaagaagaaactatgcccctggtttgaagcgaagcgagaaaagacagcctttaccatcttgacgataacgagtcactagtctacaacgtaagcagattcctg

SEQ ID NO: 89680 - DNA, 648 bp, Zea Mays
gggacaacagaatcgaggagagagtcgagtaatcgcagagtcgaaccacgatgaagttgtgcccgcagtgttagtttgtaacgtataacttatcgaatgtttccgtggaagcggaaacaagtactagttagacgcagggaaacgagcagagaccgtaagtcgccgttagacgagtgaaggcgacccgaaggggccggcccgccagagtaagcaaaaaaggctctagtagatctcgtagtggagagagaagtcgagatatccagataggatggtctctttatgtcactaataatgctatctgttaaagactagcaaatattatgacaaaggttgtctggctctagactataacatggatagaggtgggaataccacatgggaggaaggggaagtttgcctggtagatctatctactccagctttcatcgtagttttcaggggaagggcggacgaagccactttgacaaacaggaaccagccacaagtaaaaaaaaggtgatgggaaatttccaattagatcgagattcttttttattgttatggatagaggttcgctttcccagctgtaaccgatgccacaaaggccttaggtttgaatgtttgattcgacttcttttccaattgtctttatctaaaggcagaattcgc

SEQ ID NO: 89681 - DNA, 1212 bp, Zea Mays
atgaggatcatcgataacttagaacagttccgccagatttacgcctctggcaagaagtggcaacgctgcgttgaagcgattgaaaatatcgacaacattcagcctggcgtcgcccactccatcggtgactcattgacttaccgcgtggagacagactccgcgaccgatgcgctatttaccgggcatcgacgctattttgaagtgcattactacctgcaagggcagcaaaaaattgaatatgcgccgaaagagacattacaggtagtggaatattatcgtgatgaaactgaccgtgaatatttaaaaggctgcggagaaaccgttgaggtccacgaagggcaaatcgttatttgcgatatccatgaagcgtatcggtttatctgcaataacgcggtcaaaaaagtggttctcaaagtcaccatcgaagatgaatttgtttcgttaaataaaaactcagaagccggtgtctacgcgtgggtaaaaagttcgctgggcggacgttgggcatttattactgcctatacctactggttcgtaaacctgttctttttcacctcactgttgccgcgcgttattgcttatgcttcgtatgccttcctcggatacgaatatattatgacgccggttgccaccaccattatcagtatggtgctgttcgccttctccacctgggtttccaccaacggggcgaaaatgttggggccaattacctccgtcacttcaacgctgatgctgctgttaacgctctcctacattttactggcaggtacggcgctggttggcggcgtacagcctgctgacgccatcaccgttgacgcgatgatcccgaacttcaactgggcgttcctcggcgttaccacctggatctttatggccctcaggtggcgcggagtccgtcgctgtgtattccacggcatggcggcgtattttggtctaccggaagcgttgatgaatcgctttgtcggtctggtgtcctttaccgcgatgttcggttccctgctgatgtggaccgcaacgccggtgaaaattttcttctccgaaatcccggaaggcatctttgatggttgtagtggtgaagctcgtgatgctctggatgagactgactctatatgcccgaaaggaccaatcaggtggatcatttggacagaggaagagatgggtgggtgcactgccctgccgcagagaaagaagacagctctatctcagaagtga

SEQ ID NO: 89682 - DNA, 1112 bp, Zea Mays
ctaattattcgtactttcggtgcatacgcctggtgaaggaaccttccttgggtagaaaagttactaatagctctgcctcgaacaaacccaattgtagtgatcgcccatattggatctttcgtatcgaaaagtgataggaggtgagacttgcctatttcctttggatgcctattcatatgttttgtgaacaagtgagcagctggtgctctagtatactgtagtgagcctgaatggtctttatgaattgtgcacttgctatattatttgttcttgcactttggccttgaatccttattgtgcaccgtggtctcttggctttgatgacagggatatccctttcccttctactgcttgatccatccctgcggcttgctctcttgagaaaaagaacctaagcgaattcccttatcttatttggaggattagccatggccttcctcagattatggggctcctagtttgctgatcttgtaaatctcttccccgctcaagttaaggttcccacggcaatgagtgctttgcttctctacatctcgtctgctatcttgattgagatgcttgttttcctagtaagagttgtacagcccatctcttcccttctattcactaccattccgcgtcttcgacttctattagtttctttctttctcactttctttggctacaatggttactgccagcaatatcagatcagaaatgttataagaaatagctatatctattttatttttctacttccgctacaggtggggatagactgattcggtcgggtcgataatctgccccgacctctcaagcctctaaagatcgataaatggtatctatctggatggaatgctagcaaagcaataaagtaccttgcgttgcgggtggaaaacagagaggaatctcctgctgcttcgttatcaagaaagaaagcttaggtttggatttcttctccttcacttgtgacctatgaagcaccaatgcttacgatccggtactagtcctccaattatcttcctcccaacgcggcaggtcggatcttctaacccgatctcttctcaggtttcgaggttcctagctgtactgattaagggaggacaggcaagtcactacactactccaaatgc

SEQ ID NO: 89683 - DNA, 276 bp, Zea Mays
aatggaatcaaatacgcagtatttacagaaaagagtcttcgtttattgggaaagaatcaatatacttttaatgtcgaatcgggattcactaagacagaaatcaagcattgggtcgaactcttctttggtgttaaggtagtagctgtgaatagccatcgactacccggaaagggtagaagaatgggacctattctgggacatacaatgcattacagacgtatgatcattacccttcaaccgggttattctattccacttctagatagagaaacgaac

SEQ ID NO: 89684 - DNA, 281 bp, Zea Mays
atgtactctcctagttgggttgtccgtcttcaacattcctccataagacagatttcctcgattccttgctatattctattctcgaacagaggtcagtcccgcttcctcctcttttttgagtgagtggctttctctttttagaagtcgaagtctagacctggctaagtctggcacctttcttgtagcagggctacgtcctaatggattgtttcacgctcgaggcacctagaatgtcatctttgtccagagcagaggaatgaggactttctttcactgaaaag

SEQ ID NO: 89685 - DNA, 75 bp, Zea Mays
cctattctttcctcaatcaaaccaacccatctcttctccacaggcactcaatccctatttgagacagcaagactg

SEQ ID NO: 89686 - DNA, 165 bp, Zea Mays
gacggagtctattcactgctattagagccaaaaggattgatccctttatatagaaaaaagatccggttcaccacttccaatcttcttagagtcgattctattagatcggcccttatctgccacaggaaagattgaccagaaacgaggcagccaatagatcacaac

SEQ ID NO: 89687 - DNA, 4907 bp, Zea Mays
ggatcaagctagatcgtattataaaggaacgaggcccatctatatctatatctatagtaggtgggtcccagctctttttttcacgagggtcagtgctaaagctcctaagtagtccactatacaataaaagaatcgaagccagaggaaacaagtgaaggtggatcagcgattcctgctcaggtggttccaaaactataaactattcctctactcgctatgcgaaaaaaacctgataaaataagtatagtctagatcgtactcatgaaactcatataagaacaaggtattgaaattcatctttacagatcggaggaagagtaggttattcagcccgagactcgagatgatcgatcttgaaatgagaagagaaggacccacccaataaataaactattccaatgactttgttcgcttcccctgaggcaacggctgtactcggcacacagacctggcttatgagcaggatttttcagccaagccaagtgcgtatggttgctacctgtattctgataggccacttaatgacactggctcccagttattgacttatgaagaatggcttctcgatggaagagaaacaataataggaaaataggaagctgcaatcagaaccggctaactagacaaaaggagagagattggctcagttcagtaggaggaatttctaccgattattgagtggtttgtttcctttcccctgaaaggtaaaatggtttatttgcacctgtagtgggacacctctcccagctcccagccagggttcaagcaggaaactatgttaaggagctgatccgaatacagatacaaggcccccactcatcacaacgaacggtgagctttcccactagccttcacaggagcagcacaatcatggccaaaaacaaaaaaaaagatatcgtagtacgagaaaaccaatggcatttctctattctaagtctaagtctaagtagtttcttcttttctttttagaggacctggccaactctaattccaatgctgcaatcctattggtttactgaatgagggtgggtagaccgaaacgctgaagtgttgttatttacttccttcgataacatagattgtccactcttatgccccatgcataaaaatggcttgtgctttagaataaaagaatagaaaaaaagtaggtggatcgggatcgctattacgagtattcgagttcttgttttcctttccttggaaagggaattatttcatgagaagtgcaccggtagaaattggactaaatatgatcttgatccatagctcgtccactttcttgataaacgactcgatgcattgcattttctcttccttgccgctgagacatatcaaaaagatctattactaaaaggagattgggatcatcctgtggttaccggatgatgggaataactaagcagaaattaggaaatgagcacgaaatgtctataaatgaattttctcattatttgttatttccgggtcttttcgttgcattcacttacaacaagaaacaaccaccagcgtttggtgcagcacctgcattttggtgcattcttctttctttccttggtctttcgttccgtcatattccaaataacttatctaattacaacgtattaaccgctaatgcaccttttttttatcaaatctcagggacatggtctaatcatgagggtagtattttctcatggtgttggatcccaagtttttatggattccttttttgttaccggtaccggggtcgaccccaaagccataatgtctcaaaacgcagaggctatagagaaacttttattttttcctttgtctcgaacttcgtgaagaactccattctatctctccaacaaaaaagtggagctgcgccccagttgtacactcccttcgttcggagaacccttgttgattctgaacttcgttcgcaaagtaagcgtccttttaacgggccagccctttttaatgcgccgcttgacccagttttgaaaatgagctttgctcttctgggcgctgggcgctcccgtggttcgcgagaaggaaaaaggactaatcttttgttacatctggcacgagatgaaaaagagagagcttcgtctatcgatgaacagcagattgacggagctcttggcattgctttgtttttctctcctttcctatcagcgagttccgatccttttgttcgaaatttcttcgttcgtaccgaaccgcttgcagaatcaaatcctgttccacaagatcctatatcagctatacatcctccttgcatttatgccggagacgtcgccagtgctatgggctttgggttatgtagatcaaaaatgatgaatgggattgtggcactccactcgccgccaatgcggaaggatgccgccgaaaagaatggaacgctgcttcgctctgctggatgcgtcggatcccatataagaagctcgctctttacccgatcattcaaacattttgtgggcggcgcgcctgctctattgttgcgtagcaatagaagcctgcttcggcggcgctttttcgccttctcttcgctctggacaggagcgctaatggacacggggagggagcaggcgaagcgtgttgtcgttcgtaatggaaagaaagacaccactacttcgcctctttgttggaccgccggcgcgaacacagtggtctctgaccaggaccaggaaccaattcgaatttggatcttgacatgttggttgtttttaaccgtaggcatctcgccaggaagttggtgggctcatcatgaattaggtcggggtggctggtggtttcgggatcccgtagaaaatgcgtcttttatgcctcgggtattagccacagctcttattcattcagtaattctaccccttcttcattattggacctcgcttctgaatattttgactcttccatgctgtgtctcaggaaccttttcaatacggtccggattgctagctcccgttcatagttctgctacagacgatacacgaggaagatttttatggcggttcttccttctaattacaggcatatctatgactcttttttaccagatgaagcaggtccgtagaacctataaaaaagagatggttgtggcgcgaagtactcttgtgcacctacgtcacccggctcgcgcgcaaccccgccccgttatgttatggaagaatttagcttcttgctgggctggttattccgagccagcaactggctggctgccggatttcgtcccgtccgtagcgcttcggaagtcactctggcgtggcgctgctggatacttctgatcaataggaataggaggaaaaaaaagcttatgatgagcatctattggagtcgatcatttccaagatctaattcgagtttcttattatgtagtggaaacgccttacaatcttcagttttacgcttacgcttaagggaagaaatgttcttggtggatgcaggccttggtaccccaaaaatttgtatgcaagatgagcttacaggactgccaatcaagcgagccaccaggtttgagaataaggtgggatccaagaatgtagtggctggtgaatcactgatcaaaaagcggatttttgagagattcttcatcgatctagtggccggtgaatcactgatcaaagagcgagcagccgccgggtttaatgattttgtgggatccctggatgtagcggctggcgaaccgcttcttcttccacaaagattcagacaaaaccgagcttggatagaactgacgaagatttggcgaacgaagaaaaaggtaaaagggtttcaaattaataaaatagaaggaggttattcagtagccatcgcaggtttcattacttttcttccattcaaagctaaaaaaataaaaaggatagcgaatgctcgattcgccattgatagctttatccctaaaaggagggatattgtgataaggcagattcaaacaagaacttaatgacaagatagaaaaaattattaataatccgaagcccaccttaatccattttgttgaggatcttgcacttattccggccctatatttacatagccaagaaaggctctggtgatcatgcgtgactgcggagcgcctatcgccctggcacggcactcaaaaatgctgggttgggccagcaagaagacttcgactagggagacgaagaatggaattgaagaaggcagcatagtctaagataacagaatggaacaccaaccaacgagtaagtggtggatttggatggagtctcgcagaagaagagtacgcgcgctagcgcgccccaagacgtcagtcctttttctgcttgctggccaaggtcagtttactgaatcccttccaaacaccaacccaatctccattccttgatgggaaatgagcaagaccatatgtttctaaaaaatatagcccctatataaacctagcccttactacccgaacttctgaccttcaaataggactaactgcccgaacccgcttgcttatcttctacgatctaattaagttaagcagtggttattttttttttaagtgactagaacttctattaactactattctagcacccagctgtgccatgtgtttattctattttgcaggtattcctttgaataactcatcttttcaggtaagaaaattggaagatcttcttagtcatagtcagcctatctgtattcttatcctatagtgcggatccaatcagattttatgaagccaaggcctgacatccattgtggggatttttatcgggagacatggcctggtggtttctgatcgagattcctaatcaatagggcgaagagctcttcgcatgatctggtcctacctttttttttctacgctattttttttccccttctcggctgctgtccttactccggataaattggaacacattgattccgttcgttcctgcccttcgcttcaggccatagtgcttctgaattatttctatacccctttg

SEQ ID NO: 89688 - DNA, 2498 bp, Zea Mays
tactttaaattagtagtcccggtagttggaaaaaagctctgaatacagattcaaaacatcaagataggtagtccgatcattagttggccagtcatagcaatttaagtagaaagctagcttcgggatcagatcattcaactaaagctgtcaggccgggtaggctttgaggaacattgggggttccttatgttgtgactgagcagatatgtctattgtgcccggcaaaaacggatttgcaaggagtttgccaaaggctttctcattcggaaaaacaattcaaagtatatttcccttctccattctctgctcggatgattgccgcttgtgtgaatttcattgctgcgggtcccgcgtgtgctcgaataagattgttttaggattctatttagttgaatttattgactccgcggtgctggttatcgagtttatggcgccgccgaccatccaatccaatccaaaaagtaaaagatggcgtcggcatttacttattatgctctcttctaatataatagtggtcccccaggttggtattcaggttgtaaaatcctgataggaaagagtcgactgttagaccttgtttttgtaatggcctatcttctttaaaaagccgaaagataaggatttctaaaaacttttgcgttccggatgctggtctcatgtttgatctggtagcgattaaagaatgaatcttgctctggcgatcatggtgggattggtacacctctatacgctgtaaaatgaaggtactctttagttcatgctacgaccgccgattgttcctgtgaccacacgccgtaccaacagaaaactatcaacctatcggtatggtttgttgttcacgtgttatgatctcgctcatcagattgttcccccctcccctggtcaatggcggtgagttgattgaccaaggccttcccttacgacgatggaatttcttccatcggcaagactttgtttgtctccttcaactttaatgaaaagcctagtctctcgatactaactaattagttaggagaggtgcttacttttcttttgtagttaaggattcataccccatcccattcctttttcttttcaaagaaaaccttaccatttgagttttgggccgctgttaccatttccatttccggaacctaactaatacttagttgtttccatttcctcatctggtgatagatcctcatcttcttctggctcaaatccctttttcatatccagggcaggctttaggtacgctttagttttaaatcattaaagatatgctcgacctcgtttatgtccatggtaccatcgtacgtaccttctactatcaaccagatgagatagggctttgaaaggtcagagtcagtctcctctttcttttaggtcgtttagcagttccccaaccagctttctccccgagaaagccttcctgagattaaaagaaaaaggtttgaaggtgggatcagtgatagttcggaaccagcaaagggaggctgaaaagccgtagtgctaacgcacgccctgtagttttgaagcaggcttcgacagctgcgagctccgcgtcgaaaagcgaagcgagccgcgctagcgcgctactcttcctttatgagatgagcgagactctatccaaatctactgatctaagaactccgcgagcgaactgagcgagccatgaggcgcctatcggcaaggcttggaaaagccttaagtttaggcttaggctcccttccttcactgaactgattcacccgggtccaaacctgctgagctagctaatttttcctttacgagatctcggctcttcggaatgattggagagagccccgcctcctcttggttggtgccgggcccgggactacttcctgaaagagcctttcgttcgggccggcaggaggggccctgatctatcaattgagggagcaaaaaacaggctttgctcccctttttttaaatgaagaaagaaagaagggtcgaagtttagaccgctcacagtagttctacccatagaaaagatcatgaaagaggcgatcagaatggtacccgaatccatttacgatcccgagtttccagacacatcgcacttccgctcgggtcgaggctgccactcggccctcagacggatcaaagaagagtggggaacctctcgctggtttttggaattcgacatcaggaagtgttttcacaccatcgaccgacatcgattcatctcaatcttgaaggaagagatcgacgattccaagttcttttaccccactcagaaacagttttccgccggacgactcgtaggaggtgagaagggccctgactccgtcccaaacagtgtactactatcggccctattaggcaatatctacctacacaagctcgatcaggagatagggaggatccggcagaagcacgaaattcctcttgtagtgaaaataagatcggttctattaagaataggtcgtcgtattgatgaccaagaaaagtatggaaaagaagcaagcttcaacgctgacgaatctctgaacgcc

SEQ ID NO: 89689 - DNA, 337 bp, Zea Mays
aaactgattctcgtgtggagccgaaagatcaggagtcgtttttgtgaagaaaggtgggatctaaaaaaacctgctccaccctcccttaaaacagctcctcaaccaaccaaatatggacctccccttaaagtttgatcgaaattacccgcaattgtcattggacaaaaacataacgagccaatttatgtattaaacatttgagaccattttatgcactactatgatgggaatattttatatgttattgtttcatattttttctgtatatgcatcctacttattggtttgtaacaaagttgaactgcaaagggtaaaacagacaatcgccacagaccac

SEQ ID NO: 89690 - DNA, 939 bp, Zea Mays
atgtatcgtgggggccttgaccgcttcgagaaggcacaagccttggagcccttctcagtgaagtccaagacaggcaccaagaaggcacctgcagctgcaggaacaactaaagcactggctctattgacgctgccacaaaattctaattttttgccgggacctcaacaaccatccataagagaaactccaagaaagaagatacaattgtctacagaaacaataaacattttttcttctcggatgctcaatctggacaattgctgtctagaaggacaacaaatgcataatgtgcctgacgctacacaacaacgaggggaactacctgggaagcggcgccagaccaacctcgccaagcgcgctgcctacgaggccaaggacgcgcccgcacaactgctgcccaacaagattgagactgaaaagctgctagcccagttagttgagactgagatgaacatacatttgaaggaggacacttacaaaggaaagaagtttaatgcaatatgtcacttcttgggctaccaagctaggggagcactgccttcaaagtttgattgcgattatgcctacgcaagtccctcaccagctcatttagtaaagaatattgattgttgttggtttaacacgtgggttgttggtctcagatacatggctacagtgacaaatcttaagaatccagtgaacaagtggcgatgtggtgcaactcctatttcgtattactactttattcgcttgatgggacgcaaggcttctcatgtggcattggaatgtgctcttcaatcacatccaaacatggtgaaatggattacagaggttcatagggaggctgttggaacaacatctctgagggatggacggttcgaggatcctgtgtctgcggcagaagaggccacgttctgcaatgttgcactgaacataaccatctggctaatttgtggatag

SEQ ID NO: 89691 - DNA, 1989 bp, Zea Mays
gcttcaaacaccggcacctcggatcccacgcgacgcgagccagccagccagcctccgcagctccaccctgaccgcaaccgtctcccacgccgtgcccgtgccacctagctcgctcgctcgtccttgcccctgggccacgcacgtctgccgtgcggcatgaagcggcacaacgcgggcgagttgccgctgtcgtcgccgccgggtgacggcaggcggctgctgccgaaggaggaggcggaggacaagatggacaagtacgacaaggggcgggtgcgctgctccaggctctgcttcctcttcgcgctcgccgccacggtatccatcctcgcgcgccactgctacgacgccggcctggccggcggcgatggtgccggcgtggtgcgcatcgagaccgtgcctccgtcggtgcgtcgagagcggaagatcgttccgatcgctcgcggcagcgggccgtcggagtccgggcactcccactcggctcctgtggacgccagcggtgccggtgacgcggcggattcttccagtggagccaaaacatcgtccaagcagggctcgccctcgggagctcatgctcatgctcacaccgagcagcgcgccggccaccccttcgcccgcgcgctggccgcggccgacgacaaggccgacctctgcgggggccagtacatctacgtacacgacctgccggcccgcttcaacaaggacatggtccagaattgcgacaagctgtctccgtggacggacatgtgcaggtacaccaccaacggcggcttcggcccgctgctccccggcggcaagggcgcgttccagggcaccatcgccggctggtacgacaccgacgagcacgcgctggacatcgtcttccacgagcggatcaagcggtacgagtgcctcaccgacgacccttccctcgcggccgccgtcttcgtcccgttctacgccggcctcgacgtcgcgcggcacctctggggcaacaacgcctccgcgagggacgagctggcgctggacctggcgggactgctcgccaagagccccgagtggcgcgccatgggcggccgcgaccacttcttcgtggccggccgcgccacgtgggacttccggcggaaggacgacgcccatgctgagtgggggagcaggctgctgaaccttcccgccgccaagaacatgaccgcgctcgtcgtggaggccagcccgtggcacctcaacgacgtggccattccctacccgacctcgttccacccggcgagcgatgaggacctcttcttctggcaggaccgggtgcgcgcgttggaccgctcgtacctcttctccttcgccggcgtgccgcgccccggcgacgccaagtccatcgagggccacctcgtcgaccagtgcagggcgtcggactcctgctcgctcatggagtgcagcaccacgggtccagacaacaggtgcgagtccacggccagcgtcatgaagctcttccagagctccacgttctgcctcctgccgcgaggcggcaccgacacgcgccgctccgccttcgacgccatgctagccgggtgcatcccggtgttcttccacccgggctcggcgtacgtgcagtacacctggcacctgcccaaggcccacgccgactactcggtgtacatccccgaggatgacgtgcgcaagaagaacgagagcgtggaggagaggctccggaaaataccgccggagacggtccgggaaatgagggacgccgtggtcgacctcatcccgtcggtgacctacggcgacgcgacgtccaggctcgagacgacggtgaaggatgcgttcgacatcgcggtggccgccgtcatcagcaaggtgacgaagctgaggagaggaatcgtcgagggtcgagcggaggcggagaagctggagaagtatagctggaagtacccgttgttggcagaagggcagaaggcagaggaccatcatgaatgggatcccctcttcaattagcgcctcattgtttgcaccgtgaatttt

SEQ ID NO: 89692 - DNA, 1940 bp, Zea Mays
cggccaatgaagccaatgaagccgagcttccagaaagacggcgccgacaaggttgatggcggcacaggtggcgtactctggccgtcgcggatctgctacctcgtcgttctcgccaccactttgtgggccgtggcgtccatcttgttcccgccgtcggcgttcccccaccccctggtgtccagcgtcaccgtcagccaccaccctgctccgcacgattcggcgtcggaggacaaccggaccgcgaccgagaccgccgaccgttgcgcggggcggtacatctacgtgtaccgcctgccgccgcgcttcaacgacgacatcgcccgcggctgccgcacgctccgcccgtggatggacatgtgcccgtacatgcccaactgcggcctgggccgcctgctgggcgacgagggcggcgtcttcccgggccgcggctggtacgccaccgaccagttcatgctcgacgtcatcttccgctgccggatgaggcgctacgagtgcctcaccggcgaccccgcccgcgccgcggccgtcttcgtgccggcctacgccagcctggacggcgggcggtacctctggaacagcaccgcgacgcgggacgcgctggcgctcgacctcgtcgcgtggctggcgcggcgcccggagtggcgcgccacgggcggccgcgaccacttcctggtggccggccggaccgcctgggacttcctcaggaagaccgacggcgacgacgactggggcaccaaactgctcagcatcccggccgtccggaacatgacggcgctcgtcctggagatcgacccgtggacccggtccaacaacctcgccgtgccttacccgacgaacttccacccggccacggccgccgacctgcgcgcctggcaggagaaggcgcgcgcgctggaccgcaggtggctcttctcgttcgcgggggcggcgcggcccgggagcaacaagaccgtccgcgcgcagattttccagcagtgcggcgcgtcgagtcgctgcgggatgttccggtgcaaaaaggggtccgaatgcgaggcctccccgggcgccatgatgcgcctcttcgagagctccaccttctgcctccagccgcgcggcgacacgacgacgcggcggtccacgttcgacgccgtcgtcgccgggtgcatccctgtgttcttccaccccgactcggcgtacacgcagtacgcggaccacatcccggcggatcccgagaggtggtcggtgctcatcatgcacaccgacgtgacggaccggaacgtgagcatcgaggaggcgctcgccaagatcccgccggcggccgtgaaggcgatgcgcgaagaggtgatccggctcatcccgagattggtgtacgcggacgcgagatcggcgcgtgcggacttcaaggacgcttttgacattgcgctggacgtcgtccttgaccgggtggccaagcggcggcgacgggatgtggacggacgctgatggaccggtggccggccggataggaggagtggcctcggcgtctggcctctgccaccgtcacgtgaaccaccctccatcgtgacagtgcgcgctcgtacctaggagtagcatttgaatgggatcctgggaaacttcgacgcctgtctcttcatcagtttaggatcttgtacacggtgcacaccagcacgtgtataggcacggtgcactccagcacggaacagccctgcggatttttttacatcgatctgcttttgtttttttttgaaagaacaggatgggggcctactgaaaattttatttaaatcaataaaaaaagaaaacaaagtttagaaaaaagaagaagacaggttataggaggttagagagagattctactgctaatgctattctattgtcattgctgaagccatgctgggatggctgaatcgaatctatcccgagctctgtgaatgaccaggagcagctcatttgtaaactca

SEQ ID NO: 89693 - DNA, 282 bp, Zea Mays
atgaagcgggatgcctcgcacgacgcgtatggacaccgaggaaagcgacgacacgacaccgcgcaacgtgctgatgaggaacttgagcagggaggaggtctggaccttgaagacgactgggagggatgtgtgcagggagcggaggcagaggtcgacacaacacttggagttggcttgaagtctatcaccacttcatcctcctccacctctaggagaatcactccctcctcctgcaagaatcacccgctccgcctcatatctataaataatttaaggaaatga

SEQ ID NO: 89694 - DNA, 1536 bp, Zea Mays
aaatcattgaatagaaaaccaagagggcagaggttcacttacagctctgatgtagggggagtcctggtgcttgagcaggttgtgcatctgtttgacggtgagcttcatggtgaataacttgtagaggaggcagaaggcggaggagggcccacggcagttgccggtcatccagggctcgacgtggtccacctggttgtagatctcgtcgacgacctcgtggtaggtcttgtacttgaagagctccttgaagtagtccgaggagaggatgttcacggacagcaccttctccatcagcccctcgatggagcggccagacgactggatctcgatggaacacgagctatgctaggggcgcccggggagacgtcatcgcggcggcccggaggaatcactttggattgggagggttttggtcgggggcggctgcgcgcatggcggcgggggcgggagcgaggcaatcagacggttgggatggaggcgggggttgatccggcaatcggacggtcgggatggaggcgggagcatggttgtgcttagtctacactattgccttaaggattagtagagatcaagagaggaaaatggcacagtttccttacataaaaaatcaattaagacaatttaatttggttggcccgatcctttttggattggtcatctctgtcaagcacggcctaagtcctaaacagacacgggccggacttagccgtcgacctcaggctggaccggcccacgttcgctccggtccactcagaacggaaaccagcaaacgacatctctccccggcggcccggtcccttcatctctcgccgctgtcgtcgccgccgcgccgtatctgcagcttcccgcaccgtatcctgcggaagaagtttctaacgggctacatcccaccaccgcacgatgtcggcagcggcgcgagtgctgccgaaggcggtgaccttcgtgacgggcaacgccaagaagctggaggaggtccgcgccatcctcgggtcttccgtcccattccagtcgctcaagctcgacctgcctgaactgcaaggggagccagagtacatatccaaagagaaagcacgaatcgctgcatctcaggtgaatgggcctgtactggtggaggacacctgcctatgttttaatgcgctcaaaggcctaccaggaccctacataaagtggtttcttgagaagattgggcatgaaggttatagagccaactgattctcgactcttgtgctcctggttattttatgttttgactaaataacctcatgcaccttttgtttataggtttaaataatctgttaaaagcttatgaagataaatcagcgtttgctatgtgcatcttctctcttgctcttggacctggagaggaaccaatcacatttgttggcaaaactgcggtaagatgccattttctgtttgtggagttctgaagtccgatgcagctgtggatgaactgatttactaaaatcctcgctacagtgctgctgttagcaaactgtatcttgggagtatcttttactaacttcatttcgttttagt

SEQ ID NO: 89695 - DNA, 1759 bp, Zea Mays
aaatcattgaatagaaaaccaagagggcagaggttcacttacagctctgatgtagggggagtcctggtgcttgagcaggttgtgcatctgtttgacggtgagcttcatggtgaataacttgtagaggaggcagaaggcggaggagggcccacggcagttgccggtcatccagggctcgacgtggtccacctggttgtagatctcgtcgacgacctcgtggtaggtcttgtacttgaagagctccttgaagtagtccgaggagaggatgttcacggacagcaccttctccatcagcccctcgatggagcggccagacgactggatctcgatggaacacgagctatgctaggggcgcccggggagacgtcatcgcggcggcccggaggaatcactttggattgggagggttttggtcgggggcggctgcgcgcatggcggcgggggcgggagcgaggcaatcagacggttgggatggaggcgggggttgatccggcaatcggacggtcgggatggaggcgggagcatggttgtgcttagtctacactattgccttaaggattagtagagatcaagagaggaaaatggcacagtttccttacataaaaaatcaattaagacaatttaatttggttggcccgatcctttttggattggtcatctctgtcaagcacggcctaagtcctaaacagacacgggccggacttagccgtcgacctcaggctggaccggcccacgttcgctccggtccactcagaacggaaaccagcaaacgacatctctccccggcggcccggtcccttcatctctcgccgctgtcgtcgccgccgcgccgtatctgcagcttcccgcaccgtatcctgcggaagaagtttctaacgggctacatcccaccaccgcacgatgtcggcagcggcgcgagtgctgccgaaggcggtgaccttcgtgacgggcaacgccaagaagctggaggaggtccgcgccatcctcgggtcttccgtcccattccagtcgctcaagctcgacctgcctgaactgcaaggggagccagagtacatatccaaagagaaagcacgaatcgctgcatctcaggtgaatgggcctgtactggtggaggacacctgcctatgttttaatgcgctcaaaggcctaccaggaccctacataaagtggtttcttgagaagattgggcatgaaggtttaaataatctgttaaaagcttatgaagataaatcagcgtttgctatgtgcatcttctctcttgctcttggacctggagaggaaccaatcacatttgttggcaaaactgcgggaaagatcgtgcctgctagaggccctaattattttgggtgggatcctgtgttccagccagatggttttgaacaaacatatgctgagatgcccaagtcagtgaagaacaacatatctcacagagggaaagctcttgctctggtgaaagaacacttcgcatctgctagctatacagttcagagcaacgactcaacttaaagtttgacttggattcctagacgaatgaactgtcattctggaatgtaaactgaactactacttttagtccggtgcctattatacttgcgagttgcgacatttcttcactggatcaacactagaatcacaaacaggataaatagattacacagcacccttcaccaggtatcaatgccgataagccaaacgcacacaaaattttcacacggagagatactacacactatctgcatttgactagatgcagaaacac

SEQ ID NO: 89696 - DNA, 2095 bp, Zea Mays
aaatcattgaatagaaaaccaagagggcagaggttcacttacagctctgatgtagggggagtcctggtgcttgagcaggttgtgcatctgtttgacggtgagcttcatggtgaataacttgtagaggaggcagaaggcggaggagggcccacggcagttgccggtcatccagggctcgacgtggtccacctggttgtagatctcgtcgacgacctcgtggtaggtcttgtacttgaagagctccttgaagtagtccgaggagaggatgttcacggacagcaccttctccatcagcccctcgatggagcggccagacgactggatctcgatggaacacgagctatgctaggggcgcccggggagacgtcatcgcggcggcccggaggaatcactttggattgggagggttttggtcgggggcggctgcgcgcatggcggcgggggcgggagcgaggcaatcagacggttgggatggaggcgggggttgatccggcaatcggacggtcgggatggaggcgggagcatggttgtgcttagtctacactattgccttaaggattagtagagatcaagagaggaaaatggcacagtttccttacataaaaaatcaattaagacaatttaatttggttggcccgatcctttttggattggtcatctctgtcaagcacggcctaagtcctaaacagacacgggccggacttagccgtcgacctcaggctggaccggcccacgttcgctccggtccactcagaacggaaaccagcaaacgacatctctccccggcggcccggtcccttcatctctcgccgctgtcgtcgccgccgcgccgtatctgcagcttcccgcaccgtatcctgcggaagaagtttctaacgggctacatcccaccaccgcacgatgtcggcagcggcgcgagtgctgccgaaggcggtgaccttcgtgacgggcaacgccaagaagctggaggaggtccgcgccatcctcgggtcttccgtcccattccagtcgctcaagctcgacctgcctgaactgcaaggggagccagagtacatatccaaagagaaagcacgaatcgctgcatctcaggtgaatgggcctgtactggtggaggacacctgcctatgttttaatgcgctcaaaggcctaccaggaccctacataaagtggtttcttgagaagattgggcatgaaggttatagagccaactgattctcgactcttgtgctcctggttattttatgttttgactaaataacctcatgcaccttttgtttataggtttaaataatctgttaaaagcttatgaagataaatcagcgtttgctatgtgcatcttctctcttgctcttggacctggagaggaaccaatcacatttgttggcaaaactgcgggaaagatcgtgcctgctagaggccctaattattttgggtgggatcctgtgttccagccagatggttttgaacaaacatatgctgagatgcccaagtcagtgaagaacaacatatctcacagagggaaagctcttgctctggtgaaagaacacttcgcatctgctagctatacagttcagagcaacgactcaacttaaagtttgacttggattcctagacgaatgaactgtcattctggaatgtaaactgaactactacttttagtccggtgcctattatacttgcgagttgcgacatttcttcactggatcaacactagaatcacaaacaggataaatagattacacagcacccttcaccaggtatcaatgccgataagccaaacgcacacaaaattttcacacggagagatactacacactatctgcatttgactagatgcagaaacacaccaaagaatcgttggctaaaaacctgacaacctctagggcctcctgagtttaacatggagaggcatctccttgtaggtggtgactcgttccctggcctgccgcatcggccttccaagagatgatctgcgcaagaacgggtgcccaggcttctcgctgccggaagcactctctggatcgatcttgcagctgccgattgcgagctggacgtcctctatctcgaacaagtcctccgtgcggctgctcaactc

SEQ ID NO: 89697 - DNA, 2019 bp, Zea Mays
ctctcccttcggcccttcccttcacgtcaaggaagcaatctcccccagttcgttcaccccctttccccattcacactcgctcccatatccactgcccccattgccattgctgcccccaaccccaagctccagatctcggtcccaagacctggaatggctgaatccatgcccccaccactatcctcactccgctcgcactcccctgcattgctataaatcccactgcatcttggctctggcccatctaatccgccaaggaaccatggcccgagctcccaaatccgccggcattgccctctccctcctgctgctggcagccgccgccaaagcctcggcctttcctctcctcaactcctcgctccccgaccccgctgccgtcgtcgccgacttgcacagcaaggtggcaacgtcgcggcggcggatgcaggagtccggcggcggcggcggcggcggcggcggcgggtgcttgacgggcaacccaatcgacgactgctggcggtgcgcggggacggactggcggcaggaccggcagcggctggcggactgcggcatcgggttcgggcgcaacgcgctgggcggcaagggcgggccggtgtacgtggtgacggacccgtcggaccgcgaccccgtgaacccgtcccctggcacgctccggcacgccgccatccaggagggcccgctgtggatcgtgttcgcgtcggacatggccatccggctgaacgaggagctgctggtgaacagctacaagacgatcgacgggcgcggcgcgcgcgtgcacgtgggcggcggcggcgcgtgcatcacgctgcagtacgtgtcgaacgtgatcatccacaacgtgcacgtgcacgactgcgtgccggcggggaacgccgacgtgcggtcgtcgccgacgcactacgggtggcgcacgcggtcggacggcgacggcatctcgctgttcggcgcgcgggacgtgtgggtggaccactgcgcgctgtggcggtgcgcggacgggctggtggacgccatcatggggtccaccgccatcaccgtgtccaacagctacttcgcgcaccacgacgaggtgatgctgctgggcgccagcgacgcgtacctgcccgactccgggatgcaggtcaccatcgccttcaaccggttcggcccggggctggtgcagcggatgccccgctgccgacgcggctacttccacatcgtcaacaacgactacacgtcgtgggagatgtacgccatcggcggcagcgccggccccaccatcaacagccagggcaaccgctacatcgcgccggccgaccccaacgccaaggaggtgacgaagcgggtggagacggcggaggggcagtgggccgggtggaactggcggacggagggcgacatgatggtgaacggcgccttcttcgtgccttccggcgaggggatggaggacatctacggcaaggcctccagcaccgaccccaagtcgtccgcgctcgtcgacgtgctcacgcagaacgccggcgtcctcggcgaccccaggtacggaacacgtcagccgcggacgggtggacccccgcgcgtctttctatatacgcggcgcttttgttaacttcctccaacggccatccccagttgctagtgctccgccgcgcgcccatcatcggtccttggttctgctatctctgctctgggcgggaatttgccgttccggcttcccctcctcttgtggctttccctgatccattaccagtcctgacgagacgagacgagacgagccggtccagtggaacacaatacaaaggtggtgccgcggcagacctggcagacgattaaactcactactaggaatgtacactgtaccacgttagaaccccctacccacccacccagttcattagtaataatctctatataggcggtgcattactagttctgccgtggcagcaccggatcaaggcatgtttggattgctacctaatttactatactttgcctgattcgaggaatgtctgattcgaggaatgtctgcttgagtttggatgc

SEQ ID NO: 89698 - DNA, 2039 bp, Zea Mays
ctctcccttcggcccttcccttcacgtcaaggaagcaatctcccccagttcgttcaccccctttccccattcacactcgctcccatatccactgcccccattgccattgctgcccccaaccccaagctccagatctcggtcccaagacctggaatggctgaatccatgcccccaccactatcctcactccgctcgcactcccctgcattgctataaatcccactgcatcttggctctggcccatctaatccgccaaggaaccatggcccgagctcccaaatccgccggcattgccctctccctcctgctgctggcagccgccgccaaagcctcggcctttcctctcctcaactcctcgctccccgaccccgctgccgtcgtcgccgacttgcacagcaaggtggcaacgtcgcggcggcggatgcaggagtccggcggcggcggcggcggcggcggcggcgggtgcttgacgggcaacccaatcgacgactgctggcggtgcgcggggacggactggcggcaggaccggcagcggctggcggactgcggcatcgggttcgggcgcaacgcgctgggcggcaagggcgggccggtgtacgtggtgacggacccgtcggaccgcgaccccgtgaacccgtcccctggcacgctccggcacgccgccatccaggagggcccgctgtggatcgtgttcgcgtcggacatggccatccggctgaacgaggagctgctggtgaacagctacaagacgatcgacgggcgcggcgcgcgcgtgcacgtgggcggcggcggcgcgtgcatcacgctgcagtacgtgtcgaacgtgatcatccacaacgtgcacgtgcacgactgcgtgccggcggggaacgccgacgtgcggtcgtcgccgacgcactacgggtggcgcacgcggtcggacggcgacggcatctcgctgttcggcgcgcgggacgtgtgggtggaccactgcgcgctgtggcggtgcgcggacgggctggtggacgccatcatggggtccaccgccatcaccgtgtccaacagctacttcgcgcaccacgacgaggtgatgctgctgggcgccagcgacgcgtacctgcccgactccgggatgcaggtcaccatcgccttcaaccggttcggcccggggctggtgcagcggatgccccgctgccgacgcggctacttccacatcgtcaacaacgactacacgtcgtgggagatgtacgccatcggcggcagcgccggccccaccatcaacagccagggcaaccgctacatcgcgccggccgaccccaacgccaaggaggtgacgaagcgggtggagacggcggaggggcagtgggccgggtggaactggcggacggagggcgacatgatggtgaacggcgccttcttcgtgccttccggcgaggggatggaggacatctacggcaaggcctccagcaccgaccccaagtcgtccgcgctcgtcgacgtgctcacgcagaacgccggcgtcctcggcgaccccaggaacgacgccgaagaaaccgggtacaggggcgtcaactacgccggcgggagaactggcggcggcggcggctacggatacggctacctcgggatggtctacgccggcggcggcgaccagagatggagatcgcactcggcgctgtcactggtttcttcagctatcaccgtcgttgcgctcggatgcttgcatttgttgtaacatgtagacgtgtgattctcagttggaaaagttagcaagatggtggggaagattgtagctggggtagcagtaggaggagcgggggtaggcaggcaacagaaaccctgtgtgaagttgcacatgggtattgggtgggaggatattgccaagccagtcactgtacttcttacaaggagaaatggacgactcattctaactttagaacctctgggctctggtctctctgtgatctccatgtcattataattctgggaacagaaaatgtaatgggaaagcaactttagccaacaaaaaagtgacacagaagtagcgccgtgcttgaatc

SEQ ID NO: 89699 - DNA, 1399 bp, Zea Mays
tattaaaaaataattgttatgaaacaacgtaataaaaatggtatatcaaataagcactgcatggattattgtagatgctgcaatactgaaaggataaatacttctcattagtagaggagcggaaaataacaggaatataaaagaatttaatgatacaaattggatcaagcttgttagctagtaaagatctgacattggatcagtggaacagagtggccatgagagacgacggcagcaaccaagaaacactgctaagttattccaagttggcgatccacaagctgctgctactgaaaagaaagcattttgcgcttttgcttctgattgggctcaccggttcattcggtgccgtcagctccagcgaggtcgtaacaacattcgtctgtgtcttcatcctggccgttctagttccattctgcttcctgctccaagtggccagattcgagacttgtttccttggacataataaaggagcgagaggcgaggacgatgcaagcagacgggtcaaatgcagtccgccgcgtgagtcatcgacctggttcgccgcgtctgcagcggtgcatcatatgacgggcaaccagagcctgcttctgaccggcggccacggcaatggcaacaacggtgagggcgccgtcgtccaccaggtggtcaatggaagagagctgccgctgcgagtccgcggaagcgggtcggtgcgcacggagcgcatcgtcctcgacgacgtgtggtacgtccctggtctggatttgaacctggtgtccaccggccagctcgtcaggcagggttgcgccgtcaccctcggccccggccccggcggctgccgcatcaccagggcaggcgccctggtcgggtccgcgcgtttcaccgaggcgagcaacttccagctggacttcctcaacctcgctgatccctaatagcgctgcttcagtttgtttcaacgaatacgagtcagtcgaagccgcagaagcctcggacgccagcgcactgcgctcgctagcgctcgccgtggacacgaccggctagctccacctgagatggtacctatggccacccttatgtcccgccgccttctcggccaccttgagggccaccagcgacttgacccacttgctcgaccacggcggtggagacggaggggatctggcgagcatgtgtgtgcgttgggggggagacttgattccgagcggcgatgaggccgactccgtcgagcggcggcggcgcagggacgaggagcagtggattcgtgcaggggagttgccctatcgctcgcgaggtgcagtggatcgatcggatatgggggagcggacgcagacgcgaatggctcaaagatcgatcggatatgggggagcggacgcagacgcgaatggctcaaagaattgaagaaatatctcgggtccgt

SEQ ID NO: 89700 - DNA, 844 bp, Zea Mays
cgtgtgcgcagccaactctacctatccccgcccccgggatgggcgatggcaactatcctatcgcaacaatatcctggggtgggggctataaaacggagcggcccgcgtggggcgcgcctccatcagccgcagtcgcgtcgcgtcgcgtcgcgtccagtccaatcctcggagcctcacacgggcggacgagcgggagcttctcccaatctcccctgccctgccctgccctgccgccgcgcttagcttcgcatcttcccctcctcctcctcctccttcctcggccaagcgaggagcgaggcgcgggcgcgagcgcgtcgttgagatggattcggaggcggtgcagcacggctgcgcgcattacagccgtgggtgcagcgtcgtggcgccctgctgcggccaggccttcggctgccgccattgccacaacgacgccaagaactcgctggaggtcgacccgcgcgaccggcacgagatcccccgccacgaaataaagaaggtcagcgttccctccctctgctcaaagagcaatctcctgcctgtttcaaccattgcctatctcgtgttcgtctttgttattaccgtgagcaaagaaaggaagaaacaaacaagagcgccgccttctctcttctccttctccatgtaatggagcatttgttccgccgcgtagtcgagtgcaagcagcggttttcctcttttggaaacccacccccacgcacggttccgttccaatctcgcccttccaattgaccaacacaaacctttcctaagatttcttgtcctccttacccttctacagacaagtacgaaacgcaatcgcacaaggttatactactactagctttta

SEQ ID NO: 89701 - DNA, 1569 bp, Zea Mays
cgtgtgcgcagccaactctacctatccccgcccccgggatgggcgatggcaactatcctatcgcaacaatatcctggggtgggggctataaaacggagcggcccgcgtggggcgcgcctccatcagccgcagtcgcgtcgcgtcgcgtcgcgtccagtccaatcctcggagcctcacacgggcggacgagcgggagcttctcccaatctcccctgccctgccctgccctgccgccgcgcttagcttcgcatcttcccctcctcctcctcctccttcctcggccaagcgaggagcgaggcgcgggcgcgagcgcgtcgttgagatggattcggaggcggtgcagcacggctgcgcgcattacagccgtgggtgcagcgtcgtggcgccctgctgcggccaggccttcggctgccgccattgccacaacgacgccaaggttcggtggtttccctccttccgttttcgcttcggctccggttcagcagatgttctgaaacaaccctgtcccgtgccccggcagaactcgctggaggtcgacccgcgcgaccggcacgagatcccccgccacgaaataaagaaggtgatctgttctctctgctccaaggaacaggacgtgcaacagaactgctccagctgtggggcctgcatgggcaagtacttctgtaaagtatgcaagttcttcgatgatgatgtctcaaagggccagtaccactgtgacggatgtggaatatgtagaaccggcggcgtggagaactttttccactgtgataaatgtgggtgttgctacagcaatgtcttgaaggattcccaccactgcgtcgaaagagcaatgcatcacaactgccccgtctgctttgagtatctgttcgactccacgaaggacatcagcgtgctgcaatgtgggcataccatccatttggagtgcatgaacgagatgagagcacaccatcacttctcatgcccagtgtgctcgaggtccgcctgcgacatgtcggccacatggcggaagctcgacgaggaggtcgcggccacgccgatgcctgacatctaccagaagcacatggtgtggatcctgtgcaacgactgcagcgcgacctcgagcgtgcggttccacgtgctggggcacaagtgccccgcgtgcagctcgtacaacacccgggagacgagggctgcgtgccccaggatctgaggcgaaccagaggccatgtcacaaaatgccagggagatgccgtccaacgatcatctgtctgcaggacgttgctgcgcttaaggttaaaggctagcgcgagaccaggcctggtagtccagtcttgagtttggtgctggagcatttgtaatgttccggtaaaatgtaatgcgtccatgagtgctgtccaggcagtaagcacacctgtggatcggggccggcgcaaggtccctaggcaagctgcaggattagtggggctattcatgtttagggcgcgaatgcaacgaaattacccgtgggccgtgggctcggtatgtaacagaaccgattatttctattacaataataacatgcagttctattgggccgagcctaatcaggca

SEQ ID NO: 89702 - DNA, 1524 bp, Zea Mays
cgtgtgcgcagccaactctacctatccccgcccccgggatgggcgatggcaactatcctatcgcaacaatatcctggggtgggggctataaaacggagcggcccgcgtggggcgcgcctccatcagccgcagtcgcgtcgcgtcgcgtcgcgtccagtccaatcctcggagcctcacacgggcggacgagcgggagcttctcccaatctcccctgccctgccctgccctgccgccgcgcttagcttcgcatcttcccctcctcctcctcctccttcctcggccaagcgaggagcgaggcgcgggcgcgagcgcgtcgttgagatggattcggaggcggtgcagcacggccttctccctctgtctgcctgtcctcctaccgccaacagctgcgcgcattacagccgtgggtgcagcgtcgtggcgccctgctgcggccaggccttcggctgccgccattgccacaacgacgccaagaactcgctggaggtcgacccgcgcgaccggcacgagatcccccgccacgaaataaagaaggtgatctgttctctctgctccaaggaacaggacgtgcaacagaactgctccagctgtggggcctgcatgggcaagtacttctgtaaagtatgcaagttcttcgatgatgatgtctcaaagggccagtaccactgtgacggatgtggaatatgtagaaccggcggcgtggagaactttttccactgtgataaatgtgggtgttgctacagcaatgtcttgaaggattcccaccactgcgtcgaaagagcaatgcatcacaactgccccgtctgctttgagtatctgttcgactccacgaaggacatcagcgtgctgcaatgtgggcataccatccatttggagtgcatgaacgagatgagagcacaccatcacttctcatgcccagtgtgctcgaggtccgcctgcgacatgtcggccacatggcggaagctcgacgaggaggtcgcggccacgccgatgcctgacatctaccagaagcacatggtgtggatcctgtgcaacgactgcagcgcgacctcgagcgtgcggttccacgtgctggggcacaagtgccccgcgtgcagctcgtacaacacccgggagacgagggctgcgtgccccaggatctgaggcgaaccagaggccatgtcacaaaatgccagggagatgccgtccaacgatcatctgtctgcaggacgttgctgcgcttaaggttaaaggctagcgcgagaccaggcctggtagtccagtcttgagtttggtgctggagcatttgtaatgttccggtaaaatgtaatgcgtccatgagtgctgtccaggcagtaagcacacctgtggatcggggccggcgcaaggtccctaggcaagctgcaggattagtggggctattcatgtttagggcgcgaatgcaacgaaattacccgtgggccgtgggctcggtatgtaacagaaccgattatttctattacaataataacatgcagttctattgggccgagcctaatcaggca

SEQ ID NO: 89703 - DNA, 1619 bp, Zea Mays
cgtgtgcgcagccaactctacctatccccgcccccgggatgggcgatggcaactatcctatcgcaacaatatcctggggtgggggctataaaacggagcggcccgcgtggggcgcgcctccatcagccgcagtcgcgtcgcgtcgcgtcgcgtccagtccaatcctcggagcctcacacgggcggacgagcgggagcttctcccaatctcccctgccctgccctgccctgccgccgcgcttagcttcgcatcttcccctcctcctcctcctccttcctcggccaagcgaggagcgaggcgcgggcgcgagcgcgtcgttgagatggattcggaggcggtgcagcacggctgcgcgcattacagccgtgggtgcagcgtcgtggcgccctgctgcggccaggccttcggctgccgccattgccacaacgacgccaagaactcgctggaggtcgacccgcgcgaccggcacgagatcccccgccacgaaataaagaaggtgatctgttctctctgctccaaggaacaggacgtgcaacagaactgctccagctgtggggcctgcatgggcaagtacttctgtaaagtatgcaagttcttcgatgatgatgtctcaaagggccagtaccactgtgacggatgtggaatatgtagaaccggcggcgtggagaactttttccactgtgataaatgtgggtgttgctacagcaatgtcttgaaggattcccaccactgcgtcgaaagagcaatgcatcacaactgccccgtctgctttgagtatctgttcgactccacgaaggacatcagcgtgctgcaatgtgggcataccatccatttggagtgcatgaacgagatgagagcacaccatcacttctcatgcccagtgtgctcgaggtccgcctgcgacatgtcggccacatggcggaagctcgacgaggaggtcgcggccacgccgatgcctgacatctaccagaagcacatggtgtggatcctgtgcaacgactgcagcgcgacctcgagcgtgcggttccacgtgctggggcacaagtgccccgcgtgcagctcgtacaacacccgggagacgagggctgcgtgccccaggatctgaggcgaaccagaggccatgtcacaaaatgccagggagatgccgtccaacgatcatctgtctgcaggacgttgctgcgcttaaggttaaaggctagcgcgagaccaggcctggtagtccagtcttgagtttggtgctggagcatttgtaatgttccggtaaaatgtaatgcgtccatgagtgctgtccaggcagtaagcacacctgtggatcggggccggcgcaaggtccctaggcaagctgcaggattagtggggctattcatgtttagggcgcgaatgcaacgaaattacccgtgggccgtgggctcggtatgtaacagaaccgattatttctattacaataataacatgcagttctattgggccgagcctaatcaggcaccacgaatgtgaataattgcacatggcgcatatatggcgggcagtagatacatataaaatggagaaaatccgtttattgccatcaaaacttatactgatcactacaataccatctaaaatgatgtgctcccttc

SEQ ID NO: 89704 - DNA, 1209 bp, Zea Mays
gccttgccaactcggctcgtccttctcgctccgtccgcaccgcaccaaccttgagcggccgagcgcgccggcttcactgaacgcccgctggccgctgccatataaagtagctggaccagccgtcgtcacccacgtctgtctccctctccctccgctcgctctctccctccctcggtcaaagccagcacgacaacgcagcagtctgggtagctgtccccctcgccctcatccctcctcggcgccgctgccggcccgcctcccccctcgtgccgctctgccgcggcgcattccgcgcccgcctcgccaccgaatcgggcggaatctcagcgggaccaaaatggggtcgccgggtgcggggagcagcggcggccacgagtgctccttcaagatcctgctcatcggggactcgggcgtcggcaagagcagcctcctcgtcagcttcgtcgccgcctcccacctcgacggcgacatcgcccccaccatcggtgtggattttaaaatcaagttccttacagttggtggaaagaaactaaagttgacaatatgggataccgctggccaggagaggtttaggacaataactagttcttactacagaggtgctcagggaattattttagtatatgatgtcacaaagagagagagtttctcaaatttggctgatgtttggactaaggaaatagaagcaaactcaacaaacaaagactgcataaaaatgcttgttggaaacaaagttgacaaggatgatgaaagaatggtcacagaagaagaaggtcttgcttttgctgaagaatctggttgtctgtttcttgagagcagtgcaaaaacacgagaaaatgttgagaaatgttttgaagaacttgcattgaagatccttgaggtccctagtctcctggaggaagggtcttcttcggttgtcaagaggaacatcctgaaacagaagcaggaaagtcatgcaaagaacggcagtggatgctgtcaatagatgtgctgatccacgcgacaaggttggctgttttcgtgtgagctgccctgacgttctgctgtacatgagttgtatctacatggtcttgtgagtaaaacagggttaaagaatcagcttgtttggcggggagggggagtgagcataattgatttgtacaaaggacatggcagtttggtgtcattgattttctctctctctcttatcatctccggtttagcgaagca

SEQ ID NO: 89705 - DNA, 858 bp, Zea Mays
attccgagtctactattgtacctctccgtgggggcgatccgccatttgtgccaattctagcatcagcgtccgatcgaccaggagtgtgaagtaggtgtgggagatcaagggcacgagcgacccggccaagtttagtgtggattttaaaatcaagttccttacagttggtggaaagaaactaaagttgacaatatgggataccgctggccaggagaggtttaggacaataactagttcttactacagaggtgctcagggaattattttagtatatgatgtcacaaagagagagagtttctcaaatttggctgatgtttggactaaggaaatagaagcaaactcaacaaacaaagactgcataaaaatgcttgttggaaacaaagttgacaaggatgatgaaagaatggtcacagaagaagaaggtcttgcttttgctgaagaatctggttgtctgtttcttgagagcagtgcaaaaacacgagaaaatgttgagaaatgttttgaagaacttgcattgaagatccttgaggtccctagtctcctggaggaagggtcttcttcggttgtcaagaggaacatcctgaaacagaagcaggaaagtcatgcaaagaacggcagtggatgctgtcaatagatgtgctgatccacgcgacaaggttggctgttttcgtgtgagctgccctgacgttctgctgtacatgagttgtatctacatggtcttgtgagtaaaacagggttaaagaatcagcttgtttggcggggagggggagtgagcataattgatttgtacaaaggacatggcagtttggtgtcattgattttctctctctctcttatcatctccggtttagcgaagca

SEQ ID NO: 89706 - DNA, 308 bp, Zea Mays
atgaaaaaacacacaaatcatagaatggagagtaacatgggtcatggtggaaaaatccaagtgagctatatagaagagatacagaagacaactgcaataatgcatgttcaactaaacagcacaagcccaatgcatgaactgaatgtactaatgtaatctggaaacacaaacagtggtataacaaaaaagtgataccagctacttagctacaacaagactaggcgtgccataagaagacaccaataaacacagtcgaaaatatcctctgaagcataatattcatagtatccagctcaccttagcccacc

SEQ ID NO: 89707 - DNA, 924 bp, Zea Mays
ccggcagtctgcgatcaaaccgcacgcaagcgaaccacagcgtgctcgccatctcactgactgtgacgacggcaacaagccagtgagcagctcgccatggcagcagtgtccaccgcgccggcgctcgaaggccgcatcgcgctcgtcaccggtggctcccggggcatcggccgcgaggtgtcgtcccacctcgccgcgctcggcgcgcgtgtcgtggtcaactacgccaccaacccggccaaggccgaggagctcgtcgcggagctcgcctcgcgcggcctccgcgccgtggccgtgcgcgcggacgtctccgacccggccgccgtgcgcgcgctcttcgaccgcgccgaggaggcattcgggtccccgccccacgtagtggtcgcctgcgcgggcatcatggacgccaagtaccccgcgctggccgacactgccgtcgaggacttcgacgccacgttcgcggtgaacacgcgcggcaagttcctggtgtgccgggaggccgcccggcgcatcccccccaacagcggtgggcgcatcatgacgttctcgtccacgacggttgccgtgctgccgccgggctacgcggcgtacgctgcgtccaacgccgctgtggaggcgatgacgagggtcctggccaaggaggtggcggcgaaggggatcacggccaacgtggtggcgccgggccctgtgcgcacggagctcttccttgccgggaaggatgaggcgttcctagagaggataaagaactccatgggtatagccgagacgacagacatagcgcccgtggtggcgttcctggcgagcgaggcctcgggctgggtgaacgggcaggttatcagggtcaatgggggcgtcgcatgagtgcggcgttgttattattacctcattatctgccatggctttccaaggatgttgttttcctga

SEQ ID NO: 89708 - DNA, 813 bp, Zea Mays
gacaaaaccgccgttgaccctgatgacctggccgttaacccaagccgcggcgtcgctggccaggaacgccaccaccggtgccacgtccgtcgtctcggcgatgcggcccatggactgctgctccaccctccgcaggaacgcttcgtccttcccggccaagaacagctcggtgcgcacgggccccggcgcgaccacgttcgcggtcacccccttcgccgccacctccttggccaggatcttcgtcatcgcctccacggcggcgttggtcgccgtgtacgctgcgtatcccggaaggagcgtgccaacgatggacgacgagaacgtcacgatgcggccgccgctgttggctggcacgcggttcgccgcctcgcggcacacgaggaacgtcccgcgcacgttcaccgcgaacatggcgtcgaagtcgtcgacggcggtgtccgcgagcgccgggtacttggcattgaggaggcccgcgcagcagacaacgatgtgcggcggggacccgaacgcctcctcggcgcggtcgaagagcgcgtgcacggcgtccgggtccgacacgtcggcgcggacggccacggcctggtggccgcgggaggcgagctccgcgacgagctcgtctgccctggcggaattggacgcgtagttgaccacgacgcgcgcgcccagggtggcgagttgggaggacacctcgcggccgatgccgcgggagccgccagtgatcagcgctacgcggccgtcgagcgggagcagcgacgacgtgttctcggcgcttgcgactgccatggctgtctgcctgcttgcttgctgacttaa

SEQ ID NO: 89709 - DNA, 1507 bp, Zea Mays
aagatgaagcaggtcgtgtaagtaactggagttgccaaaactgatacggtagtcggattaacaaaactcgaagtcgctctcaagaaaatgaccacagatgagcatgaagtatggacagaatgcaatagcaaaccgaataatcctatctcacaaaaagcgaagataaagaaaatgagctcacgaagaagaaggcatgcatcatgcaccgctctcttccaagtgtcaacaaagtggcaagcactagttcacttccctggtcatcgtttcacacgcatccaagaagctctacgtgctctggtctttgacggttttagaccatgcagagacactcagctgccaagccatgcacggctgcaccctataaatacacggcctccagttcactccacacagcacgcaagcacacacaacaaccacactcttgcaccgagctagcagccaagatggcgaccaaacacctggctctttgcctccttgttctctttagcataggcatgggcatggccaccgctgctgcaaaccgcaaactgggttatggccccgggggaggaggtggcggtggtggtagcggtggcggtggaggcggtggttacggaggaccaggctatgggtccggatcagggtatggtgagggcggtggcagcggaggtgctgctggagggtatggacatggtggtggcggcggcggcggtggtggtgagggtgcgggagctggtggctctgggtatgggtccgggcaaggatctggctacggagctggcagcggtgctgccggtggatatgggagtggcggaggtggtggaggtggcggtggccagggtggtggttccggatatggccatggaggtggtgaaggatacggctctgggtctggctttggtggtggtgctgccggcggcggcggtggacatggtggcggtggtggtggtggccaaggtgggtctggctatggctctggttcaggatatggatcaggtgaaggatacggacaaggtggtgctcatggaggaggctatggaagcggtggtggcggtggtggcggcggtggtcaaggtggtggtggctctggctatggatctggatccggctccggttatggaggcggcaacgacaacggacattattaggctctttttaagagctagatacatgttatacaaatatgtcaccagacatgagtctgtcttgttgcatgggatgctagctgtgtccatcgtgtgtgtaacaccgcaaggcttgtgatttgtcctgtaaactgcttgccgctttacattactggcaacaactaagtgataaataaaaatcatctatggaattatagtatgaacacttgagataaggcttgtgtgatgtggcttttgtgctacaaagtgaacccaacaagagctataatcattttcggcggccactactattttccgcatccagaggacaaccgcaaccgccgaaagtaaacgttattttcggcggctgtcctctggccaccgaaaatagacgttattttcgg

SEQ ID NO: 89710 - DNA, 443 bp, Zea Mays
ctagtggatttatgccaattatcaaggaatccctaaggttttggacggaatgggaattgctattctttctacttctagaagtataatgacagatcgagaagctcgactaatcagaattggtgggagggagaagttttatgttatatatggtaatggccccacctatagtacccaaattctatctcgaacttcctattttgaaaataaaaatagaaaaataggagaaaaatatatgacagaaaaaaatagtagagaaaaaaacccgagagaagcaaaagtcactttcgaaggtttagttaccccacgaaatgttccgcgttcgcctagagaatgacacgatcatcctgggctatatttcaggaaagatccggtctagctctatacgaatactgatgggggataggatgaaaattaaattaagtcgttatgattcctgcaaaggc

SEQ ID NO: 89711 - DNA, 447 bp, Zea Mays
atgactgaaaaggaaggacggttcgggtcaactgagcaaccaatcaaggatgaagctaaacggacaagaatatctgaacacgatcaacagtggagactggcagttttcctgaaactgaacttccaccccacaacatctagatcagaatcaggagcgtgcaccatcagcacgggaggcagggagagagaagagcaaccgggattcagcgcgagggctattactttcggccggccccttgaattcgacgaagaattcctgcatcccatcgttcaccatctcgaccttgtagtcgctcatcatcagcttcataaggtccatctcgcggcgcttgctcggggacgacatcttggagagcggggaaacaagaacagcagcagaagggccccccccccccctcagctcctcgccttggggataagagggagaaagggattgcgcagcctgtag

SEQ ID NO: 89712 - DNA, 288 bp, Zea Mays
atgactgaaaaggaaggacggttcgggtcaactgagcaaccaatcaaggatgaagctaaacggacaagaatatctgaacacggtcaacagtggagactggcagttttcctgaaactggacttccccccacaacatctagatcagaatcaggagcgtgcaccatcagcacgggaggcagggagagaaaagagcaaccgggattcagcgcgagggctattactttcggccggccccttgaattcgacgaagaattcctgcatcccatcgttcaccatctccaccttgtag

SEQ ID NO: 89713 - DNA, 215 bp, Zea Mays
cagaacacactcctccctccccgacaccgaccgacccctcgtccactcgcctccctccccaatccccgccaccatggccgccgccggcgccgcgtcctcctcttcctcctccgaggttccgatcgccgcccgcacctgcgtctccgtcggtgaggtagcggtgggcgcggtggctacaagcagcggcgatcgggtggcgacagattgcggggtgt

SEQ ID NO: 89714 - DNA, 1627 bp, Zea Mays
cgagctgagtccaccagaccaccacccatgacagtccataaccctctcgtttattttgcgccatcttcctcgcctcctccacagcaagtccacctcccgactctaccaaaatcccaaaccctagcgcccagcctcatcagatccctctccaccttcagcccttgagcgctgtacgcaccatgcggatccgcaagagcgcctcccgcctcctaggctctgcgtattccgcctccgctgcatcgcccgttgattcgacgcctccgttcagcccgcttccgccgccgccgccgccgccgccgccacacctggcgccgtgctccgcgcccgaatactgcggagggctcggcttctcgagcccctcttcttcttctgcggagccctgcgagctcagccgctcgccatgggacctcatcgccgagctctccgtctccgacccacaggtggaggatgacatcgtagacaagtacttcgtccatgtcgcaacgcgttcgagctggctcttctcagccaccgttccagccgcctccgccaagaagaagagtagtagcacgagtggggatagcaagcacaagcagcagctgcgccgtgacgctgtgaataagtctgcaacgagtaaagagaaggttggcgaggctaataagaaggcaaaggtcaagaaagaggaggaggggcaggatggggataggggagcgcgggtctggctgtgcaagaagaatgacggcaaacggtggcactgcaaccggccagtgagccaacccaacaccctctgtgagtaccattctgtgcagaagcgctcctacttggaggccccctctgtggcaaaattggaggaggctccggcgccggcgccagcagctgcccccaagtcctccgcacgcaacaagccgaggaagaagaagcctggcagtgacgtgagtgcgactgagggcttctactactacgctgggttcggcccattccggtcaacgaagaggcagtgtaaaagcggcggcacgaacgaacctgcgcctgcaaaggaagacgacgagggtaatcaggcaaaacatgcttctccgggtcagaaggctgaggtcgatgagggtcatcatgatgacaccaccaccaaccagaccgccactgcagcctatggtgatacgtctagctgcgaagatgacatagcagggacgatcgccggcgtggatgaggggagcagcgacgacgacgacttcgatggacttggtatctctggccacagcatgaacgggaatggcgatcccaaagctagcagtggtgatgtcaagacgaagatcccgtggaagcggtggaggaagcccgtgaaggcgcggtcgctcaagtccttgatgtaagcacctacgttacgttacgtaacgtaacgtacgtgcatcagcgacgacgtcgaagaaatgctagctgcaggtacgtgtgtgtacctttgcttaattagtcggcctgttctggttttgttgttgttgaccagctgtacaagctgtgtttgacttttgcattatgccgtgccttccgattccaatcaatcactcgatggttactcagcctgtcgtgcgttgacgcgttttctggtcaccttgttgttgcgattcgggatcaaatcaactgatttttgcggttt

SEQ ID NO: 89715 - DNA, 1508 bp, Zea Mays
cccgtcaccctctctcgttcattttgcgccatcttcctcgcctcctccacaagtccacctcccgactctaccaaaatcccaaaccctagacctccaggctcagatccctccccccaccttcaccccttcagagacgaacgcaacatgcggatccgcaagagtgcctctcgcctcctaggctctgcgtactccgcctccgccgccccgaccgttgatgcggcgcctcggctcgacctgctgccgccgccgcaccccgcgccgtgctccgcacccgaatcctgcggcgggtccgccttctcgagcccctctgtctccactgcggagccctgtgagctcagccgttccccatgggacctcatcgccgacctctccctctccgacaaaaaggtggaggacgaactcgtggacaagtactttgtgcatgtcacgacccgggcgagctggctcttttcatccaccgtgtcagccaccacatccaccaagaagaagaagaagctgcctgctgcagtctacgaggatagcacgcagctgaggcgtgaggccgcgaaaaaaactgcaacgaatagggaggagggcgagactaagaagaaggcgaaggtgaagaaagaagaggtgcagcaggatggggcagcagcagcagcagcgcaggtctggaagtgcaagaagaacgatggcagacggtggcactgcaaccggccagtgagccaacctaacaccctctgtgagtaccatttcgtgcagaagcgctcctacttgaaccccggtttcgagttccactccacggcagaactggagggggcagcgccagcgccagcgccggtgcatgcagctagctccaagttgtccaccagcaacaagccacggaagaagaagaagcctggaaacgacttcagtgcgaccgagggcttctactactacgctggctttggcccgttccggaccaagaggcagtgtagaagcggcggcacgaacgagcctctgcctgcaaagcaagaagaggaggaggaaacacctgaatatgcttctcatcatacagaagaagaagaaaaagaagccaaagttgctggattcaccaatcaggctgcatctcaagatgacgtgtcgagttgtgacgacgacattgcagggatcgcgggcgtcgacgaagagagcagcgatggtgactacgatgggattggtctcggtggctgcaacgtggatggagctgctgatccccaggctagcatcggtgaggtgaggaggaaggccccctggaagcggtggaggaagcctgtgaaggcgcggtcgctcaagtctttgatgtgagcacgcaagcgcccgcgttactcttccatctccgtggtgtagatgtagaagataagttaatcggcagcttggcttattcgcttgctaactcctgttccttctgatttgtagctgttgttgattgacggactgtttgacttcttcgtgttggttggttgttccatggttgtacaacgttggttgccaacttgccattcgttttc

SEQ ID NO: 89716 - DNA, 472 bp, Zea Mays
gccaaccagtgcggcgctctccaggacgcgctggacggcgtcgctggcgcaggccgcgcgcagccgccgcagagcccgcctgtacagggccgctacacaccgcagccgcagccgccggatcagcgccgtgcccaggaacctgcgccgcgtcctgccgctcccgccgagcctggccaccgccatcttcctcctcgccttccggcttccctgcagcgcagtccgcggcacacggcgcgcgacgtcaccggccattccctgcagaccccctctcgcgctcctctgcgctgccagtagccgcaggcccgcacgcagctcacggctcgcaggctcgagagcatggatcaacgtcgaggtggttgtgactagtgaggtcagctgtcctctctgtctaccgcgcatcgctgcatgaatcatacaagcactcacgtaggacaagcttcgtctgatcaagttcttaatcatccacccacct

SEQ ID NO: 89717 - DNA, 902 bp, Zea Mays
aatggctatgtgcttagtgcggattttcttctccgctcggatttcctcaatgacccagctaccacatatgccgtggcagacagtattgcaagatgcaccgatgaagctgtggatgcaaagcttaggtctttcatgaatgagcactggagcgaggcagctttttgtgcgagattcgaatctgcacagcagcactttgttaatttcatgaggataatggaaaggggtgaatcaccaatccgcttaggggacctcccacttgagctggtgattgccatggcctacctgccgctctataaggaatgcatgaattccaatgggcgacttttgcctcaaaggcttagaggtcagcttatggaggctgcaagcaggctcgaggaccggcaagtggaaagggatagccaaagcagagaactcttggccatcttggagcaccacataccacgattcatgatccaaacttgaaggtaagcgcaggcatccactctaaaccactgctgtcaatgcaagcaaaaaacaacttacaagggcaatccacgccgtcttcagtgtcgccaccatgttcctgcttggggggacatcaccaaatgatagcatcttgagttggctttcctgcaggcgatctttggagagtatataattctggggaatggtgtgtgccttgtcgaggcatgtgtctgagtgttttactgggaccgtaatcttccatgaaaaaaatgatataagccttcggtatgtaatccttagttttcggtgtaattcaaaacgcagttaatgcttaatcctcagagctgcatataaccaagtggtgcttacctagatttgaggacctctgatgcttgtttatctcaagtgagccttttgagtcttcatgtttcgttgaagaacatcattacatgcactat

SEQ ID NO: 89718 - DNA, 104 bp, Zea Mays
cctgcctaatgtgtagcgcttttgaaacactattttttgcatatagctgtgcgacagttctttcacctaattacatttacctttctacaaagatgtattattgc

SEQ ID NO: 89719 - DNA, 1595 bp, Zea Mays
agtgcatatagactggtcattttacgattagggattattttggccgccgtcgctgcccttcctagtcgctgtcgcgacctcatctgcttccagagtccggcctcgtctgcttgcagcgtcgccgaccagatccacccgcacgcggccgtccgcgcctcgtccatcgcagcggccgcccgcacgcgtccatgacctcgtcggcttccggcgccggccagatccgcccagcctctccgcccccgccgaccgcgctgcagccctctccgcggtgcctcggcccctcccgtcgcggctacctccagccgccggtcaacctgccgacgtggccacctccggccgcccagatccgctgcaccacctccagacgccagccgccgaccgcccagaccccctgctccaccagggagagtcgccagccgctacctctagccgccggtcgcgtagatcccctgctccaccagggagtcggccgcccagatcccctgctccaccagggagagccaccagccgctccaccactgtgtcccaaccctaggccgagggattgcgcgcctccctgacgtgagccgcgactgggtgaacacagatattgctccagtttgtgaagcagctgttcaacacagcttctaagagattagagattggggtagttgacttgacaaacctcttttcacacgaactgaaaaactaatccatcagtaaaccttgatgtttctgatgttgagaggctgaaagagcagtatgcatgttgcacagaagatcagttggcttttgaaggctatagaaagctcttgccaaccagaaaggcacttcctgatgggcaggtcataacaattgagaaagagaggtacattgttggtgaagctttatttcaaccacatatattgggcttggaagattatggtatcgttcaccagctagttactagcgcctcaaatgtttcatcagagtaccatcgtcagctgcttgaaaataccatgttatgtggtggcaccacatcaatgactggctttgaggacaggttccagagagaagcaaatctgtctgcttcagcaatctttccatcacttgtgaagcccccctgaatacatgtccgagaacctagcaaggtactcggcctggttgggtggtgcgatattggccaaggtcgttttccctgaaaaccagcatatcaccaagggcgagtatgatgagacggggcgtctattgtgcaccagaagtgcttttagagacaaactgccttgaactagcacggttgtgcaccatttgctgctgttcatgtcacagctgtgctcgtacctgaatgttgcaggtgccgatgcttgagtccactgtacgccagccacagttcataccgctagccacagttcatacctgactgttgcgaagtgttggtgcatctaggtcggttgggtttatttagagtgcaatagagggtaacattgacgtgtattcgttaggagttttagccaattgcccatttgcacctgtagtattagagaattagctgagatttccttttcaacttacattatgatccattatctcttcagctactgctagtgaaagagttgtttgggtcatgcccacaaact

SEQ ID NO: 89720 - DNA, 1016 bp, Zea Mays
aacagctacatttcatgccatggttacagctttgcatgttcaattggctctcttggacagttgtgtatacaacttgtggatctttatgcatatttaatctaaactcttgtagttttgcttagactcatttaatcactaaggtttatctcactttttttcttcctcaaggctttgaggacaggttccagagagaagcaaatctgtctgcttcagcaatctttccatcacttgtgaagcccccctgaatacatgtccgagaacctagcaaggtactcggcctggttgggtggtgcgatattggccaaggtcgttttccctgaaaaccagcatatcaccaagggcgagtatgatgagacggggcgtctattgtgcaccagaagtgcttttagagacaaactgccttgaactagcacggttgtgcaccatttgctgctgttcatgtcacagctgtgctcgtacctgaatgttgcaggtgccgatgcttgagtccactgtacgccagccacagttcataccgctagccacagttcatacctgactgttgcgaagtgttggtgcatctaggtcggttgggtttatttagagtgcaatagagggtaacattgacgtgtattcgttaggagttttagccaattgcccatttgcacctgtagtattagagaattagctgagatttccttttcaacttacattatgatccattatctcttcagctactgctagtgaaagagttgtttgggtcatgcccacaaactaagcatgtcacaggttcttaggcatatgtttttgttaggagccaagtagccaacggcatcctctccccctgccggccagagggtgcacgtaacattccatcgctcttcaacggctcccccttgggagcactctgcattgagaaaggggcttctctagggtgaaaatgggtcgggtacgccctatgggtaccgtgtcgggtactgaatgtgaatacagatagtgtaaatatctgttttttatgcgagtttgagtatttttat

SEQ ID NO: 89721 - DNA, 1307 bp, Zea Mays
cgtcgtcgctctcgcggtctcgcccccggcggccccccacgagtgtggcaacaaaagggtctcggttcggagttggactcggagtcggccagaacaatccagcgagctcgaaaaaaagggtacgaataggaaccccaatccagggccggagggcgaacgaactcaaaagcaagccgttccagtccaatccgccccagtccaaatctaatcgccgggtttaggcacaaggggcgggacgcggcgaggtttagtcggggtttgttttgtcccttccgtgcgattctgctctccgcgcgggaggcaagtactgacggaagcgaagaccaaggcggaggaggggggtccccggcggtggaagtggaacgcgccgatgcgcaagtttcaggactccatcaaggccctccaggccgacatcgatcacgccaatgcgatgtgagtcctccagggagcgggatttcctgttcgccccctttccctttgcttgctcacgttaaaggcggaatcttttactcttcttcgacgtttttggatgactgaatgacttttttttcgcgatggcgggggttgtttgtttgtgcgatgcgagcagggcgtcggaattcctgagggactacgacggctcggtcatccagatgcgggtggcgtacagcgccgtcgcgcatttcctcctgcagtggaccgactgcaagctcgccggcgcgctcggcctcctcaaggttatgctatacaaggtgtgcgcggacggctcgtcggcgcttcctgattgggagatggaggccagcatcagggagttctacggcgtcattttcccgtcgctgctgcagcttccgagtggcatcaccgagctggacgacaggaagcagaggaagctctgcctgaagaaattcaggagcagggatgagcagctctcggaggtggacacggagagggagctcgagtgcgggatctgcctcgaggttagccccaaggtcgtgctgcccgactgtgcccacatgctctgcatgcggtgctttgaggattggaacgagaaatcgaagtcctgccccttctgtcgcgcctgcctggaggaggtgaagccgggcagcctgtggatatacaccgacgacagcgacgtggtggacacggataccttgactagggagaacatcaggcggctgttcatgtacataaataagctgccacttgtagtcctacatgtagttgaccttgacgtttacaagtaccgcatcaagtaaaatgcaactgattcttggtgatgtgccagttgtttaagttgtggttcatgtgatggtgttgtaggggtgtgt

SEQ ID NO: 89722 - DNA, 1150 bp, Zea Mays
cgtcgtcgctctcgcggtctcgcccccggcggccccccacgagtgtggcaacaaaagggtctcggttcggagttggactcggagtcggccagaacaatccagcgagctcgaaaaaaagggtacgaataggaaccccaatccagggccggagggcgaacgaactcaaaagcaagccgttccagtccaatccgccccagtccaaatctaatcgccgggtttaggcacaaggggcgggacgcggcgaggtttagtcggggtttgttttgtcccttccgtgcgattctgctctccgcgcgggaggcaagtactgacggaagcgaagaccaaggcggaggaggggggtccccggcggtggaagtggaacgcgccgatgcgcaagtttcaggactccatcaaggccctccaggccgacatcgatcacgccaatgcgatggcgtcggaattcctgagggactacgacggctcggtcatccagatgcgggtggcgtacagcgccgtcgcgcatttcctcctgcagtggaccgactgcaagctcgccggcgcgctcggcctcctcaaggttatgctatacaaggtgtgcgcggacggctcgtcggcgcttcctgattgggagatggaggccagcatcagggagttctacggcgtcattttcccgtcgctgctgcagcttccgagtggcatcaccgagctggacgacaggaagcagaggaagctctgcctgaagaaattcaggagcagggatgagcagctctcggaggtggacacggagagggagctcgagtgcgggatctgcctcgaggttagccccaaggtcgtgctgcccgactgtgcccacatgctctgcatgcggtgctttgaggattggaacgagaaatcgaagtcctgccccttctgtcgcgcctgcctggaggaggtgaagccgggcagcctgtggatatacaccgacgacagcgacgtggtggacacggataccttgactagggagaacatcaggcggctgttcatgtacataaataagctgccacttgtagtcctacatgtagttgaccttgacgtttacaagtaccgcatcaagtaaaatgcaactgattcttggtgatgtgccagttgtttaagttgtggttcatgtgatggtgttgtaggggtgtgt

SEQ ID NO: 89723 - DNA, 1300 bp, Zea Mays
cgtcgtcgctctcgcggtctcgcccccggcggccccccacgagtgtggcaacaaaagggtctcggttcggagttggactcggagtcggccagaacaatccagcgagctcgaaaaaaagggtacgaataggaaccccaatccagggccggagggcgaacgaactcaaaagcaagccgttccagtccaatccgccccagtccaaatctaatcgccgggtttaggcacaaggggcgggacgcggcgaggtttagtcggggtttgttttgtcccttccgtgcgattctgctctccgcgcgggaggcaagtactgacggaagcgaagaccaaggcggaggaggggggtccccggcggtggaagtggaacgcgccgatgcgcaagtttcaggactccatcaaggccctccaggccgacatcgatcacgccaatgcgatggcgtcggaattcctgagggactacgacggctcggtcatccagatgcgggtggcgtacagcgccgtcgcgcatttcctcctgcagtggaccgactgcaagctcgccggcgcgctcggcctcctcaaggttatgctatacaaggcgtcattttcccgtcgctgctgcagcttccgagtggcatcaccgagctggacgacaggaagcagaggaagctctgcctgaagaaattcaggagcagggatgagcagctctcggaggtggacacggagagggagctcgagtgcgggatctgcctcgaggttagccccaaggtcgtgctgcccgactgtgcccacatgctctgcatgcggtgctttgaggattggaacgagaaatcgaagtcctgccccttctgtcgcgcctgcctggaggaggtgaagccgggcagcctgtggatatacaccgacgacagcgacgtggtggacacggataccttgactagggagaacatcaggcggctgttcatgtacataaataagctgccacttgtagtcctacatgtagttgaccttgacgtttacaagtaccgcatcaagtaaaatgcaactgattcttggtgatgtgccagttgtttaagttgtggttcatgtgatggtgttgtaggggtgtgttccttgcccagggccgtgtgagactgagcccgtggtgagcggggaagttgtgtgagcccatggatgccccagggccgcaaatagagcgcgttagtgatgtgaaggcacttcgggatcaaacagtggtggaggatgagtcaaaaacaaggtatggcgaagttaaaaatgtatatgacaatataaaaaaaatctaggtagaagcaaatgcgacaataaa

SEQ ID NO: 89724 - DNA, 2020 bp, Zea Mays
gggcgccagcggccagcggccacccacaagcagagtaaaatattccgcctaggaggatccgcggaccgagcagcagactgcatatatatccgtgtccggccgcgccatttgtgcacaccaacaccaccacggaccaccgcgcttgtcgttgcattgcagggcagctagccggctatagcatccgccatggcgcgcggcggggacggcctgcaggtgctcagcgcgctggacgcggcgaagacgcagtggtaccacttcacggccatcatcgtcgccggcatgggcttcttcacggacgcctacgacctcttctgcatctccctcgtcaccaagctgctggggcgcatctactacacggacaccagcaaggacaacccgggctcgctgccgcccaacgtcgccgcggctgtcaacggcgtcgccttctgcggcacgctggccggccagctcttcttcggctggctcggggacaagctcgggcgcaagagcgtgtacgggatgacgctcatgctcatggtcatctgctccgtcgcgtcgggcctctcgttcggccacacgcccacgggggtcatggccacgctctgcttcttccgcttctggctcgggttcggcatcggcggggactacccgctgtcggcgaccatcatgtccgagtacgccaacaagaagacccgcggcgccttcatcgcggccgtcttcgccatgcagggcttcggcatcctcgccggcggcattgtcacgctcgtcatctccgccgccttccgcgcggggtacccggccccggcgtacagggacgaccacttcaactccaccgtgccgcaggccgactacgtgtggcgcatcatcctcatcctgggcgccgcgccggcgatgctcacctactactggcggatgaagatgcccgagacggcgcgctacaccgcgctcgtggccaagaacgccaagcaggccgcggccgacatgtccagggtgctccagacggagatcgtcgacgagcaggagaagctggacgagatggtcaccgccgagagcaacaccttcggcctcttctccagggagttcgcgcgccgccacgggctccacctcgtcggcacctccaccacgtggttcctgctcgacatcgccttctacagccagaacctgttccagaaggacatcttcaccagcatcaactggatccccaaggccaacaccatgagcgcgctggaggaggtgttccgcatctcccgcgcccagacgctcatcgcgctctgcggcaccgtcccgggctactggttcaccgtcgcgctcatcgacgtcgtcggccgcttcgccatccagctgctcggcttcttcatgatgaccgtcttcatgctcggcctcgccatcccctaccaccactggaccacgcccggcaaccacatcggcttcgtcgtcatgtacgccttcaccttcttcttcgcaaacttcggccccaacagcaccaccttcatcgtgccggccgagatcttcccggcgcggctgcggtccacatgccacggcatctccgccgcctcggggaaggccggcgccatcatcggggcctttgggttcctgtacgcggcgcagaaccaggacaagagcaaggcggacgccgggtaccccgcgggcatcggcgtacgcaattcgctcttcgtcctcgctgcctccaacttgcttggctttatcctcaccttcctcgtgccggagtccaagggtaagtcgctcgaggagatgtccggggaggctgacgacgccgaggacgacgccgtcggcacccgcgcggtgcggccgtcggggacccagatggtgtagaatcgaacatggcgacgcgtgcacacgggtcctccatcctggggcccgactgggaagacaaggcgcgccggttcaagcctgccgatgctttgctgtgcagaagtagttcgtacaggtgcatgtgtgttataggcgggaaagtaagtgaacttacacgcttgtatttattatatccaaccttacgtacagcaactccagctccattgca

SEQ ID NO: 89725 - DNA, 93 bp, Zea Mays
ttgctacctgtgctgcacattggccggcccacaaataattgtgctaaaagagttgaagcttcacaataccatgatagaaaatgttggtttcaa

SEQ ID NO: 89726 - DNA, 189 bp, Zea Mays
ttcagtgctagctacatgtgagcttcaggtgcatctaggagcagctgacgcaacgaccgtccatggggaaggtggtgcagatgctggacggggtcatggagctcgagaggcctccgcacccgaagtcatcagtccgcttttttagcacaaccaccacggccagcggcgacaactccagcatggtctcga

SEQ ID NO: 89727 - DNA, 1333 bp, Zea Mays
aagaacaaggcagagcagaggaaactgtggagtgagtgagcaagccggccggcccagtacactacagtgtgcggagacaagcaatagcttgctgatcgagcaggaacgatggagcactctttatattattactgccgcagctggttgcttgtatgctcctcggttctcgcgctgtgcctcggtagccggggccagctgacaccgggtttctaccgcagcacttgccctcagctgtactacaccgtgcagcgccacgtgttcgacgccatgcgagctgagatgaggatgggcgcctccctcctcaggctgcacttccacgactgcttcgtcaatgggtgtgacgcttccatcctcttggacggcgacgacggcgagaagttcgcactgcccaaccggaactcggtcagagggttcgaggtcatcgacgccataaaggcggatctcgagagcgtctgcccggaggtggtgtcgtgcgctgacatcgtagcccttgccgccagctatggagtcctctttagtggagggccttactacgatgtgcttctggggagaagggacgggctggtggccaaccagtcaggagccaacagtggtctgccttcgccgttcgagcccatcgactccatcattcacaagttcgccgccgtcgacctcaacacgaccgacgtcgtggtcttgtcaggagcccacacgatcgggcgagcccggtgcgcgctgttcagcaaccgcctgtccaacttctcggccacggagtcggtggacccgacgctggacgccggcctcgccgagagcctgcagagcctctgcgcgggcggcgacggcaaccagacctcggcgctggacgtcagcacccccaacgcgttcgacaacgcctactacaagaacctcctgctggagaagggcctcctgtcctccgaccagggcctcttctccagcccggaaggcgtcgccaggacgaaagctctggtggagacctacagccaggacagcgagcacttcttctgccatttcgcctcgtccatgatcaagatgggcaacatcccgctcacggcctccgacggcgagatccgcaagaactgcagagtagcgaactaattattaatagaaagtcacgacgatcatccgatatctcactgttatttctcgtttgtttgtgtcaactgtgaaggcaggcacctacgtaaggtttatgggtgcgacgttaagcatgcagctacactagatgcttaagaataaggacactgtaaatgtccaaattggtcccacatgtcaaacacagttgtccttttcatgaaagaaaaaacggaaatttcaaaatgttaccgggatgaaa

SEQ ID NO: 89728 - DNA, 1701 bp, Zea Mays
gcgagcatatccgtcccacgcccggacgtcccatgtgcagagcaggcgcggcatctctgagcatcagaagcgccatgcactgcttccggttcgcgagctgggagcgggacgccgacgagcggcgcgagtcggcggcggcggcgaccacggggcggtccttgtccgcgcggtccaacggcagcaccacgtccacggaccgcgacgtgcggcggtcggcgtccgagtgctccctgaaggcgtcggagctcagcagcgccagctccttgggccggggccggcagctgtcgctgtcgcagcggccgccgaacacgctccgcgtcttcaccttccaggagctcaagtcggccacccgcgggttcagccgcgcgctcatgctcggcgagggcggcttcggctgcgtctaccgcggcaccgtccggagcgcgctcgagccgcgcaggagcctcgacgtcgccatcaagcagctcggccgcaagggcctgcaggggcacaaggagtggatgacggaggtgaacgtgctcggcgtggtggaccacgccaacctggtcaagctcataggatactgcgctgaggacgatgagagggggatgcagctgctgctggtctacgagttcatgcccaacggcagcctggcggaccatctctcctcgaggtcaccgcggccggcgtcgtgggccatgaggctcagggtggcgcttgacacggctcgagggttgaagtatctccacgaagaatccgaattcaagattatatttcgcgacctgaagccttccaacattcttctcgacgacaactggaacgccaaactgtcagacttcggcttggcgagattaggacctcaagaaggaagccatgtctccacagtggtggtggggacaattggatacgcagctcctgaatacatccacacaggacgcctcagcaccaagaacgacatatggagcttcggcgtcgtgctccttgagctccttacaggccggcgacctctggaccgaaacaggccaagaggcgagcagaatctcgtggactggatgaagccctactcttccgacgccaagaagctcgaggctgcaattgacccaaggctccaggggaactacagcaaaagatcagctgcccagcttgcgtcggtggcgaataagtgcctggtgcgccatgccaggcaccgtcccaagatgagcgaggtactggagatggtgcggaagatcgttgagaacagcgaaaccggaacgccggagcatcccctgatcagcaattcagaggagttagttagtgacgaaaggaagcggaaacgccttggcttgaaaagaaggattgcagatattaaagctggggaagggagatggtttgcatggcaaaggtggacgcctaagcttgtgagaacacagtgattcagatcatcggtagataaggcgtttcttgcatggcttgacttgcatagttagtagcaaaaacggtaagtcacctgggttttcttttagcaaacaagtcacagagcatggcaattgtaaacaaacggtttggtgcagtccatggcagacaccactaataaataatggataggttcacattttctgggatcacaaataggctgataggaaaccttctccacaaactcggggggttccatgtttcttattaagctcaagcagtcattttctcgtgtagaaggcatatcgtatagtttactcggttttgtag

SEQ ID NO: 89729 - DNA, 2890 bp, Zea Mays
tataatatggttaatacgatgagccttctgtgtatatatagtagtagcattctcgacagtccccagatatgtgacacatcgtcgctcgcatcctattgccatcatcataaatccgcacttcggtttaatttggtcgtctaaaccttctgttgttcaagctctctggccggcggcggccatggcatcgttgagctttgcctcgtcccatgcgtccctcttctgttgccaacaatcctccagtgcaatcatccttcgaccagctggagcactgctgcggctgtcccggaggcaaccgtcgtcgcataccatttccaccaccgaccaactgttcccgcggcggtcacgcatgccgcggaacgtggatacgcatgccgccgcggaacgcaactctcccagcacaatgagcagtctggaagcggtggacgagctggagacgaacggcgacagcgcggtcgtcgtcgtcagggagcagcagcagcagcagcacctgctgatgggcgccaccgacgacggcttaccgccgtcgccgtacgacacggcatgggtggcgatggtgccggcgccgggtaacccactggtgccccgcttcccgcagtgcgtggactggatcctgcagaaccagcgcagcgacgggtcgtgggggcccgacggcggctccggcgaccacccgtcgtcgccgctgggcaaggacgcgctcatgtccactctggcgtgcgtccttgcgctcaagacgtgggacgccggcgaggagcacgtcaggaaagggctctctttcgtcgggaacaactcgccgtcgtgcgtgatgacgggtgacgagcgcgacgcgccggtagggttcagcgtcatcttccccggcatgctcgcccgtgccatcgacatggggttagacatcccaatgatgacgcaagccaacgtcgacgccttcatccgactgcgtgacacggagctaaacaggatggcggccaccaccggaagtaaagctttcatgtcatacgtagcagaaggcttgggagatgtactggactgggatgaagctgctatggtgtaccaaaggcaaaacgggtcattcttcaactcaccggccacaactgccgcggctgcgatccacggcaacaacgaccgagcgctccgctacttggattccctcgtcaacatgtttggcagctcagtgccaactgtgtatccccggagcacgtactctcgtctccacatggtggatacactgcaaaagatgggcctctctcgaagctttgtctctgagataaacgaaatgcttgacatgacatataggtcctggttggccaacgacgacgaggagatgatgctggacatgtcgacgtgcgccatggcgttccgcctcctgcgtatgcacggatacgacgtctcttctgatgggctagctcagttcagcagtgagtccagcttccgcgattccgtccatggccaggcaaacgataccgaggcattgctggagctgtacaaagcgtcgcagattcagatcacggaggacgagctcgtcttggtagacattcgttcttggtcagctaaactactgaaggaacagcttggttccgacaaggtatcaagatcagtagacgcccaagaggtgcagcaagttctcaagtttcccttctacaccaccctagaccggctggaacacaggaggcacatagagcaattcaaggcagggggcttccacatgctaaagtcagcctaccgcttttgcaaggaagacgaagagcttgtatcgcttgctgtccaagggttccattcctcccaggcattgtaccaacaggagctccagttcctcacgaggtgggcgaaagaagcgagactgcatgacctcgagtttgcacgaatcatgccgatgaacacgttcttcccaaacgccgcactcatgtatgcccctgaactatccgaggctcgcatcctgtgcaccaagaattgcatgctggccaccgcagtcgacgacctgttcgacgtcggcggatcaagggaagagatggagaacctcgtcaggctgatcgacatgtgggacgagcacgaagaggttggcttctgctctgagcgcgtagagattctcttccgcgccatttacgacacgagcaaggagctcgcagccaaggccatggcggtgcagaaccgcagcgtcatcaaccacgtcgccgagctctgggcggatctggtgagggccatgatgaccgaggcggaatggagcatgcgcggacacgtgccgtcgtcgatggaggagtacatgcaggtcgcggagacgtcgtttgctctgggcccgatcgtcctcatgcccctctacctcatcggcccggagctcccggaggccgtggtccggtgccccgagtacaagcagctgttccaccacatgaacgtctgtgggcgcctgctgaacgacctccagtcgtacgagagggaggcgaagcaagggaagatcaacagcgtcctccttgtagcccctcggcacggtggctccatcgaggccgccaagagcgaggtgaggcgcgccatcgaggcctcccggagggagctgctgaggatgctggtcgccgaggcggacgccacggtaccccggcccttcaggcaggagttctggaacatgtgcaagatggtccacctgttctacatggaggacgactgctactcgtcgcccaaggagctggtgcacgcggccaacatggtggttttcgatccgctgcgggtcagggaactttgactcccccagggaccgctgaattcggccatgaggtatttcgtagtgttaagataaaggattgatcaactcgatatatatatgtgtgtaatcctaaagactatatatatatgtatatataaacgtacggtgtacatatataggtataacgattgatcgtccttgttc

SEQ ID NO: 89730 - DNA, 1992 bp, Zea Mays
gagggacacactgacgtcgacaggtacgtgcgtaacaatcacgtggcaacacgttgctccaaagcctccaacaccgagccccagcacccattaacgcttccaaaaataactgcagctgggcctgcgctcgcgaaggtacgccgaacgcgaccaatcaaccctcacgtacttcctatcctatatatcggcccgccgatcccgctgccttaacttgcatattttcttgacacttgacagccaccacacactagagagagagaaggagaacgcgcgtcgtatatgggtcaagaagaggccgtggcagcgaacggcaccggcaccggcgtcggccgcggcaggccgcacgccgtggtgatgccgtacccgctgcagggccacgtgatcccggcggtgcacctggcgctgcggctggccgagcgcgggttcgcggtcaccttcatcaacacggagtccgtgcaccaccagatcggcgccggcggcgacatcttcgccggcgtgcgcgcgcgggggggagggacgacgacggaggagctggacgtgcggtacgagctggtgagcgacggcttcccgctgggcttcgaccggtcgctgaaccacgaccagttcatggagggcgtcctgcacgtgctcccggcccacgtcgaggacctcctccgccgccgcgtcgtcgtggacccggccaccacgtgcctcgtcgtcgacaccttcttcgtgtggccggccacgctggcccggaagctgggcgtcccgtacgtgtccttctggacggagcccgcgctcatcttcaacctctactaccacatggacctgctcaccaagcacggccacttcaaatgcaaagatcctcgcaaggacacgatcacctacatcccgggcgtggcgtccatcgagccgagcgagctcatgtcgtaccttcaggatacggacaccacctccgtcgtccaccgcatcatcttcagggcgttcgacgaggcccgccgcgccgactacgtcctgtgcaacaccgtggaggagctggagccgtcgaccatcgccgcgctgcgcgccgacaggcccttctacgccgtgggccccatcttcccggcgggcttcgcgcgcagcgccgtggccacgtccatgtggcccgagtccgacgactgctcgcggtggctgggcgcgcagccgcccggctccgtgctctacatctccttcggaagctacgcgcacgtgaccaagcaggagctgcgcgagatcgcgggcggcgtgctggccagcggcgcccggttcctgtgggtcatgcgcccggacatcgtcagctccgacgacccgcgcccgctgcccgagggcttcgccgaggccgcggccgccgcgggccgcggcctcgtcgtccagtggtgctgccaggtggaggtgctctcccaccccgccgtcgccgccttcctcacgcactgcggctggaactccgtcctggagagcgtctgggcgggggtgcccatgctctgcttcccgctgctcacggaccagctcaccaaccgccgcctcgtcgtgcgggagtggggcgccggcgtctccatcggggaccgcggcgcggtgcacgccgacgaggtcagggcgcggattcaagggatcatggccggggaacacggcctcaagctcagggaccaggtcaggaagctgagggccacactcgaggctgccgtggcgcccggtggctcgtcgcggcgcaacttcgacgacttcgtcgacgagctcaagcgaaagctcaaggacgccagctgagctggccccagaatacagctgcgatgtaggccttgtatccttagcgacagcgtgtattgcgtcacataaacttgtcttgatcgaagcgtgtatgcagtgtacggtaggacaatattgttctgcaggcttgctcaagtgatatgttgtacctgtgttaccaatgtaaacatgaatcgtgtcacgaatttcaagttagcttgatcagtctatagttttacgaagggctcgtttggt

SEQ ID NO: 89731 - DNA, 574 bp, Zea Mays
gcctgtccggtcctgcgtacttcaacacctttctccagccgtccgagctccacctcgtcgtcgtcctactgtttcagcgtcgtatccctctacctcatcacagcagcaccggtgctctcgtcgtcgctgagctcttggcgcgccatgacatcatcgtcgttttctcgccggccgcgcttgacccacagctccttcgcgtcgtcgtcttggacaacccgtagcctctgctccgacctcgtcgcactcgcgctcctcacacccgacaagccgtcgtgctcggcgtgttttctccgtgcggccttacgggttcctctcgcttcatcggcttgtcgcgtgttagagcagaacaccaagaagaattgatctttgtaaaggaggaacctgctccagtgctgttgatccagtgatggactccatctaactgcttatcagagtagaagggttttagatcttctcctgcaataaggcaagccccggtgcatttgccaccttccttgtattacaaaattttatcacttatatgctgcattaggtaataggagttgaatgattaaacacttgatgcattaccatc

SEQ ID NO: 89732 - DNA, 2374 bp, Zea Mays
cagacgggggttcatcctacttcgctttcgctcgtcgcgcgcctcgcgctcgattgagctcaccttagccagcgtgtactctctccctccggccctccccgattctcaccaggagcgacggcgactccggtgcgccgctgcttgcgagggcgaaggccggcgtgtggcgcgcggctgcaggcgagggcgaaggctggcgcacggctgcaggcgacgccgcctcgcacttgattcaactcgccccttcaattgcggcgacgctggtcgagcgactgagcccttcgctaggtcttcattgggttcttcgtcggcgagaacccgcaccagcatcaccaggcatttagaaaggaaggctgtatgaaggctagtaattttcagttaagatcatcaaggcttccttggttagagtcatggctgcttcctcctggattcccagtcgccatgaatagtagctactttttggggggacagggactatccacattgaaatttagagtacggtgctctcagctacagctttctactaattcagttcataataagaaagagaaagagaaatattcttgttttgatcagtcaacatcatatctgcatgtacaatgtcttagggacttcccgactgaaaaactttctggagaggtagttgtgcaagagcgaaagtggccatagccaccagctgggatacaattcttcagtatgataatccagtgactgaatcagttgcctcttttgcagagtacatgtcatcccttcttcaagtagaagtcatcccagtagatggtgcacctagttcaacatcatttaagcaagaagagtgggctcagaacagtattattttgtttgaaaatcttctgaacttcacaggagaagttgctaattgcaaagatttttctcagaagcttgcttcaggtgccatgatatttgtcaatgattctttctcactgtctcataagattcttgcatcaactgttgggatcacgtgcttctgctatgcgtctcttgctggtttccattttgaagaggagcttatgaaattgataaagatcacggactccacgaggcgcccatatattgccattattggaggcagtaatttcttgagaaaagcacctgctcttcagacgttaacctgtctatgcgatgggttgttctttgttggaaaattatcatttcaaataatgaatggttttggaatgacagtgccctctcaattcatagaaagaaatgcagttaaggaagtactacaaattattcaagttgctagggataggaatattcctatttattatccaacagatctctggtgcttgaaaaatggcgacagtgaaatatcaggggtcatcaactctaccggacaattggctggctggacaccagctgatataggaccatcgacattggagaagatttcttctataattacatcatacaagaagatactgtggattggccctacaaactacggtttgacagaaaaaaattcagttggtggaacacagttgggtgaaatactggaaagtgcaagctctgatggctgtgatgttattttagtgggggatgcagcatgcaaggcagtaaaaagaaaaacagattcctcaccgcaatatacagaatttcaaaagtccactgttgtttgggaattcctcaaaggaaggatattgcctggtatagcagcattggataaatgttacccctaccggattccatggagtactgtcttctgtgaacctacactacccttagtggttgatatcggaagtggaaatggtttgtttctttttcaaatggctaaaagttgtgaaagttcaaatttccttgggtttgagatgaatgaaaagcttgtcattaggtgcctccaaggtatggcttcagatgagaaaaggaacctatattttgtgtcaacaaatgcaacgtccacatttcgttccatagtttcaagttatcctggacggttgactcttgtcacaatacagtgcccaaatcctgacttcaacaaagagcaaaataggtggagaatggtgcgaagaatgctcattgaagctatcgtcgaccttcttcataccaatggacaggtttatctgcagtcagatgtggagtccgttctgctcgtgatgaaggagcagttcctctcctacagcaagggtcagcttgtcacggacggcgatggtggcaactgcatcgataacccgttcggcgtggtatccgactgggagcgccatgtcctcgctcgcggagctcccatgtacagggcgatgttaaagaaaatgtgattccatttcctccgtctctgaggtctgaacattgcattgttttgtcaccatggctgcttcggacatggacaacgttcatggattcactcggttagataaaactc

SEQ ID NO: 89733 - DNA, 113 bp, Zea Mays
ggagaatatgcaatgttgtcgcaacgttccgtgggttactgctaaatgttgttattggacttgcgataatgtttagggtcattttttgtttaaattatgtaacctcaatatgc

SEQ ID NO: 89734 - DNA, 180 bp, Zea Mays
atttttgcatgcatggttttccatgtttcgagtgacttgcagttcaaatgtgaattttccgaagaaattcaattaaccgaactaaatctaatagttatagaaaacacttttataattgtaccaaaatggtacatgtaggtctacatagtgtaggaacataccacaaaaagtttggttggg

SEQ ID NO: 89735 - DNA, 1988 bp, Zea Mays
atagggtttagacttcacagttctcctgcctaccccgtccctccccaagcgcgccgtctagggtttcacagccgtgccccgatccattcgagcgccccgcaccgccgccatggagtttgacgaatacgagtacttggagaaggcggtagagcccgctcccccacaggccaatggttccggctccggctccggcgagaaggaccgcggctcgcgccgccgcgagggcggcgaggaccgcatatcgaagcgctctcgctcgggggaggaccgcgaccgggacaggcaccgcagcggccgggagcaccgtgaccgggacaaggatgacgtgaaggaggagaggagccgcgaaagccgcgggaaggacagggacagggaagggagagaacgggagaaggagaggggtgacaggcaccggctgagagagagggaagtggaacgggagcggaggagccggagccgctcggagcggcgccgtgccgaggaagaggagatggttagggagctggagcgggagcgcgagcgcagcgagcgacatcactatcgcgaccgtgatgtcaggcgtaggaaagatgacggggcagagccagaagttgatccagaaagggaccagaggactgtatttgccttccagctatctttgaaggcagacgagagagatgtttatgagttcttctcaagggctgggaaggttcgtgatgttcgtcttatcatggaccggaactcaagacgttctaaaggagttgggtacattgagttttacgacgttatgtctgttccaatggcaattgctctgtctggtcaaccgctgcttggacaagcagtgatggttaaaccatctgaggctgaaaagaacttagttcagtcaaatgcgacatcaggtggtgcggcttcaggtggagcaagaaagttgtatgttggcaatcttcactcaaatattactgaagaccaattgagacaggtatttgaaccatttgggcaagtagagcttgtacagcttcctgtagatccaatgactggattgtgcaaaggttatggttttattcagtttgcacggcttgaagatgcaaaagctgcacagagcttgaatgggcagcttgatatcgctggcagagttattaaggtttcagctgttaccgatcatgtgggaatgcaagctagtggagcaactactggagatttagatgacgatgaaggtggaggcttggcactaaatgcaagttccagagctgctctaatgctcaaattggacaggagtggtactgcgaccagcttaactcgtggtattggtgctgctggtgtggctgtaccagctacttctgttattggggctccaggagctgcttctcttctaccaccaacagttgctgctgttggatcagttcctggggcacctgtgcttcctgttaccactcagaatgtgaccatgtctacacctacagaattcttgttgcttaaaaacatgtttgacccagcattggagacagatcctgattttgacttggatattcgagatgatgtccaagatgagtgttccaagtttggtgcagtgaagcatatttttgttgacaaaaatactgcaggctttgtgtatctgcagttcgatagcgtgactgcagcagcaaaggcccaaaatgcccttcacggaagatggttcgctgggaagatgattacagcgacatttatgtccgctctggagtacagtacgaagttcccaaacttgtgagcatatgccgggaagagttggccagacctgcatagttcgtttggagtattcgcaagtgctgtatcgttggatggtagacgaacaccttattgattgtatgacagggtagttgcagcaccgggcgtcactatcagtacaatgcttgatgtactttatttacggcgtcgcagtgaccaaaccttatttttgtccaccgaatgaaatgccctatcatctccaggcttgttggcatatggttgattttctggacgatcaccataacaca

SEQ ID NO: 89736 - DNA, 2335 bp, Zea Mays
atagggtttagacttcacagttctcctgcctaccccgtccctccccaagcgcgccgtctagggtttcacagccgtgccccgatccattcgagcgccccgcaccgccgccatggagtttgacgaatacgagtacttggagaaggcggtagagcccgctcccccacaggccaatggttccggctccggctccggcgagaaggaccgcggctcgcgccgccgcgagggcggcgaggaccgcatatcgaagcgctctcgctcgggggaggaccgcgaccgggacaggcaccgcagcggccgggagcaccgtgaccgggacaaggatgacgtgaaggaggagaggagccgcgaaagccgcgggaaggacagggacagggaagggagagaacgggagaaggagaggggtgacaggcaccggctgagagagagggaagtggaacgggagcggaggagccggagccgctcggagcggcgccgtgccgaggaagaggagatggttagggagctggagcgggagcgcgagcgcagcgagcgacatcactatcgcgaccgtgatgtcaggcgtaggaaagatgacggggcagagccagaagttgatccagaaagggaccagaggactgtatttgccttccagctatctttgaaggcagacgagagagatgtttatgagttcttctcaagggctgggaaggttcgtgatgttcgtcttatcatggaccggaactcaagacgttctaaaggagttgggattgcacactgaaatttaataatttggtctacctgctgggattatcggcaatttacaagtaagatggaatattagatcattctgatgtcagacagcagtcgaggacagtttgattccagtgtatttgacaaacccttggtgcaggtttctaggcaataaagggggcacccaagaaccaagttcgaaaacctccactagttttgatcaaaatgcctgaagttttctgtgaaaatttgaaatatcttaacatatgatgccccacttattgtttttcttttcttttacaggaagacaactttttttggatgctttgatgattgtactaaacatatatctcaattcacaggtacattgagttttacgacgttatgtctgttccaatggcaattgctctgtctggtcaaccgctgcttggacaagcagtgatggttaaaccatctgaggctgaaaagaacttagttcagtcaaatgcgacatcaggtggtgcggcttcaggtggagcaagaaagttgtatgttggcaatcttcactcaaatattactgaagaccaattgagacaggtatttgaaccatttgggcaagtagagcttgtacagcttcctgtagatccaatgactggattgtgcaaaggttatggttttattcagtttgcacggcttgaagatgcaaaagctgcacagagcttgaatgggcagcttgatatcgctggcagagttattaaggtttcagctgttaccgatcatgtgggaatgcaagctagtggagcaactactggagatttagatgacgatgaaggtggaggcttggcactaaatgcaagttccagagctgctctaatgctcaaattggacaggagtggtactgcgaccagcttaactcgtggtattggtgctgctggtgtggctgtaccagctacttctgttattggggctccaggagctgcttctcttctaccaccaacagttgctgctgttggatcagttcctggggcacctgtgcttcctgttaccactcagaatgtgaccatgtctacacctacagaattcttgttgcttaaaaacatgtttgacccagcattggagacagatcctgattttgacttggatattcgagatgatgtccaagatgagtgttccaagtttggtgcagtgaagcatatttttgttgacaaaaatactgcaggctttgtgtatctgcagttcgatagcgtgactgcagcagcaaaggcccaaaatgcccttcacggaagatggttcgctgggaagatgattacagcgacatttatgtccgctctggagtacagtacgaagttcccaaacttgtgagcatatgccgggaagagttggccagacctgcatagttcgtttggagtattcgcaagtgctgtatcgttggatggtagacgaacaccttattgattgtatgacagggtagttgcagcaccgggcgtcactatcagtacaatgcttgatgtactttatttacggcgtcgcagtgaccaaaccttatttttgtccaccgaatgaaatgccctatcatctccaggcttgttggcatatggttgattttctggacgatcaccataacaca

SEQ ID NO: 89737 - DNA, 2712 bp, Zea Mays
atagggtttagacttcacagttctcctgcctaccccgtccctccccaagcgcgccgtctagggtttcacagccgtgccccgatccattcgagcgccccgcaccgccgccatggagtttgacgaatacgagtacttggagaaggcggtagagcccgctcccccacaggccaatggttccggctccggctccggcgagaaggaccgcggctcgcgccgccgcgagggcggcgaggaccgcatatcgaagcgctctcgctcgggggaggaccgcgaccgggacaggcaccgcagcggccgggagcaccgtgaccgggacaaggatgacgtgaaggaggagaggagccgcgaaagccgcgggaaggacagggacagggaagggagagaacgggagaaggagaggggtgacaggcaccggctgagagagagggaagtggaacgggagcggaggagccggagccgctcggagcggcgccgtgccgaggaagaggagatggttagggagctggagcgggagcgcgagcgcagcgagcgacatcactatcgcgaccgtgatgtcagatatgatacgatagagccgtcttcagatggtatctgcaattgggcctgactcaagatatcaggcgtaggaaagatgacggggcagagccagaagttgatccagaaagggaccagaggactgtatttgccttccagctatctttgaaggcagacgagagagatgtttatgagttcttctcaagggctgggaaggttcgtgatgttcgtcttatcatggaccggaactcaagacgttctaaaggagttgggattgcacactgaaatttaataatttggtctacctgctgggattatcggcaatttacaagtaagatggaatattagatcattctgatgtcagacagcagtcgaggacagtttgattccagtgtatttgacaaacccttggtgcaggtttctaggcaataaagggggcacccaagaaccaagttcgaaaacctccactagttttgatcaaaatgcctgaagttttctgtgaaaatttgaaatatcttaacatatgatgccccacttattgtttttcttttcttttacaggaagacaactttttttggatgctttgatgattgtactaaacatatatctcaattcacaggtacattgagttttacgacgttatgtctgttccaatggcaattgctctgtctggtcaaccgctgcttggacaagcagtgatggttaaaccatctgaggctgaaaagaacttagttcagtcaaatgcgacatcaggtggtgcggcttcaggtggagcaagaaagttgtatgttggcaatcttcactcaaatattactgaagaccaattgagacaggtatttgaaccatttgggcaagtagagcttgtacagcttcctgtagatccaatgactggattgtgcaaaggttatggttttattcagtttgcacggcttgaagatgcaaaagctgcacagagcttgaatgggcagcttgatatcgctggcagagttattaaggtttcagctgttaccgatcatgtgggaatgcaagctagtggagcaactactggagatttagatgacgatgaaggtggaggcttggcactaaatgcaagttccagagctgctctaatgctcaaattggacaggagtggtactgcgaccagcttaactcgtggtattggtgctgctggtgtggctgtaccagctacttctgttattggggctccaggagctgcttctcttctaccaccaacagttgctgctgttggatcagttcctggggcacctgtgcttcctgttaccactcagaatgtgaccatgtctacacctacagaattcttgttgcttaaaaacatgtttgacccagcattggagacagatcctgattttgacttggatattcgagatgatgtccaagatgagtgttccaagtttggtgcagtgaagcatatttttgttgacaaaaatactgcaggctttgtgtatctgcagttcgatagcgtgactgcagcagcaaaggcccaaaatgcccttcacggaagatggttcgctgggaagatgattacagcgacatttatgtccgctctggagtacagtacgaagttcccaaacttgtgagcatatgccgggaagagttggccagacctgcatagttcgtttggagtattcgcaagtgctgtatcgttggatggtagacgaacaccttattgattgtatgacagggtagttgcagcaccgggcgtcactatcagtacaatgcttgatgtactttatttacggcgtcgcagtgaccaaaccttatttttgtccaccgaatgaaatgccctatcatctccaggcttgttggcatatggttgattttctggacgatcaccataacacatttttgtcagatttccaatgtgctttattttttattctcttatgtttcaggatgttttgatatgttcttgctttcaccaagaagtttgccatttcaatccgtttcattttattttattcgactgatacagtttattgtttttctgttctcttttagggctagtttgacatccacatttttccatgggatttctaatttttcaagggaaaatgaactaatttcttttgggaaaatgaaaaacacttggcgaaacgaggtttccaaactaggccttaacaagaaattcaccggcgaaggaaaacaacaacaagctcc

SEQ ID NO: 89738 - DNA, 1002 bp, Zea Mays
ggccatggcgccatgccatacatgagctacctatcgtcagttgccgttctgccctccggcagttagcctctctggtcctcctccagcactagtatttaacaagcactggcctgcagccaacggcatgcatctcatctcatcgcacaagtccagaacacggttattgatctccattgccagtccacatcaacggtcgtcgtcatgaaaatgaacatgtccctggttctgcgcgtagccttctcggcgtgcctggcttccctcgccgccgcgggctggtctcccggcaccgccacattctacggcggagccgacggctccggcaccatgggcggcgcgtgcgggtacgacaacctgtacaacgccgggtacggcgtgaacaacgcggcactgagcgcgacgctgttcaacgacggcgcgtcgtgcgggcagtgctacctcatcgcctgcgacacgtcacgtccgggcggccagtcctgcaagcccggcagctccatcacggtgtctgccaccaacctgtgcccggccaactacgcgctgcccaacggcgggtggtgcgggccggggcggccccacttcgacatgtcgcagccggcgtgggagcacatcggcatctacggggccggcgtcatcccggtgctgtaccagcaggtcaagtgctcgcgcaccggcggcgtgcgcttcagcctcgccggctcgcagtacttcctgctcgtcaacgtccagaacctcggaggcagtggctccgtgggggccgcctgggtgaagggcgacagaacgaactggatccagatgtccaggaactggggcgccaactggcaagcgctcgccgggctcgtcggccaggggctgagcttcgccgtcaccaccaccggcgggcagtacattcagttctggaacgtcgcgcctgggtggtggcagttcggacagacctacaccacgacccagaatttctactactgaaacctgcaagcagcagcgagtgcttggatcttcctgtcgcca

SEQ ID NO: 89739 - DNA, 1071 bp, Zea Mays
actggcctgcagccaacgccacatgcttctcatctcatcccacaagcccagaacacactgcacggttattcatctccattgccattccacacatcgaccgtcgtcgtcatgaaaatgaacatgtccctggttctgtgcgtagccttctcggcgtgcctggcttccctcgccgccgcgggctggtctcccggcaccgccacggcgccacattctacggcggagccgacggctcaggcaccatgggcggcgcgtgcgggtacgacaacctgtacaacgccgggtacggcgtgaacaacgcggcgctgagcgcgacgctgttcaacgacggcgcgtcgtgcgggcagtgctacctcatcacctgcgacacgtcgcgtccgggcggccaatcctgcaaacccggcagctccatcacggtgtccgccaccaacctgtgcccggccaactacgcgctgcccaacggcgggtggtgcggcccggggcggccccacttcgacatgtcgcagccggcgtgggagcacatcggcatctacggggccggcgtcatcccggtgctgtaccagcaggtcaagtgctcgcgctccggcggcgtgcgcttcagcctcgccggctcgcagtacttcctgctcgtcaacgtccagaacctcggaggcagtggctccgtgggggctgcctgggtgaagggcgacagaacgaactggatccagatgtccaggaactggggcgccaactggcatgcgctcgccgggctcgtcggccaggggctcagcttcgcagtcaccaccaccggcggacagtacattcagttctggaacgtcgcgcctgggtggtggcagttcggacagacctataccacaaacctgaatttctactactgaaacctgcaggcagcagcagaatgcttggatcttcctgtcgccgcccacagaattcttttggttcggtcaaatatatgccaagcctgggaggtcctcacctcataaatgcctgctgttaatttctttcaacgtgttgtagatatatttgttcaactttagatatttctttcgaagttgtaggtatctacaacacact

SEQ ID NO: 89740 - DNA, 340 bp, Zea Mays
atgcacatagactctgccaatgcaagtggacagctgagaagcacatactacatgcttatgaagtttctctcttcactcgatcaaaatcaggtccatctgaatggtcgccaaatggtggacaggattacacaagaaagagtcacgcgagtaattaagcataatctattacaggaagcttcgtcttcaggatgcaagccccttcctcatgatgaacgcacacgagacgaagacagatctaaagatgataagagtaaacaccgaagctatcgctagatggacagcttcggctcataacggagacgaagtataatgatgatgctgatcgaaagagaaaaagact

SEQ ID NO: 89741 - DNA, 1183 bp, Zea Mays
ttgctaagcagatcacccgatccaccacagtcgcaactcagatcgcaaaattaaacccgcagcaaaccaagcggcaagacaatccgcgtgctagctagctccctttttctgattcttacgtacgtgcccgtactcgtagcaagcaagcaggtcgtcgcgcagtcatggcgcccaggatgatgctggttctgtggggcgttctggctgcagcgtcgtccaccgtcgtggcgggctggtcggcaggcacggcgacgttctacggcgggtcggacggatccgggaccatgggcggcgcgtgcgggtacggcaacctgtacagcgccgggtacggcgtgaacaacgcggcgctgagccagaccctgttcaacgacggcgcgtcgtgcgggcagtgctacctcatcacctgcgacgcgtcgcgcgcgggcgggcagtactgcaagcccggcggcgccagcgtgaccgtgacggccaccaacctgtgcccgcccaactacgcgctccccagcggcggctggtgcggcccggggcgcccgcacttcgacatgtcgcagccggcgtgggagaacatcggcgtcgtccggggcggcatcgtcccggtgctgtaccagcaggtcaggtgctcgcgcagcggcggcgtgcgcttcaacgtcgccggctccagctactttttgctcgtcagcatccagaacatgggcggcagcggctcggtcgccgccgcgtgggtcaagggcaccagcacggcgtggatccagatgtccaggaactggggcgctaactggcaggctctctcggggctcactaatcaggcgctcagcttcgccgtcaccagcaccggcgggcagtacatacagttcctcaacgtggcgccggcgtggtggcagttcgggcagacctactccaccaaccagcagttttactactgatgatcctccttccataagctttctgatggactctggttctgtctgttcatcgtcttcctatcctagtacgtatattaattgccgacgtgctgtctcgtggttttgggcggagttacagtgcccgatcgacgaaccgtggccgtggcatgcatgcttcctgttcatagtgccatttttacccagctgccataatggcatcatacatgtgtgcaaaattgtctgcaccacttcaatcaatatgcaaattacattaattagcc

SEQ ID NO: 89742 - DNA, 1380 bp, Zea Mays
cagcacctcctgcgcagcagcatcaggcagatcgcagtcgcagcaccgaagatggtgagcaggcgcactctcctcgtcatgatggcgacggtagtggttctgcatcggagtcggactctctgcgctgctgcctcggcggctgcagcgccgccggcgacgacgaagcaggcgcggaccccggcgctgttcgtgttcggggactccatcgtggacccgggcaacaacaacgccctcaccaccacggtgcgctgcaacttcccgccctacggccaggacttccccggccacaacgccaccggcaggttcagcaacggcagggtgcccggcgacatcgtcgccagccgcctgggcatcaaggagcacctgcccgcgtacctcggcacagagctcagcgacttcgacctcctcaccggcgtcagcttcgcgtccggcggctgcggcttcgaccccctcaccgccgagctcgtgtccgtgctcaccatggacaaccagctggacctgttcaaggagtacaaggagaagctggagcgcgtcgccggcggcgcccaccgggccgccgacatcgtgtccaggagcctttacatggtggtcacgggcaccgacgacctcgccaacacctacttcaccacgccgttccgccgcgactacgacctcgagtcctacatcgagttcgtcgtgcagtgcgcctccgacttcatcaagaagctgtacggtctgggcgcgcggcgcatcaacatcgccggcgcaccgcccatcgggtgcgtgccgtcgcagcggaccaacgccggcgggctggatcgggagtgcgtgccgctgtacaaccaggcggccgtcgtgttcaacgcggcgctggagaaggagatcaagcggctcaacggcagcgacgcgctcccggcctccgtgctccagtacatcgacctctacacgccgctgctcgacatgatccagcgccctgacgcctacggattcaacgtgacgaaccgggggtgctgcggcacgggggtgttcgaggtgacgctgacgtgcaaccggtacacggcggaaccctgcagggaccccagcaagttcctcttctgggacacctaccacctcacggagaggggctacgacctcctcatggcacagatcataaaccgatacggggtctgacgtctgagatggatgccatgacagcgcagcgctggagatttcggcgctatgacagcgcggtccatgctttcagaggcttttgctgaatttgatcttgtaggtgaactacgactccagaaatcaccggtccaatatcatatcccagtttgtaatgggtacatgtagtgacagttgtttgcttgtattgcataaatgaaaactgaatcaggacaggcagtgacagttgacaaa

SEQ ID NO: 89743 - DNA, 1172 bp, Zea Mays
aggcgtgcacagtgcgccatgttctgccgcgcctgcgctcccaccgcgtgtccgcagctctgccccacctcacatccgcgcccgcaatccacgcctccgtcgccgcagcccttcctccgcgcagcgtccgtccatccatggctctccctacacgcagcgtcgtgccgctttccacaatccgtgcctcaatccccttccttcgcgcagcacccttccatccatggctcgcttccagaaatccccctacctacggcgcagcgtcgcagtccggaatccacccccaaaatcactacccgctctgcggcgatggaagggaatcaaaacgcgtgcttcccccttccatcctcgacgttgcgcggattgcatggccatcgtttcgcgcccccaatccgtcgatgcaaggaacgcgtgcttcccccttccatcctcgacgctgcgcgaattgcagattgcggattgcatggtcatcgtttcgtcccagttcattgcccgcatcagatggaagggcgccccgatctgcctcacctccatcaatgaggtgtctgcctttcttgcatggagacgccaaagagaaggaaccagtcactaagtcggcctctgtacggtccatgaacatacatcaacggagcgtgatgtccgctccggttcagacttcacctccttgaatgtttccgacatgagcgccgagtcgataaggaggacacagtaccccagcttcattgaccgcccgtctaacctgagggtgttctcctttgctgaattgaagagtgccacccgcaacttccgccggtctctcatggttggctagggtggctttggctgtgtgtacaggggtgtcatcaagacctccgacgatctgaacgaacgaatcgagatcgctgttaagcagttgaatcgtaaaggacttcaggaagtagctcttccactacatgagcaattgctggtggagtggagccttgctatttgctgttcctgctatcagttttgcctattggcggcacaggaaaccacaagagcattttttcaatgtatatggcttcaaagttagtctttgattattatctttcttgcaacataagggcaaacaacgtttatatgtagcaaacaaatacaatttgcaaacgttttaggaacatgtttttacaataaagatatacttatagtttcaccaa

SEQ ID NO: 89744 - DNA, 2006 bp, Zea Mays
gttctgccgcgcctgcgctcccaccgcgtgtccgcagctctgccccacctcacatccgcgcccgcaatccacgcctccgtcgccgcagcccttcctccgcgcagcgtccgtccatccatggctctccctacacgcagcgtcgtgccgctttccacaatccgtgcctcaatccccttccttcgcgcagcacccttccatccatggctcgcttccagaaatccccctacctacggcgcagcgtcgcagtccggaatccacccccaaaatcactacccgctctgcggcgatggaagggaatcaaaacgcgtgcttcccccttccatcctcgacgttgcgcggattgcatggccatcgtttcgcgcccccaatccgtcgatgcaaggaacgcgtgcttcccccttccatcctcgacgctgcgcgaattgcagattgcggattgcatggtcatcgtttcgtcccagttcattgcccgcatcagatggaagggcgccccgatctgcctcacctccatcaatgaggtgtctgcctttcttgcatggagacgccaaagagaaggaaccagtcactaagtcggcctctgtacggtccatgaacatacatcaacggagcgtgatgtccgctccggttcagacttcacctccttgaatgtttccgacatgagcgccgagtcgataaggaggacacagtaccccagcttcattgaccgcccgtctaacctgagggtgttctcctttgctgaattgaagagtgccacccgcaacttccgccggtctctcatggttggctagggtggctttggctgtgtgtacaggggtgtcatcaagacctccgacgatctgaacgaacgaatcgagatcgctgttaagcagttgaatcgtaaaggacttcaggcaagtgtttctcaccatcttttattttgcccccaaagaatatgtatgagagctgtgtatctaaggtagaaaataattaggctttacaacacaagctgctgtagtttttgtcagttctcaccatcttttcaggaacatcatagtcagcagatcaaaatcacgtcgcaaacctcattgtcacacttaatcatgtgcttctcagtcctaggtttcacttctgttttttaatctcatgatgaaatatgaacaaactgaattgttgcaacatggtattttaaaatgagggcaccagtccccctaggcgccatatgattttccttttgcaaaggaaactctaaatctggttaacttgtttatcttgtattttcatgtacttgaaactgtgtgttttttagacttatcacttatcagtcctcacagtgttgctgtttgtattttgtttctaaaaacttttacgggttgcttgcctaagtaagtcttcataaacatttaagtggtgatgctattacatgctacttttaataaaccattgctttcaactaaagtttatattgctattagataaagttctcatcacttttacattactaatgcaattttggattgttggcagggtccaattttgtggaaggaatgctttttctccccttgccttttcggttagaaatcttggtatttaaatcacccctttttggtttgtggttgtgccctctccccacatgaggtgatttaaataccaagatttctattattcaattgattccttgatcatttcctttccagattagtgaaaggtctcccttgctttattttcatcgaaaacaaagcgaaccacaatcttagtctccaaggtcaatttctgacggtggcactccaaaatctaatcacgatggcctaatagcttgagtgttgaacgcaatatttcagattcatacctatatgatacttggagcagcaatatgcatagtgtcgccctttttcataccctaaagtataaaatatagggcacacacttacatgtcaaaatttattattcaaaggaaataacaacgttctttttgctaaatgttctttagcaatttgattagtcaaagaggttgcttgtttttttgtggg

SEQ ID NO: 89745 - DNA, 355 bp, Zea Mays
ggccttagagatatggccttagagatatcttcatttggatgtgaagaagggcatgaccaaagcggcatcaaatgtaacttaaatagacaagcaagcaatcatcaagtctttttagagactaaagttgaaggtgttgaaaaggagtttggggactatccaagacatgaagctgtcgtggctgctagcgtattgagacatagcgggatcgacaagatgcaaaaggagataataaaaggtcatccctaagaaaatgctttggtcacattgggttagcataatataggctaaataataccatagtccagttccagtagcagaaaagagaatgaattggatgttccctggcacatattga

SEQ ID NO: 89746 - DNA, 431 bp, Zea Mays
ctcgaccacgcccccgccccaccctgcgcatgcccactagaatcgccgccatgacaggcgctctctctaccccgtgttaccccctctgaattcggccctagatccttggctcacgcgtgcgaattttgtctcttactctgagtcttactggcgcaggatgagggcggcgcgtcggcgcagaagaggtccccaagcggcaagtttggtggcggcgagaccgtgctagagatcgtgtaggccagccagttcgcgcgggacatcatgacggctgtcggcgctatgaatcgggagcccccgaggaccccgaaaccggctcccaggaccaggaagccggcggcgggcgagccgacgcctctccacgcgtggcgtggccgggtgaagcagagccatcggggtggcactgtgacacggggcgctgacgcgccacgccg

SEQ ID NO: 89747 - DNA, 437 bp, Zea Mays
atgtttccgaactccatgttccacgcctccacctctgccgccaccgactcatgcgcgacgtcgtcgccttccaagaagcagaagtggctctacaagacgcggtcccctgtcgtggcccagcagacgccgcacaagttcctggtcaaagtcaccaccgagtgcgctgggatccaagctcaggatgcacgggaaggccctacccgcgagacccgccgccatccgtgaaggcgcaggtgtcacctgcaaaaacgcggagctgctcgttctcgccgtcaaggttggcgacaaggctcatgtcgcctatcaaagcgaggctatcgctgggcaggaaccaggatagcgacgtcggtgtcgacggtggcctgatgagcgggctgaagcagcggccaggtgttagcttgatggtgtgaacgatgtcgagcaagatatcatcgagg

SEQ ID NO: 89748 - DNA, 298 bp, Zea Mays
tgggtcgagtttttttatcagactttgtgtgtgttgtcctttatccactgttcaactatattgttcatctatcacggcaacagagcgcagatggccttatagatgtccaaacagtacaggccgtccgtttggcccgtgacccgacacgattctggcccggtccaagcacgacccgatacggttagtaacgggttcgggtcgacacggcccgttaagcgggccgggtttaggcggctatggaggctcgcgtgctatggcccggcccggcacgagctgcaggccggcacggcagcggccc

SEQ ID NO: 89749 - DNA, 273 bp, Zea Mays
gtcctccaggaccctgtgcttgcactcatggtcgaggagggcattctccgccgagagtggcgccgccagaatgcactgatgctggaggagaatgaacggaaggagagggagcgtcgcaacgagatcatcgcagaagcggaagagttcaagaggtccttccttgacaagcgcaggcttaactgcgagacgaaccgaacgcagaacagagacagggagaaggtatgcatgcagtcacgcacatatagatgtctaaacagtgcgggccagtgttgg

SEQ ID NO: 89750 - DNA, 3133 bp, Zea Mays
ataaaccctaaaccgccctattccccactcgatttcgccatggaagccgacgaggcctcggcgccgcctcccccgccgtggatgcagaacaagtcggccgcggccatcgaggcctcgtcgggcccgctttccgccgcggcctcccgcctctccgcccgctcccgtgcgctcccctcgtcccgcgacttccacttctacaacaacttcccggcattcaaatccccagtcggcgctgcggccgcgaaggccgacgcgtccctcggcgtgctcggcggggcttcgattctcccgacgcggcagcagccgttccccgtgggcggcgacctcgacgacgcgcacgactggctcgtcgccctcaacgacgacttgctcgagcggttcggcgcctccaccgacgagttcaagaccctgcggcggaaggaggagacttccgggcggagggcggcgccgcaggctggggacgggttccaagtggtgtgcgggaagaagaaaaagaaggtgggcgatggtggcgaggaacgcgtcggcagagttgaggctttcggaggttttggctctgtgaggatggtcaccaaggacaaggcggccgcgccgggggtgaaggcgaaggtgcccttccacatccgcaccatcccaaggccccaggatgtgtattgtattgtggtggacaactccagcaagccgttcgagcatatcttgcttgatcgcagcgaggatggcactcgggtcgtgcacccattggaaaaactccctgttgaacaaataatcagcagaaatgttcctgataatgagccagttaagccaccggctttagacaacactccttttacatttgttgaagacctgaaaaccttggaggtgctagccacaaagctgaaggatgcaactgagtttgctgtcgatttggaacacaaccattataggtcgtttcagggtttgacatgcttgatgcagatttcaacaagaacagaggactttattgttgacactcttaagcttcgtaaatatcttggtgattatctaagagagtttttcagagatccaaccaagaaaaaggtaatgcatggtgcaggtcgtgatataatatggcttcaacgagacttcagcatatatgtgtgcaacctttttgacacaggccaggcttcaaaggtcttacagatggaccgcaacagcttggaacatcttttgcaccatttctgtggagtagctgcaaataaagaataccaagctgcagattggagattgaggccccttcctgatgaaatgatcaaatatgctagagaggatacacactatctgctatatatatatgacctgatgagattgagactagtgaatgggtcatcatgtgaaaatgatcttcttttagaggtttgcaagcgcagcaacgaaatttgcttgcaactgtatgagaaggagcagctgactgatacatcatatctacatatacatgggttgaaagaaaacgagctgaatgcaacgcagctgtcagttctttccagtctatatcgatggagagatggcattgcccgtgctgaggatgagagcactggctatatattacccaataagactctacttgagatagcaaaggagatgcctgtgacaagtgggaagttgaaaagaatgattaaatcaagaaattcgattttggaacgaaatctcaaccatgttattaacaatataagggatgccatagcagcttctggtgcttttgaaagtatagtggagcagctgaagaagggaaaactggaagagttaacattggcagatgtgaagaacagcagtgaggacactgaaatgattcctgctgttgatgttgataacattgaagatccgagtgatgaatctgctgtagttcctgcagtgattacaaatgtcggtgctgctccctgtattacaagcgaagcttccttgggtaatatgcatttagaggaccctgtgcctaaaacaaaggactcgggtgcttcatcagggtttactggactgacagacaacaaaaagctgagcaatgaccagcagcaagcagcaaaggctactgttcaagtatcaaagaggcctacagcttttggagctctgtttggaaaggcagctgctggaagaaggccagatcttttcctaggattttcaaatgttcagggtaagactaaggtggacaagataacgtcttccgtggtacttccttttcatcatttctcaggtggtgcaaaactttcatcagccgcccttccagcgaaagaatcgttgcattctgaaccagacagcatccaacacagtgatccagcttgtcagttggaagaagtgatacagttggacatgggaacagacgagcaacaaccaccagaaaatggcaacgaggatgatggacactgtgagactgaagacacggagatgtcaaagtccccttcaggtgacccgtctgttaccgagcaacgattccgatcactcaacgaagaaagaaacgttaagcagaaccagaagacacctcgagaattcgaatttagtgttccggtggtgccttttgattatgccgaagccagaaagaatctcgtgtctagtttgcctaaagctgagaggagaaaggacgatgccgttgccagggctataaatacagacgctggagataagcagaggggttcaaaaaagccaccaggtgggggagagaacgagggaaatttccagcatccacgaagacggcaggctttcccgccttcaggcaatagaaatgctacgtatcaccagtagcaagttgagatgtataactggcgaattggattattccaaaattgtgataaaagagtaccctacgtgttgtatatttggactggggatatctcggactcatgagaaaccaccgagactgctactgcaccgcggtgccctgacgtgttgctaacacgtgctaggtgactgagaatagttgggtattgcgttattttttttaatatgttctgaacatgagaatgccctagtatttcattaggatgtgtacattttacaatgttttatggacaattactgttgtatttttacttttgaactccagagccctgttttggtcacgcactacaattttcacctaaactcttttccgaacgtttactatattgggctgtttggatccctttattta

SEQ ID NO: 89751 - DNA, 888 bp, Zea Mays
caggcctgctcccaagcgtccctccctcttcttatccctcttgcttatccaacgaaccattccgttccttccgtccatccatccgccatggcgaccgccacgctactgagctcctccttcgccatgcccgccgccgcccgtagggcctcctccccttcctccgcctcattgagcttcgccaagtcgcagctcgccggcctctccctctccgccggcgttgcaactccaaccgccgtcgccctcctccccaagaggcagcagctccagcccattgtcgcgcggcgtgtgtgcccgttcacggacaagaagacgaaccgggcgaacaaggtgtcgttttccaaccacaagacgaagaagcagcagttcgtgaacctgcagtacaagaagctgtggtgggaggccggcaagcgcttcgtcaagctgcgcctttccaccaaggccctcaagaccatcgagaagcacggcctcgacgccgtcgcgcgcaaggccggcatcgacctcaacaagaagtgagcccatccgatgagcagccaaactagtgtggggtggcactagcttagcattcacattcacggggtcgtctcgtctgtctgtctgcctgcctacctcctgctgttctttcgcaatcaaatcatatcattatatttcctccccgttttgatttgtgtaccataccaatcagtgtaggcagatcgaggttgcacatatacgtttttggtctcgtgttgggtcctcctctgaatcgatcgtgtctccatttcacagtcgtgatcaatgccagaaagttaagtaacctggtcggctgatcctccctctcacgaattcgctgctgatgaagtatagattcaattgaaatttaaacgaattgttcctgcccaagagaagaga

SEQ ID NO: 89752 - DNA, 822 bp, Zea Mays
atgttggcgtggtacagcagcagcgtccgcggcaggttgtcgtcccaccccatcgtcacgtactccgcgaacgcccgcgacagcatcgtccacgccgaccctgtgaagagcttgaatgccgtgggcagcctcctgaggttggtggagatgttcaccgggcggatcagctccgccctcccgtcctcgtacagcgccgtgtccaggatcaccggccgcgcccgcttctttatcttccagcccaggtggctcgtgtgctggatgaagttgaggtccctgggcagcccggcgaacgcctccatcaaatctgcaacccccaaaattcagaaacagtctgtccatccagtggacgaccaacagcaagcaagcaagcaagcatcacagggtaccgtcctgggtgacgagcgggtagtcggaggcgctgaggttgatgaaccagtcccagcggcggcggaggcggagcagcacggcgacggcgtgcagcgtggtggtcagcatggtggggccacggtaggttaccaggttgggcctgcccacgatccacacgttgcccgcgcgcgcgtacacgccgcgcccggacaccagctccgccagacgccggtgctcctccgcgggggcctcccggtccaggtgcagcaggtagctgttgcccgggtggtacagcgccgccagcagccgcgcggcgcgggacgcgtcccccgtcgacgccgagatcaggtacgcgaacgtcacggggtaccgcgcctgctgctcctcctcctcgccgatgccggcatccttcgacggggacagggacggccacctgatgggcccagcgcccgttag

SEQ ID NO: 89753 - DNA, 1843 bp, Zea Mays
gaaagtgatgccccactggaaaaacgtcctgctccggctacctcctccaactcttctccctccggccgttggtggggaggaggacggaagatagcatcgccaccagcttcttttcctccctcctcctccatcatccatctctctctgcctcttccttccacctgaaggaagccggttcgggcgtcctgctctcgctcagctcggcacccccgcggaaaccgaaccaggagagcccagccccgtcttcttggttgctcgtctctctgtttgtcagcagcctgctgctgctcttgcttcggcttcagagaggcgccagggcgcccagcggattgcctccgttcttggtgctctccgaagaagagatagtagaagatagagatcggaaggattgtctcccatggggaactgcttggggggcagctcctacgtcaacaaggtctcctccaccgcaaagccagagagtcctcctaaggtgcagagcccgtcggaagtggaccggagcgacgaccgcaagctgccatcgaacccgggcgaggtagaggccctgcggcggggcgcgtcggcggcgacgcggcggaacccgctcgtggccttctccttctccgagctcaggacggtggccaacgacttccggaaggacgcgctcatcggcggcggcggattcggccgggtgtacaagggttccttcgcgccgccggccggggcggcagacccgagcggcggcaccctcccggtgccggtggccgtcaaggtgcacgacggcgacaacagcttccagggccaccgggagtggctggcggaggtgatcttcctgggccagctctcccacccgaacctggtgaagctggtcgggtactgctgcgagggcgagcaccgcgtgctggtgtacgagtacatggccctgggcagcgtggagtcgcacctcttctcgcgcacgtcgccgccgctgccgtgggccacgcggatgaagatcgcgctgggcgcggcgcgcgggctggcgttcctccacgacgcggagccccgccccgtgatctaccgcgacttcaagacctccaacatcctgctggacgcccacttcaacgccaagctctccgacttcgggctggccaaggacgggccagtcggggagcagtcgcacgtgtccacccgcgtcatgggcacctacggctacgcggcgcccgagtacatgatgacgggccacctcacggcgtccagcgacgtctacagctacggcgtcgtgctgctcgagctgctcacggggcggcgctcgctggaccgctcacgcccgccgcgggagcaggcgctcaccgactgggcgctcccggcgctgccgcacaagaagcgcgtgcagggcatcgtggacccaaggctggcgggcgccggctgggacgacccgccgcccgccagggccgtgcagaagacggccatgctcgcgtaccactgcctcaaccgcaaccccaaggcgaggccgctcatgcgcgacgtcgtcgcgtcgctggagccgctacagcagccgccggaggacccaaacgcccacgccgccttgtgatgtgagtagtgtgttgttgagacatcggagatctgccaatgcaagctgctggccggatgaagtgcagcaggaacggcggctggctggtcggggctgtccttgtccttcccggctgtccgttccgtggaacgaaaaggaacgaagcaaggtacatgatgtgactgatggaagtatgtgcgcgtgtatcatatggttggtactagcttagctaggcatgggcagagacgatacatgcatcattgcttcttcattgtttccagtttagttattggcgcgaccggttcaggttataga

SEQ ID NO: 89754 - DNA, 1672 bp, Zea Mays
tggcaacagccggtcagctcaacaccaacagcatggcatgaccactaaagttcactgaccgagctcttgtcttaagctaaccaccgcagcggtggaccatggctgccggtggcggcgatggacgtcagtacggcggcaggatcaccgtgttcgtggtgctgtcctgcgtcaccgcggccttgggtggcgccatcttcggctacgacctcggaacctccggtggcgtgtcgtccatggggtcattcctggaggagttcttcccggacgtgtaccgccggatgaagggcgacgtgcgcgtcagcaactactgcaagttcgacagccagctcctgacgctcttcacgtcgtcgctctacatcgccggcctgctcaccgcgatgctcctctcgtcgtggttcacggcgaggcgcgggcgccgcccgtccatggtcatcggcggggccgcgttcctcgccggtgctgcggtcagcggcggcgccgtcaacgtgtacatggccatcttgggcagggcactcctcggggtgggcctcgggttcgcgaatcaggctgtgcttttgtacctgtccgaaatggcccctgcacgatacagaggagcattcagcaacggcttccagctcagcctgtgcctcgggtccctcgccgcgaacatcatcaactacggcgcggagaagatcaccggcggctggggctggaggctctcgctgggcctagccggcgtgcccgccgcgctcttcacgctgggcgcctacttcctgccggagacgcccaacagcctcgtgcagcagggcgaggaccgtggcagggtgcgagcgctgctgcagaagatcagaggcgcggacgacaccgccgccgtcgacgaggagctggacgacatcgtcgcggcgaacgacgcggcacgaggcggcggcgacagtggcctgcggctcatcctttcgcggccgaggtaccggccgcagctggcgatcgccgtcctgatgccggcgttcacgcagcttaacgggatcaacgccatcgggttctacgcgccggtgctgctccgcacggttggcatgggcgagagcctggcgctgctctccacggtcgtcacggtggtcgtctacacggcgtcgacggtcgtgttcatgttcgtcatcgaccggttcggccgccgcacgctgatgatcgccggcagcctccagatgctggtctccgagctcctgatcggcgccgtcatggcggccaagctgggcgacgagggtgggatggcacgcggctacgcggcggcgctcttcgtcctcatcggcgtttacgtggcggggtacagctggtcgtggggccccatgacgtggctggtgcccaccgaggtgttcccgctggagatccggtcggcagggcagagcatcacggtggcgtccgggttcgtgttcaccatcttcatcgcgcaggggttcctcgccatgctgtgccggatgagggcctggctcttcttcttctttgctggctgcatcgtcgtgatgacggccttcgtgtacctgttattgccggagacgaagggtatgcccatcgaacagattgggaaggtgtggcgggaacactggttctggggaagggtcgtagggttagatggaacaaatgacaaggtgtgaaaaataaccgagctaagaattgacaaggtgtgagcattagctttcct

SEQ ID NO: 89755 - DNA, 122 bp, Zea Mays
cccattatataacctctaataagttgtgtttttttcgtgcacccactcttgtacatacaataaatcctcctccatcatttcgaaacattcaaatctctttttcctcattttattttctcact

SEQ ID NO: 89756 - DNA, 696 bp, Zea Mays
atgatcttccgcggcgcctcgccgccagcagcttctatcggcagcgacggcgtctaccgccgcacgtcctccggcttgcagagcgtcgatccgcagccgcagttcttcgtactcccggcgcacgcgcctccggtcccttgccagctccggccacgccgttcccttatagtcagccctccacgccttgaagccattactggcgccggggctgaagtaggcctctgggttcctcggctccaccgcgtgcttccggcagaacggcacccacagtgcagagaaccgggcagcctcggcgaccgcgtcgcgcgtgagcagagcgccaccgtcgtccgagacgtagcacgtgagcttctctgcggggtagtccgccgcgaggatggagaggatggtgttcacggtcaccagtggtggctccttctcggtgtcaactgtggtcacgaatacatccatggccggaagcatcggctcgtcgagcgcagcgaggtagacgacgcggcggacaggctgcatcttgggcacctggtcgagcacccacatcagggcaaaccagagctccccagccatggacaccatccacatcccaagaactgtgcttttgtcgtcggtgcctgtggagctaatcatgacaagcgcagtgccgattcgccacttgaagaacagcacgaagatgcccatccggagaattatcatgagcct

SEQ ID NO: 89757 - DNA, 773 bp, Zea Mays
atgatcttccgcggcgcctcgccgccagcagcttctatcggcagcgacggcgtctaccgccgcacgtcctccggcttgcagagcgtcgatccgcagccgcagttcttcgtactcccggcgcacgcgcctccggtcccttgccagctccggccacgccgttcccttatagtcagccctccacgccttgaagccattactggcgccggggctgaagtaggcctctgggttcctcggctccaccgcgtgcttccggcagaacggcacccacagtgcagagaaccgggcagcctcggcgaccgcgtcgcgcgtgagcagagcgccaccgtcgtccgagacgtagcacgtgagcttctctgcggggtagtccgccgcgaggatggagaggatggtgttcacggtcaccagtggtggctccttctcggtgtcaactgtggtcacgaatacatccatggccggaagcatcggctcgtcgagcgcagcgaggtagacgacgcggcggacaggctgcatcttgggcacctggtcgagcacccacatcagggcaaaccagagctccccagccatggacaccatccacatcccaagaactgtgcttttgtcgtcggtgcctgtggagctaatcatgacaagcgcagtgccgattcgccacttgaagaacagcacgaagatgcccatccggagaattatcatgagcctgcaaacaccgtggttttcatttgtttgggagtaataaaggagatgagagggattagaatccccttactattaaaaat

SEQ ID NO: 89758 - DNA, 680 bp, Zea Mays
aatgcggcgttttaaccttgagttaattaacacatacagtttgatgagatctgcggtggggccaggaatctgatgtaaatagattattcagtggtttttcccctttgagcaacaccccagaggcgctatggcagctatttgtgcagtgatcagctaagcacctattgttgtattatttgtttgttgcagcagagttgaatgtgcattcttcgccttacggaggaggaatttatacagtggatggggttgccttcccctgccctttggcaggttagtaaagtgtgccctagaggaaagtggcatgtttgagacttgagagtaaggagattggagggggctaaaatcccctttgttatttaaaattgaatagaagaggaatttagcctctctgatcccctcaattcccctgtatcccaaacaaaccttgaagtgttttctacagctttaggaaatgtggtttacttctatggtaggtacatgggcaaccaatgtatatacatttatttttacagcatcctggcccgttcatccacaacgtgttgcacatgtctagcctctccattgcaagggcgtacagatatgtatataaaaatctacacaatgcatgcacatgcacgagagtgtatctgtatcgaccatgaaaggtttggtacaagtctgaaaaagtatacattgttgtc

SEQ ID NO: 89759 - DNA, 135 bp, Zea Mays
tcgtgcatagtatctcgccatctattcactataatatacagaatccgtgtgacaaacattatcagtatcgcacaaactattttaaagagtcaatatagaatttttaataataggcaaatatgtcgacaaccgtac

SEQ ID NO: 89760 - DNA, 228 bp, Zea Mays
gatctaagggcttgaaacaaaaatcattagggccatctccaactgaaggaggaccacctccaaatctaataggatcattgtcatttgtgctaccaaacatgaatagcgtccccgtggttggcgagccctggccctgaagaattgcaaggaaacaaaaaaaacattgctgtcagatatgaatatgaacaaagcaaacacatgaaattcctatccagctttgacaacatt

SEQ ID NO: 89761 - DNA, 2635 bp, Zea Mays
cttccaaatactccaagccccaaggattatcatactattaaaccccttttttttgctcttgggaatcttggttgaagcctttctccaccattcagcaaaaactgaatctcttctcttaggacccacagaagagagaccaatgggagttaaaatattatgccaaaactgtcttgtgaagacgcaattagatagaatatgctgcacagtttcgtcttcttggtcacatagaacacaaatttcaggatgctgaagccccctttttttaagtctgtccgctgtccaacatttgttatttatggccagccaaacaaaggtcttacacttaggcgttgcccagctcttccaaattcttttccagggctcaaaggattttgctccaatgaataaagctttataggcagatttggacgtgtacagaccatcgttgctaaatatccacacatgctgatcatttgaattttgaagctgaaaagattcaattacctcccataattgtagatattgctcaatctcagccagagagagattcctctggatatcttgaacccagaaatgagaggtgagggcctgctgcacagtccttacttttttaaacttcatcggaactgcagcagcaataaggggagctatatccacaatagaatacccatgaatccagttatctttccgaaataaagttgaaataccattaccaatggtggtggtagtcactgctatctgaaataaagctcgggcctgggaagatattttaaaatcagctcgggcctgggaagatattttaagatccaggccactccaaggcttcgaaggagcagttttttgtagccaaagccatcgcaattgtagggcccagttcatcttttggagattaggaattccgaggccccctaaatcaagaggccgagagattttatcccaagctacaaggcaattacctcctctagcctcctttcttcctttccacaagaagttccgttgaattttatcaatggctttgataacccatttaggagcattaagagcaataaataagtaaactgggatggcagagaggacagatttgataagagtggttcttcccgcaagatttaaaagctcagccttccatcctggaagcttggcagcaattttatctatccagtgagcgagatccccagcactaagttttttgctgcttagagggagaccaagataggttgtgggaaaattttttgaggcacatcccaaggtctgaacagccagcgcagtcctctcattattgcactgaattgggtaggagaaacttttttgcaagttagtatgaagacctgaggcaacaccaaaacacctcaaaatttctctgaccaccactaagtccccagaaactggttttacaaacacagcaacatcatctgcaaacattgaaaccctttggctaatgtttctgccagcaagggggtgtaataaaccacactcatctgccctgatgaataggctattaagaacatccatgactaggatgaatagaaagggagataaaggatcaccttgtctcaacccacgcttgagatttataggctgtccaggcactccattgacaagaacttgagtggaagatgtccatagcaggttcaaaatcagattgcaccaaacctgtccaaaacctaagtgtcgaagaatttccagaagaaatgcccaatgcactgagtcaaaggcctttttaatgtccagcttcaagaaaattgcagggattttttttctggtgcaacatcttggtagtttaactaaccataataaagttatcatgaatacatctaccccgaatgaaggcactttgatttgtgctaaccattttatctagctcaggagctaacctgttagctagaattttagtgagaagtttcgcaaaactgtgaactaggctgattggtctaaaatcacccggaagaatagcctcaacatgctttggaatgagagtaatatatgctgaattcaacaaatcaagccttccagaagatccttgttggagaattaagactgcagccagtaggtcccatttgattatgtcccaacaacatttataaaaacgccctgtgtatccgtcaggtccaggggctttatcattaggaagacttaaaacagcagaattgatttcctccaaagaaatgggattatcaaaatgtgagagctccaaattgcctttgtgaaaattagcaaggttaagactaaaatttcgctcagacgctttaccaatcagatccttataaaactgaaacatagcctgctgtttagcctcttgagaagtaacaagattctcgtcgaccatcagtttatgaataaagttcttctttttcctgaacctggcgtgcgcatgaaagaaagccgtattggcatctccagatttgataaagttcactctagaccttaatctagcaatggttctttccaaagaagaaagatgaagacataataattttagttttttccgcaaccactcttcagccgtccacaaggatctgctgtcttgggcaatttccagaagatgtagggtcatcttggccaaagcaagttgagtagaaacattacccacagatttttggctccaggactgcaggtcctttgcaagtctcttaaatttaagggataatctctgcat

SEQ ID NO: 89762 - DNA, 1951 bp, Zea Mays
cctgtaatttatctcttaatgtgaaataaattacatgaagatcattataattatgatttcaagggaacaagataaataaacacaatcatagaaatttatagctgctatactccctttattactcttttccagttacaaatgataacaattgtaccttcggatgttgaaacaagagttcagaggtgaaagtgatgtacaacagctttggatgttgggcgatttcacaaatgatctaaaggctcaatgtgccctaatgcatggcactgtacctcaatttatagcggtgactcggtacacaacttcgtacaaaatcacaaacatgtccttagtactcatacaagattacatgattctctatgggtgttatcgtcatgtctccttgggacaacgatgcatgcgctggcgagctccttcatatttttttcgagtcgtctccttcacctagagaccacaaagccgaagctcctctatcttcactcgcattgtcgagaagaaggtctggaacggaggagattccccttattccttcgggatacctaaaatatacttagagacaagtaacaacttaacgttttgaggaccttcggcagaggaaggcccccaacaataggtatcttgcaatttagacaaaccatgcaactcaaatgtactccataaggggaagtggtgcaagccaattgactttgttgctttggttttattctttcattacggttcttttttataactcgtgaccgtccagttggaatatttaacaaatttaaaatttaggctttcttaaacttttggaactagctcaaaatagggaaagtaaccaggcccctaaaatatggcggtcttggagtttctaatttacaattcaaaagttgggctttacaggtgtaatggttatggctgcaaaaaacggatccgtctagaccatggcatggaatgaagcttcctattcagcagcaagtaagacggtttttcaatgtttcggtcttacatgtggtcggagatgggaccagcactctcttttggttcgataaatggttgaatgagaaggctatctttgatatttcaccagaggttgtctgtttggtggacaactggcattggattaggaatattgggagtcatctttctatggttgggctgcagcagtatttaaaattatgggatgtgattggacatgtgactctttcacaggaggcggacaggcttgtttggagacacacggcttctgggcagttctcctcaaagtcttgttacaatgccttcttcttggggtccatttcctttgagccttggaaacgattgtggaagacttgggctccccctaaatgcaagtttttcctttggttggctataaggaataaatgttggactgcagacagactccaaaggagagggttgcaatacctggtgtgttgccccctatgtgatcaggagcaggaaacagtccagcatatcctctgcacctgcagtttttctagggatttttggcatctcattttgtcgtccatcgggcttggtaacctcactcctattgttgttgaacagtcatttgttgtgtggtgggggaaggtttctaaaaaagtgcataggtgcaagaggaagggcttcaatagtgtcattattcttggagcttggtgcttatggctcactcgtaatagggttgtttttgatggagtgagcccttccattagttcgactaagaggttgtttctagatgaattgatcagttggaataaggcgggagcgaagcatttagacagtttggagattattgtcactttaaatagggtctagtagggcccgtcaggtcccccctttttttggtttcaccttgttggggtgcttgagaggatgcttgggggtttggtcttggtctgtttttttgttttttcttttctgccctctaggtgttgtatttcggtccactttggaccttttcctctcttaatataat

SEQ ID NO: 89763 - DNA, 975 bp, Zea Mays
atggtggtagggccggccctcggagcttgcgctctcgcgacggcggtagcccctgatctggggcgggggagggtggcagctccacgggcgactcgggagcatgaatattacgcaccgggtatccaagtgacaaaaccaacacaatgcattgaaaaaggtgtgcttgcctcgaaggtaataaacccaacgcttttgtctgttgttcccaaggatggcgtaattgcagaagcaaagagaaaggccaagccagatcttgacaagaatgtgatgactgctgcaagtagacacaaaacaatgccagaagttgtaaaaaatgagttcgctataaaggtgagagataatcagaacgatgagcttaacaaaaaggtaacaaaggtgaaagcaaaggcagtctataaggatctcctgaattcaaagacgagaacaaaggcaaagccagatgttgccagtgatgagttaatagcaaaggtgatcgatcatcataggagaggtgagctgcgtttactgacagtcagtgatctgaagtgcttcctcggtgcgaagaaagcaaaggttggaggaacgaaggaagtgctaatacaaagagtgactgagctcttgcttgacaaatgcattgctattagcaactgagaagtctgaacataacaagcatgtgatgatgtgaacctacgcaaagtaccctttttttgtgtttctacttgttgcaatttgaagagccgcaatcaacaatagccgaaacactggtgctagaacaaaatgacgacagcaacttgaattgtgtgtgtgtgtgtgtgtgtgtgtgtgtgtgtgtgtgtgtgtgtgtgtgtgtgtgtgtgtgttttgcgggaacacaactataatttttcacttggattttgatacgtcaataccagaaaggcttaaagcctaactgtaggtagtcatctaaaaggccatatcatatattgatacctaagattttaggtaatgtagagg

SEQ ID NO: 89764 - DNA, 934 bp, Zea Mays
gtagtgcaccaaggggactatcagttgccacaggcaactggcaactccctcttctcccaggcttcagcccaaccaccagccgccacgaaatcgagaccccagccaatcagtgtacttctggtttggagcaaattaatgaccacatgttcttatataagctcacttctgttctgttctgttgcgttattaaagggcacttgcatgcagcaatatggccacgtcgtccaagacgcaggaagctctggccttgatggccctcgccatgctcgtcaccaacgccgccgtcgctgcagacgatgcgtcgccgtcctgccccaggctcacccttcacaacctctgtccttacccggtctggccgctcgtcaccgctaacgccgggtacccctccgtcgccggcactgactcccggctcaacgggaacggcgagggcctggttaccatggcgctgccgcaaggcgcgtggtcgggccgtgtggtggcgcgcacggggtgcgctgacgatggcatgtcgtgcgatgacaactgctctccgcagtgcaagaccggcaacacgccgccggttacggtggcgcaggtgagcgtgggcgggtccggcgggctggcggagtacagcgtgagcctggtggatgggttcaacgtgcccatggtggtgacgccgtgcgacttcgcggcgggggcgcagtgcccgacgctggggtgcgccgtggacctcacccaggaccaggagtgctgccccgccgccggcgccggcgccagggcgcccgagggcggctgcggggcagcggggactgaagcggcactgttcaagaacaggtgcccggacacgaggacaacctccacagacgtggaggcaacgccgcagaactgcatcgcgcccggtgagctcaaggtcgtcttctgcccggcacgtgactgcccgcccagttgtaactag

SEQ ID NO: 89765 - DNA, 1341 bp, Zea Mays
acgactgacagtgaaaaaataggaaatgactcgtcaacgcaactaccccaagtcgccgctgagccactctctccgtccgcgaatccgtaaatggaaggggacgaaatgctcagggtgaagctcggcaggcagggccttgaggtgtccaagcttggcttcgggtgcatgggcctcactggagtgtacaacgcccctgttcctgaccaagctgggatcgacataatcaagcacgcgtttgaggccggcatcaccttcttcgacaccgctgatgcctatgggccacacaccaacgaggtcctgctcggaaaggcattgaaacattttcctcgtgagaaggtgcaaattgccaccaaatgtggcattgcaggatttgatgcaagtggcatgcgtgtgaagggcactccagattatgttcgagcttgttgtgaagcaagccttcagcgccttgctactgactacattgatatatactaccaacatcgcattgatcagtcagtgcctatagaggaaactatgggagagctcaagaagttggttgaagaagggaaagtgaggtatgttggcttatcagaggctagtgccgataccattcgacgggcacatgctgtccatccaattactgcggtgcagttggagtggtcactatggaccagagatatagaggaagatataattccagtctgcagggagcttggtattggaatagttccatatagcccacttggccgtggcttctttgctggcagggcagctgtagaacgtgttccatcagaaagtctattgtctaaacatccaagatattctggggaaaacttggagaagaataaagttctgtatacacgacttgaaatgttgtccaagaagtatgggtgcacacctgctcaactcgctctctcctgggttcttcatcaaggagaagatgtggtccccatccctggaacaacaaaagccaagaaccttgacgaaaatatcggtgctgtaaaggtaaggctgagcaaggaagacctcgaagaaatctcaggcgcattccctgctggtgaggtggctgggtctagactccttggagtcttggagcctttttcctggaggctcgcaaataccccgcctccaaaatagcgagttcagatgcaaattcttggccatcctaccatttaggtcatgttatgttagatcatatctacatgatgcaaatgattgttcctgtgctcgcgcgtgaaaatgcatgtacctgaaacaaagagatgtaacagttggttctctgtgtggaacgtgctgattgctatagttgatcaaagaaatacgttggaattaagctaaatgtccttcatggtgcactttgat

SEQ ID NO: 89766 - DNA, 1314 bp, Zea Mays
acgactgacagtgaaaaaataggaaatgactcgtcaacgcaactaccccaagtcgccgctgagccactctctccgtccgcgaatccgtaaatggaaggggacgaaatgctcagggtgaagctcggcaggcagggccttgaggtgtccaagcttggcttcgggtgcatgggcctcactggagtgtacaacgcccctgttcctgaccaagctgggatcgacataatcaagcacgcgtttgaggccggcatcaccttcttcgacaccgctgatgcctatgggccacacaccaacgaggtcctgctcggaaaggtgcaaattgccaccaaatgtggcattgcaggatttgatgcaagtggcatgcgtgtgaagggcactccagattatgttcgagcttgttgtgaagcaagccttcagcgccttgctactgactacattgatatatactaccaacatcgcattgatcagtcagtgcctatagaggaaactatgggagagctcaagaagttggttgaagaagggaaagtgaggtatgttggcttatcagaggctagtgccgataccattcgacgggcacatgctgtccatccaattactgcggtgcagttggagtggtcactatggaccagagatatagaggaagatataattccagtctgcagggagcttggtattggaatagttccatatagcccacttggccgtggcttctttgctggcagggcagctgtagaacgtgttccatcagaaagtctattgtctaaacatccaagatattctggggaaaacttggagaagaataaagttctgtatacacgacttgaaatgttgtccaagaagtatgggtgcacacctgctcaactcgctctctcctgggttcttcatcaaggagaagatgtggtccccatccctggaacaacaaaagccaagaaccttgacgaaaatatcggtgctgtaaaggtaaggctgagcaaggaagacctcgaagaaatctcaggcgcattccctgctggtgaggtggctgggtctagactccttggagtcttggagcctttttcctggaggctcgcaaataccccgcctccaaaatagcgagttcagatgcaaattcttggccatcctaccatttaggtcatgttatgttagatcatatctacatgatgcaaatgattgttcctgtgctcgcgcgtgaaaatgcatgtacctgaaacaaagagatgtaacagttggttctctgtgtggaacgtgctgattgctatagttgatcaaagaaatacgttggaattaagctaaatgtccttcatggtgcactttgat

SEQ ID NO: 89767 - DNA, 356 bp, Zea Mays
atatgtcccgaaaaacgaaaaactatgaggagaaggtgaagaacttcttctgtgagcacatgcacgctgacgaagagatccgctattgcttggagggcagcgggtactttgacgtccgtgacaaagatgacaagtggattcgaattcggataagggaaggagacatgatcatcctaccagcaggaatttatcatcggttcaccctcgacagcgctaaatacacgaagctcatgaggcttttcattggggaaccagtctggaccgcattaaaccgccctcaggaggaccaccccgcgaggcaagagtatgtcaagaatgtgagtgcgggcactggatttgctcttgcagcacactga

SEQ ID NO: 89768 - DNA, 334 bp, Zea Mays
acacggcagaaaaacgaaccgaggaacaatccgggttctgcaggaacccactccaactgtgcggcgcgtccaaaaatacaaaaggcaagcgagcgagcgaactcccagttcggctgctccaattccactcggcatggctcctcaggcgtgggtcgtggcggagaacggcgaggacctccaacaacccagggaattcctgccgctctctaagcttgaagatgttggcgtgttgtattggcatttggaccctaagaagtctgaaagcgaggaggaactagcaaaaatacgcagagacagaggatacagttacatggtttgcactaactagtctccc

SEQ ID NO: 89769 - DNA, 1572 bp, Zea Mays
cgtcaatcggccacgattcccagtcatcaccaattattactgcctttcgtccacaactactcatcaatccgatcgacatgaacctcgcgtccgcggtgcgagtgttcttgtcctactacctgctggtccaacggtggatggggtccgagcagggcggaggcgtgttcgatcaggggggccatagcgtcagcctcacccgcctcgacgaagcaagggcgccgccgaggtgcgccgtgcggtcgtccccgtccagcgcggccagcctgccgccgaagccgctgctcgtcgccgcgccgcgcgagactggggagtacccggtgatcctgttcctacacggctacctcgccgtcaactccttctactcccagctgttcgagcacgtcgcctcccatggctttatcgtcgtcggacctcagctgtacaccatatctggggccgacaccaccgaggagatcaactcagcggcggccgtcatcgactggctagccaccgggctgccgtcaactctgccactcggcgtccgcgcgaacctaaccaaggtgtccatctccggccacagtcgcggcgggaaggtggcgttcgcgctggcgttgggccacgccaaggccaagctcgctgtccctctcgccgccgtcgtcgccgtggacccggtggacggcatgggcgtgggcaagcagacaccgccgccgatcctcacgggcaggcacggctcgctgcacgtgggtgcccccgccatggtcatcggcacggggctcggcgagctgccccgcggctcactgctcccgccgtgcgcgccccggggcgtcagtcacgcggccttctacgacgagctggacggcgcggcgccagcgtgccacctggtggtcagggactacgggcacacggacatgatggacgacgacacgccgggcgccagggggatgctcacgcgcaccatctgcaggagcggcggggccagggcgcccatgcgccgcttcgtggccggcgccaccgtcgcgttcctcaagaaatgggtggctggggacgccgcggcgatggacagcatcacggcgcggccggaccaggcccccgtcgcgctgtccgtggtggagtttggagatgagaaagcgatagcttagctgctagagaatatgtgatatctgcaggcactagccactcaggcaggttggtgacgacgttgaaattgcagatgaaattaactagagtctagagatggcacatggcagattggcagtgagtttcgaaactagctaatttcctctctcttggcaaatcaaataaaaaaataaaaaagtacctattctataggatgaactgagtatgaaatggacattaccttgatgcgatgataaataaaaaaaaatagatggaatagacatgcatgctacgacaatacttgctttatcgtctctcggatcggacgaccgtgtcatcttttcattataatagcttgtttgggaggaaaggcatttaagggctggtttgcgaaaaaggaaattagaggtaatctatggttaggggtggtaatttattagggctttaaattatttttagtttaaaaataaataaaaa

SEQ ID NO: 89770 - DNA, 830 bp, Zea Mays
aactagcttgcgtcccgggcgcggtccctgcattgcgtcatcgtcgtccatcgttggcgagatggcggcggtggccatgagcccagatctggcgctgttcctgacggcgctgctgctgctagccctggcaggagcaaggccaggagcagcagcaacaaccgacagtagcaccatctgcgacacagccgagtgcggcaagggcacctgcagcgaggtgccggggatcctccccgtggtcatggcttcctacaagtgcacctgcgacccgggctggtcccagccgaagttgctcaacctaacggtcctgcccttcatgccctgcatcatacccgactgcaccttcgactcctcgtgctacaacttcagcctcttctcattgagaggaatacccctcacggacccctgcgtgatcatcgactgcggcctgggcgagtgcaggaagggccagggcttcagctacacctgtgagtgccagccgggatacgtcaacttcctcgaccaaacctacctcccctgcgtcaagaactgttccttcggctcggactgctcgaagcaggggatcgccccgccgccggcgccgccgccttccacagcgtctccacccgcacacggttctgtttcgtcgtggcgcctactgcagctgctgctcccgcacgccatcctcctcctcctcctcctctaggtcgtgtagctacatacgacacgcgagggcggccgatcgagcgcactgtacatgtacgattgatcttacgtgtacgtaaatacttgtactgtacgaccgcatccaattattaattcggcgacgttcaaaaaaaaaaggcatatgtgtg

SEQ ID NO: 89771 - DNA, 1646 bp, Zea Mays
ctggcctgggtgctgcctgcagtggtgatccgattccgaccgacgcaacgtcgctgcttccttcctcccttcccttccctttcctatccttcccttatcatcggtgctacgttaccagtatatagctctgtcgtgttgtcccatgtgagccggtggatgttcggaagcaagctttgtcgacagacagatggggaaggcggggcggtggctcaagagcatcttggcggggaggaagagcggcgtcagagacaaggcgctgcggcatcagcagcagcaaggcgacgccactccgctgccggccgcgagcagcccccgggagaagaggcgctggagcttcaggcggcccgcgacggcgcccacgaagcaggaggggaaggccaataacgcggcgccgtccccgttgtcgtcgctggagccgtcggcgcgggagctcgaccagagcgagcacgccgtggcagcggcggcggctgccaccgaggtggctcgtctgacggctgctgacgagagccatctgtcagtcagctgctgccccgtcgaggaggcggccgccgtcaggatccaggccaccttcagaggctatctggctcggaaggcgctgtgcgcgctgcgcggactagtgaagctgcaggcgctggtcaggggccagctggtgaggaggcaggccaacgccacgctccgccgcatgcaggccctcgtcgacgcgcagtcccgcctgcgcgcccagcgcgcgcgcatgctggacgcggaccacgccacgccgccagcggcctaccagcgccgctcaccgcaccatcccattccgatgcgccgcagctcctacgaggcgatggaccggtcgggggaggagcacgtgaaggtcgtggagatggacgccggcgacccggcgcgacgcgggcggagcagctgctcggcggcggccaccgagtccagggagcgccgcctcgccgagtactaccaccacggcggcggcgggcagtgctcgcccgcgccgttcctcttcgcccccgacctcagcccgcagcgcggcgacagcggccacctggaggacgtgttcgcgttcgaccccgcggcgacggcgcgcagcagcccgtacgtggccccctacgacgacgccgccgacgcctacggcgtcgtcccgagctacatggccaacaccgagtcgtcccgcgccaaggtccggtcccagagcgcgccgcgccagcgcaccgacgcggcgctggagcgccagcccagcaggcgccgcgcccagcagggcgcgcccaggaagatgcagcgctcgtcgtcgcacgtcggcgtgccggcggcggccgcgtacgggtacccggcgcagccgtgggcgggcgtcaggctggaccggtccagcgcgtcgctggtgggcagcgagtgcggctcgaccagctccgtgctcaccgcggccaccgtcggctactgccgctcgctcgtcggattcgaggtccaccggggccactactgaacagcaagttgatcaccattgcaatgttgtacttgtaccgatccatctattgcctgatgatggttcttgtgaaatattagctgtgtgctgttgttgttgttgttctcgtcaatatgtaaattccaaatgtcaactgcatgtgtcgtccttaatccaaatgcataatgattca

SEQ ID NO: 89772 - DNA, 2130 bp, Zea Mays
acagcgcctccataccatacccgtccccgccgcccggtgagatgccgaggcgcgagcgcgacctgccgcagcaggcctgacctcgcgtatctctcaggagtcaggactcctgaagatcagtttcgtgccttacctcgagagcgcctcctgaaggtcagtttcacttcgacccaccactgatcccccgcttctctgctccagttctagccacttgccggtttcgtgcactagagcccatgaacagattggcgtcgacgagattcacggccgcccttactcgaagcgtccttccccagtgccgccgcccaatcggccgcgccctgtgctccggcgcgccgcagaacggcgagatggaggccgcggtgcgagaggtcgtgtgcttcggttccggaagcctcgacgaggtggggagcaggctggaccgcctgggcgtggccgtctcgccgcacctgattgggcgcgtgatcgactcgtgcggcgagacgggcggaggctccggcaggaggctgctgcgctttttggcgtggtgccggtccaagcactccggggtgttaggggaggaggcgctcgacagggcgattggggtgcttgcacgggctggggaccttaccgcgatgagaatcgccattgctgatgctgagaaggacgggcggaggatggctcccgagacattttccaccgtgatcgacgcacttgtcaaggcaggcagggaggatgaggctgttcggctgtttagaggcttggagaggcagagattgctgcctgagtgcggcagcagggtaggaggccatggcgtatggtcgagcagccttgccatggtccatgcattgtgtaagagaggccatgctcgcgaggcacagggtgttgtgtggcaccataagagcgagctctcggcagaacccatggttagcatcgttgagcgtagcctcctccatggttggtgcgttcacgggaatgctaaggaggctcggaaagtcctcaatgaaatgaagtcttcaggcgttccgttgggcttgccatcattcaatgaatttctccattgcgtgtgccacagaaaccttaacttcaatccctctgcccttgtcccagaggctatggatatattaacagagatgaggacctgtggtgttcccccagctgcttctagtttcaacatattactttcatgtttaggccgagcaagaagagtgaaagaagcttatagaatcttgtacttgatgagagaaggaaaagcagggtgctcccctgattgggttagctactatcttgtggttagagtcctctatttaacaaggagaattcttagagggaagaggcttgtagatgctatgcttgaaagtggagttcttcctactgctaagtttttccatggtcttataggcatcctttgtggaacagaggaagttgaccatgctcttgatatgttcaaacttatgaagaggtgtgagttagtggatgctcgtatatatgacctgcttatagaaaagctttgtaggattggtagatttgaaattggaagagagctgtgggatgaagctacaaatagtggtcttgtattaggatgctcacaagatctgctcgatcccttgaagacagaggtattcagaccaatctgtccagcacaaagattaagccctcagaactataaacgcttggcctggaaaaagaaggttactgctgttggagtcaaaaaggacattgctatctcagcctcaaggaagaagtcgggagtgtaggaagctcgtgcatcacaaaagcaagaaggcttggtgttcctactcctgtactttatgctgtggatccacttctgcatactttgacagtatgtggatggcttgtctgtcaaggatatacttcttggttttggttcagatggggttaacgaggaacgcctggatgatattagtatcacacagataggaaacgtcgtcggcaaactacatgatggaggccttgttcatggtgatttagaactgtaacaattaattggtggtgggtacaatatcctttttgtcaacgccttctatttaatgtgtccactttattgtgctatgaagtcaagtttatgatttgtaacttatatatgttagtcttgacaggttcttattgatttcggtctgagttttatat

SEQ ID NO: 89773 - DNA, 2419 bp, Zea Mays
acagcgcctccataccatacccgtccccgccgcccggtgagatgccgaggcgcgagcgcgacctgccgcagcaggcctgacctcgcgtatctctcaggagtcaggactcctgaagatcagtttcgtgccttacctcgagagcgcctcctgaaggtcagtttcacttcgacccaccactgatcccccgcttctctgctccagttctagccacttgccggtttcgtgcactagagcccatgaacagattggcgtcgacgagattcacggccgcccttactcgaagcgtccttccccagtgccgccgcccaatcggccgcgccctgtgctccggcgcgccgcagaacggcgagatggaggccgcggtgcgagaggtcgtgtgcttcggttccggaagcctcgacgaggtggggagcaggctggaccgcctgggcgtggccgtctcgccgcacctgattgggcgcgtgatcgactcgtgcggcgagacgggcggaggctccggcaggaggctgctgcgctttttggcgtggtgccggtccaagcactccggggtgttaggggaggaggcgctcgacagggcgattggggtgcttgcacgggctggggaccttaccgcgatgagaatcgccattgctgatgctgagaaggacgggcggaggatggctcccgagacattttccaccgtgatcgacgcacttgtcaaggcaggcagggaggatgaggctgttcggctgtttagaggcttggagaggcagagattgctgcctgagtgcggcagcagggtaggaggccatggcgtatggtcgagcagccttgccatggtccatgcattgtgtaagagaggccatgctcgcgaggcacagggtgttgtgtggcaccataagagcgagctctcggcagaacccatggttagcatcgttgagcgtagcctcctccatggttggtgcgttcacgggaatgctaaggaggctcggaaagtcctcaatgaaatgaagtcttcaggcgttccgttgggcttgccatcattcaatgaatttctccattgcgtgtgccacagaaaccttaacttcaatccctctgcccttgtcccagaggctatggatatattaacagagatgaggacctgtggtgttcccccagctgcttctagtttcaacatattactttcatgtttaggccgagcaagaagagtgaaagaagcttatagaatcttgtacttgatgagagaaggaaaagcagggtgctcccctgattgggttagctactatcttgtggttagagtcctctatttaacaaggagaattcttagagggaagaggcttgtagatgctatgcttgaaagtggagttcttcctactgctaagtttttccatggtcttataggcatcctttgtggaacagaggaagttgaccatgctcttgatatgttcaaacttatgaagaggtgtgagttagtggatgctcgtatatatgacctgcttatagaaaagctttgtaggattggtagatttgaaattggaagagagctgtgggatgaagctacaaatagtggtcttgtattaggatgctcacaagatctgctcgatcccttgaagacagaggtattcagaccaatctgtccagcacaaagattaagccctcagaactataaacgcttggcctggaaaaagaaggttactgctgttggagtcaaaaaggacattgctatctcagcctcaaggaagaagtcgggagtgtaggaagctcgtgcatcacaaaagcaagaaggcttggtgttcctactcctgtactttatgctgtggatccacttctgcatactttgacagtatgtggatggcttgtctgtcaaggatatacttcttggttttggttcagatggggttaacgaggaacgcctggatgatattagtatcacacagataggaaacgtcgtcggcaaactacatgatggaggccttgttcatggtgatttagaactgtaacaattaattggtggttcttattgatttcggtctgagttttatataaataattcccgagggcgaggacaaagcggtggacctatatgtgctagagagagctttgatctccatgcattcgtcccgtggggatgtggtgaggagactgcataaattggcatccaagttgtcttttgctgattatatgcatacattgattcctttattcggtgactttattttggggaggccaatgacgtatacgggttacggttacataagcagccaacaatattggattcatcagtaattgaaatgtctggtcaatatttgggtttgcttgagcttggctgttattccgcacttgggtccgactaatctgtgccaatgttttctggctatatacaacacaaaactagtccatccgcatcgtggatttgttatttttttcctttcgtccgtgg

SEQ ID NO: 89774 - DNA, 836 bp, Zea Mays
acagcgcctccataccatacccgtccccgccgcccggtgagatgccgaggcgcgagcgcgacctgccgcagcaggcctgacctcgcgtatctctcaggagtcaggactcctgaagatcagtttcgtgccttacctcgagagcgcctcctgaaggaagctcgtgcatcacaaaagcaagaaggcttggtgttcctactcctgtactttatgctgtggatccacttctgcatactttgacagtatgtggatggcttgtctgtcaaggatatacttcttggttttggttcagatggggttaacgaggaacgcctggatgatattagtatcacacagataggaaacgtcgtcggcaaactacatgatggaggccttgttcatggtgatttagaactgtaacaattaattggtggttcttattgatttcggtctgagttttatataaataattcccgagggcgaggacaaagcggtggacctatatgtgctagagagagctttgatctccatgcattcgtcccgtggggatgtggtgaggagactgcataaattggcatccaagttgtcttttgctgattatatgcatacattgattcctttattcggtgactttattttggggaggccaatgacgtatacgggttacggttacataagcagccaacaatattggattcatcagtaattgaaatgtctggtcaatatttgggtttgcttgagcttggctgttattccgcacttgggtccgactaatctgtgccaatgttttctggctatatacaacacaaaactagtccatccgcatcgtggatttgttatttttttcctttcgtccgtgg

SEQ ID NO: 89775 - DNA, 2557 bp, Zea Mays
ccttgcttgcagccttgtccctgctcccctactcttttccatcacatcgcagtctctgtggacggaaagacaaacagtgccttgcttgtctctacctctcctggctcctaccttagcctcacctggcggtctggccctgcccatctctcactctcgctctcgctcttgctctcgcactgaggacaagatgcatactgtacaggtgaagaacaggaactgagcgatagccattggttggaggttggcctgccggtgccggcctgcatgactgctctccctgaccggctggccctgacgaaggggaacaatgagggatggcggcggcggcggcggcagcagcaagacgagcaagctgtcgtggtccaaaagcctcgtgaggaagtggttcaacatcaggggcaagtcccaggacttccatgccgatgctgcagcagttggaactgggagtgtgaggtcaggtcgaggggatggagattggatggatggcagcttcactaggagggactcctacggcgccaagaagagcagaacagagagggcgtcgcggaggagccacgagcggtcgcggcgcagcaagatcgacctcgatgccgccgaggccaccgtcatgctcgactacaggatctttgctgctacgtggaatgtaggtggccgcgcgccgccgggctcgctcagcctcgacgactggctccgcacctcgccgccggccgacatctacgtcctcgggttccaagaaatcgtcccgttgaacgccgggaacgtcctcggcgccgaggacaacggccccgcgaggaagtgggtgtcgctggtcaggcggacgctgaacagcctgccgggaagtagcggcagcgggagcctgcagacgccgtcgccggcgccgtacctggtggcggagatggacgcggacttcgagcggtcgacaacgcaaaacaacccgtccttcttccaccggcggtcgttccactctgggctcagccggagcatgcgggtggacggcgacctcctcgccggccctggccccggccccgccaggctcgagcgccggtacagcgtcaacgaccgcgtcatgtacggtagcaggcccagcgactacgaggccaactgccagtggggcgccggtcagttggtcgatgaggacgacggtggcggcggcgagtccccggtcacggtgttctctccgatgtcccacggatatggaaatgctcctccgcctatggaagaatgcaacgggtcagcccgtggccttgctaggtactgcctggttgcgagcaagcagatggttggactgttcctgatgatctgggctcggaaagagatgaagaacgacattaggaatctgaaggtgtcctgcgttgggaggggattaatgggctaccttggaaataagggctcaatctccatcagcatggctttgcaccaaacgagcttctgcttcgtctgcagccacctgacatctggtcagaaggacggcgacgagcaccgcaggaactccgatgttttggagatcctaaagaagaccagattccctagggtttgcggacagtacgagagatcgccggagaccatcctggagcacgatcggataatctggctcggggatctcaattaccggatcgcgctgtcctaccgatcggtgaaagcgctcgtggagatgcgtaactggaaagcgttgctggaaaaagaccagctaacgagggagcagagaggtgggcgcgtgtttcctggctggaacgaggggaggatctacttcccaccgacctataaatactccaacaactccgacaaatacgcgggagaagacatgaaccagaaggagaagaagcggactccagcatggtgcgaccgcatcttgtggtacgggagggggctcagccagctctcctacgtccgaggagagtcgcgcttctcggaccacagacctgtctacagcatgttcattgccgaggtggagtcgatcaaccacagccagatccagaagatgagttcttggagctcccagctggacatagaggaactgctgccgtactcgtatgggtacacggagatcgatcactatgggtacacagacctcaatttctactgagaaacgggcagaggaactcgcatgctgctgagctctaatagatgcctctagttactgcgacttggaaaaggtgtttgccagcatgcatgcagttgaggacagagctcgacgataccggcgcactgcgttttcgaagtctaatggctcttagcagcttgttatatagacagcagcacttagtttgggttcaggaaagcaaatctggaacttcagcgttgcagttttctgaatgttcagattggctatcagagactttacatatgcccagcagtcaatgtacaaaacccggccgcatctgcggtgacatgagatgagccactggatgctctcttttgcaggtgtccatccagtgttagccagcagcatagagatttaggaatagttggaaggtagtgagtggatgctttatttgaatggctcttcaagggaaacagagaaacaaaaatcacatgacaaatgtcaattttgggattt

SEQ ID NO: 89776 - DNA, 2630 bp, Zea Mays
ccttgcttgcagccttgtccctgctcccctactcttttccatcacatcgcagtctctgtggacggaaagacaaacagtgccttgcttgtctctacctctcctggctcctaccttagcctcacctggcggtctggccctgcccatctctcactctcgctctcgctcttgctctcgcactgaggacaagatgcatactgtacaggtgaagaacaggaactgagcgatagccattggttggaggttggcctgccggtgccggcctgcatgactgctctccctgaccggctggccctgacgaaggggaacaatgagggatggcggcggcggcggcggcagcagcaagacgagcaagctgtcgtggtccaaaagcctcgtgaggaagtggttcaacatcaggggcaagtcccaggacttccatgccgatgctgcagcagttggaactgggagtgtgaggtcaggtcgaggggatggagattggatggatggcagcttcactaggagggactcctacggcgccaagaagagcagaacaggtgggctcctgattaatttcgacatttgcccgatccttcacccctgattcgcattgtccaatgcttcacccagagagggcgtcgcggaggagccacgagcggtcgcggcgcagcaagatcgacctcgatgccgccgaggccaccgtcatgctcgactacaggatctttgctgctacgtggaatgtaggtggccgcgcgccgccgggctcgctcagcctcgacgactggctccgcacctcgccgccggccgacatctacgtcctcgggttccaagaaatcgtcccgttgaacgccgggaacgtcctcggcgccgaggacaacggccccgcgaggaagtgggtgtcgctggtcaggcggacgctgaacagcctgccgggaagtagcggcagcgggagcctgcagacgccgtcgccggcgccgtacctggtggcggagatggacgcggacttcgagcggtcgacaacgcaaaacaacccgtccttcttccaccggcggtcgttccactctgggctcagccggagcatgcgggtggacggcgacctcctcgccggccctggccccggccccgccaggctcgagcgccggtacagcgtcaacgaccgcgtcatgtacggtagcaggcccagcgactacgaggccaactgccagtggggcgccggtcagttggtcgatgaggacgacggtggcggcggcgagtccccggtcacggtgttctctccgatgtcccacggatatggaaatgctcctccgcctatggaagaatgcaacgggtcagcccgtggccttgctaggtactgcctggttgcgagcaagcagatggttggactgttcctgatgatctgggctcggaaagagatgaagaacgacattaggaatctgaaggtgtcctgcgttgggaggggattaatgggctaccttggaaataagggctcaatctccatcagcatggctttgcaccaaacgagcttctgcttcgtctgcagccacctgacatctggtcagaaggacggcgacgagcaccgcaggaactccgatgttttggagatcctaaagaagaccagattccctagggtttgcggacagtacgagagatcgccggagaccatcctggagcacgatcggataatctggctcggggatctcaattaccggatcgcgctgtcctaccgatcggtgaaagcgctcgtggagatgcgtaactggaaagcgttgctggaaaaagaccagctaacgagggagcagagaggtgggcgcgtgtttcctggctggaacgaggggaggatctacttcccaccgacctataaatactccaacaactccgacaaatacgcgggagaagacatgaaccagaaggagaagaagcggactccagcatggtgcgaccgcatcttgtggtacgggagggggctcagccagctctcctacgtccgaggagagtcgcgcttctcggaccacagacctgtctacagcatgttcattgccgaggtggagtcgatcaaccacagccagatccagaagatgagttcttggagctcccagctggacatagaggaactgctgccgtactcgtatgggtacacggagatcgatcactatgggtacacagacctcaatttctactgagaaacgggcagaggaactcgcatgctgctgagctctaatagatgcctctagttactgcgacttggaaaaggtgtttgccagcatgcatgcagttgaggacagagctcgacgataccggcgcactgcgttttcgaagtctaatggctcttagcagcttgttatatagacagcagcacttagtttgggttcaggaaagcaaatctggaacttcagcgttgcagttttctgaatgttcagattggctatcagagactttacatatgcccagcagtcaatgtacaaaacccggccgcatctgcggtgacatgagatgagccactggatgctctcttttgcaggtgtccatccagtgttagccagcagcatagagatttaggaatagttggaaggtagtgagtggatgctttatttgaatggctcttcaagggaaacagagaaacaaaaatcacatgacaaatgtcaattttgggattt

SEQ ID NO: 89777 - DNA, 1496 bp, Zea Mays
atgagggatggcggcggcggcggcggcagcagcaagacgagcaagctgtcgtggtccaaaagcctcgtgaggaagtggttcaacatcaggggcaagtcccaggacttccatgccgatgctgcagcagttggaactgggagtgtgaggtcaggtcgaggggatggagattggatggatggcagcttcactaggagggactcctacggcgccaagaagagcagaacagagagggcgtcgcggaggagccacgagcggtcgcggcgcagcaagatcgacctcgatgccgccgaggccaccgtcatgctcgactacaggatctttgctgctacgtggaatgtaggtggccgcgcgccgccgggctcgctcagcctcgacgactggctccgcacctcgccgccggccgacatctacgtcctcgggttccaagaaatcgtcccgttgaacgccgggaacgtcctcggcgccgaggacaacggccccgcgaggaagtgggtgtcgctggtcaggcggacgctgaacagcctgccgggaagtagcggcagcgggagcctgcagacgccgtcgccggcgccgtacctggtggcggagatggacgcggacttcgagcggtcgacaacgcaaaacaacccgtccttcttccaccggcggtcgttccactctgggctcagccggagcatgcgggtggacggcgacctcctcgccggccctggccccggccccgccaggctcgagcgccggtacagcgtcaacgaccgcgtcatgtacggtagcaggcccagcgactacgaggccaactgccagtggggcgccggtcagttggtcgatgaggacgacggtggcggcggcgagtccccggtcacggtgttctctccgatgtcccacggatatggaaatgctcctccgcctatggaagaatgcaacgggtcagcccgtggccttgctaggtactgcctggttgcgagcaagcagatggttggactgttcctgatgatctgggctcggaaagagatgaagaacgacattaggaatctgaaggtgtcctgcgttgggaggggattaatgggctaccttggaaataagggctcaatctccatcagcatggctttgcaccaaacgagcttctgcttcgtctgcagccacctgacatctggtcagaaggacggcgacgagcaccgcaggaactccgatgttttggagatcctaaagaagaccagattccctagggtttgcggacagtacgagagatcgccggagaccatcctggagcacgatcggataatctggctcggggatctcaattaccggatcgcgctgtcctaccgatcggtgaaagcgctcgtggagatgcgtaactggaaagcgttgctggaaaaagaccaggtgagcgagggctcagctatactactacttgtacttggtagagacacgatgtacttccatgcaaatgttctgattgttacgacgactaatataacatgaaaaaggtagcaaaattc

SEQ ID NO: 89778 - DNA, 2264 bp, Zea Mays
ctactgttcctccttcctgttgtcatcttctcctcatcctggtgttagtcaagctgtcaaaggcctcgacttttcagcacctgttttctgttcttttgcattgtccaggcattgttaaaatattattagtttttcaaattgattgaatatttgttcttgatgcaggtcgaggggatggagattggatggatggcagcttcactaggagggactcctacggcgccaagaagagcagaacagagagggcgtcgcggaggagccacgagcggtcgcggcgcagcaagatcgacctcgatgccgccgaggccaccgtcatgctcgactacaggatctttgctgctacgtggaatgtaggtggccgcgcgccgccgggctcgctcagcctcgacgactggctccgcacctcgccgccggccgacatctacgtcctcgggttccaagaaatcgtcccgttgaacgccgggaacgtcctcggcgccgaggacaacggccccgcgaggaagtgggtgtcgctggtcaggcggacgctgaacagcctgccgggaagtagcggcagcgggagcctgcagacgccgtcgccggcgccgtacctggtggcggagatggacgcggacttcgagcggtcgacaacgcaaaacaacccgtccttcttccaccggcggtcgttccactctgggctcagccggagcatgcgggtggacggcgacctcctcgccggccctggccccggccccgccaggctcgagcgccggtacagcgtcaacgaccgcgtcatgtacggtagcaggcccagcgactacgaggccaactgccagtggggcgccggtcagttggtcgatgaggacgacggtggcggcggcgagtccccggtcacggtgttctctccgatgtcccacggatatggaaatgctcctccgcctatggaagaatgcaacgggtcagcccgtggccttgctaggtactgcctggttgcgagcaagcagatggttggactgttcctgatgatctgggctcggaaagagatgaagaacgacattaggaatctgaaggtgtcctgcgttgggaggggattaatgggctaccttggaaataagggctcaatctccatcagcatggctttgcaccaaacgagcttctgcttcgtctgcagccacctgacatctggtcagaaggacggcgacgagcaccgcaggaactccgatgttttggagatcctaaagaagaccagattccctagggtttgcggacagtacgagagatcgccggagaccatcctggagcacgatcggataatctggctcggggatctcaattaccggatcgcgctgtcctaccgatcggtgaaagcgctcgtggagatgcgtaactggaaagcgttgctggaaaaagaccagctaacgagggagcagagaggtgggcgcgtgtttcctggctggaacgaggggaggatctacttcccaccgacctataaatactccaacaactccgacaaatacgcgggagaagacatgaaccagaaggagaagaagcggactccagcatggtgcgaccgcatcttgtggtacgggagggggctcagccagctctcctacgtccgaggagagtcgcgcttctcggaccacagacctgtctacagcatgttcattgccgaggtggagtcgatcaaccacagccagatccagaagatgagttcttggagctcccagctggacatagaggaactgctgccgtactcgtatgggtacacggagatcgatcactatgggtacacagacctcaatttctactgagaaacgggcagaggaactcgcatgctgctgagctctaatagatgcctctagttactgcgacttggaaaaggtgtttgccagcatgcatgcagttgaggacagagctcgacgataccggcgcactgcgttttcgaagtctaatggctcttagcagcttgttatatagacagcagcacttagtttgggttcaggaaagcaaatctggaacttcagcgttgcagttttctgaatgttcagattggctatcagagactttacatatgcccagcagtcaatgtacaaaacccggccgcatctgcggtgacatgagatgagccactggatgctctcttttgcaggtgtccatccagtgttagccagcagcatagagatttaggaatagttggaaggtagtgagtggatgctttatttgaatggctcttcaagggaaacagagaaacaaaaatcacatgacaaatgtcaattttgggattt

SEQ ID NO: 89779 - DNA, 464 bp, Zea Mays
tgttgtgccagcctaccaccccactcactgccagggagagagaggaagaacaagagcaccgcgagcagctcggtctgggcggctgggctgcggcatcgccgtcgcggtcgatctgccgtcttgcaagcatcccgatggaggtggagtcggccaagtgcgagtgctgcggcctgcgcgaggactgcacccgggagtacatcgccgccgtcaaggcgggcttcggcggccgctggctctgcgggctgtgcacggaggccgtgcgcgacgaggtggccgccaagaagcggggcgacctggagggcgccctcagggaccacatgtccttctgcgccaagttcggcaagaagggccccgcgttccgcgttgccgacggcatgcgccagatgctgcgcaggcgatccagcgacatctccgcatccgccgccgccgccgctgcctcctcctccgcagccgcctcatgacga

SEQ ID NO: 89780 - DNA, 220 bp, Zea Mays
catgcatttacatgacacgcacgagctgagtcttgactgcagcgatcgaacgggttttagcacacacgagctgagctgagcaaacgcgtcaacgcagtagtgactactgcaatgtctacagcgatcgaacgggttttagcacacacgagctgagctgagcaaacgcgtcaacgcagtagtgactactgcaatgtctagctactcatcaagggtcttatct

SEQ ID NO: 89781 - DNA, 2685 bp, Zea Mays
aacctaatgtcttctcgaaatgaagctccatcttctgtggctggtgagtacgacccgaagagcgatcctacccggaagccacggaagtctactgatccagggtggaagtatggattttggccggatcttcaaaataaagataaggtggaatgcaccctatgtggtcaggttgttagtggaggaataaagaggttaaagcaacatttggcaggggcatatggagatgcaaagttatgtcccaaggctagcagtgcattaaggaaggagatgacaagttatttggaggcaaacaagagaaaaagaccaatgtttctagatgaagatgaagaagatgatgaagtggtggaggtggcagcagcagatggggcaaatgatacatctgctgtggagtctcaagcatccaaggtgcagcccagttctgatacagcagccaaaaaaagacaatcaaccttgcaatttaaggcaaatagtaaagcacagccaaagacaaccaagtccgtagttgagatgttgcggagaacaccagaggaggtggtggatgagagactttcaggctcttatcagcccacaatcttggctagtgcaaaaagcaaggaggcaaacactatgtggacatgcagtgggctttgttcttctatgagtgcggtgtacctttcaatgccgcggcagctaggcaatttcagattgcaattgaggccacagcacagtttggttcagggtataagcctccaacaccgtaccaactaggcgagccattgctacaagaggctgtgaagtcaacaactacaatgagggaggaacatgagcgtgcatggaaacactatggttgcacactcatgtctgatggatggtctgataggaggggacgccatctcattaacttcttagtgaacagcccagagggcacttactttttagagtccgttgatgcatctagtgaagtacatgatgcatacatgcttgctgatttgcttgagaaaaaagttgatgagattgggagagacaaggttgtacaagttgttactgataatggtgccaattacaaagctgcaggcaagcttctaatggataggattcctacattattttggagtccatgtgctgcacattgcttggacctaatgttggaggacataggaaacttgaaggaattcaagaaaccaattgcacgtgcaaggcgtgtgacaactttcatataccgacatgggagaattcttgctgccatgagagagaaaactggtggggctgatcttgtgaggcctgccgccactcgttttgctacttcctttctcacattgaagagcttgtacaagcacaaggatgctttgaaggctttatttgcaagcacagcttggactgataacaggttgtcaaagacaagtgctggattggatgtgtataacattgtcttctccacacagttttggaattcagtagaagattgccttagagcttcagggccactacttattgtacttagggtggtagatggagatgagaggccagctatgccagaggtccaagcattgatgaaatgtgcaaaggaaaagatcaatcaaagctttgctgtccaaagcaagaagaatttactcaagaaaatcataactataattgaacgacgttgggagaaacagatggatcacccattgtatgggtctgcaatgtatttgaacccaggaaagctgcatcctctcataagaaatgatgatgatgctactgttggtcagctaagaggttgctttcttgatgtgcttgcaagaatggtagatgatgaggaaactagagacaagatcaattctcaagcaatggattacgagtttcttagaggagcagctttttcaaataagatggccaaagataacctacaaactatgaccccacttgagtggtggcgttcgtatggtggtcgtgctattgagttacagagatttgctagacgtttggtgagtctttgtgcgtcttcatcaggttgtgaacgcaattggagtacctttgaatttatccatacaaagaaaagaaatcgattgttacataagaggttgaattctattgtcttcatttcctacaacagaaagatgaaggctaggttccaaaaactacgccagaagaaggggaaaaactttgatccattggttcatgaggacttcaactgggacaatgagtgggctgattctttgcatgtagtccctgaaggtgggcgtgggtgtgagtgtgaccttacatgggaccttgtggataatgccattggagcatcacaagcacttcgtggccgaaacttaccaagaagggcccataatgtgtattcaagaagaaattctgttgctgcacaaaatatgtcagaggctgaagaggaagatgaagatgaagaagatgttccacatgatgatgcagaaatcacagattgtgaagatgaatctaatggtggcaatgatggtgaagaaggggaggcacccaatatcccaggagagtttgatgatgatttttgagcgacgggagagtagctattgctagattgcattagcatatttgctgcattactaactgcagctagttactattaattatgccattacaaactatttatgtggctatttcagatttggtattgtgctgttttaaattttgtgacgtgctattgttcctttagaaactactttgtggctatttcagatccactattgtgct

SEQ ID NO: 89782 - DNA, 1621 bp, Zea Mays
caaaataaaacccgtttagagctccggtcggagatgctcttacgtttttccgttctcgttctccttttccccggtggtcccttggctatatctggcgtacgcatggcgtgaacgcatgcagccggccggcgggcgggcgggcgggcggctcacgagtgaaggtaaccatgtcgatgtcctcgcccacggtccaggtttcgtcttcatcgtcctccatcatcgccaccaccgctgtcggctcgcacgtgctcaagatcgacggctactcgcgcaccaagggcctcgccaccggcatccacctcaagtcctgctcgttccgcgtcggcggccactcctggcacctcgcttacctccccaacggcgactgcgcgcagacggccgactacatctcgctctacctcgttctcgaggacgcacccgccaaccgcacccccgcgctcgcgcagctcagcgtcggccttctcgaccgtgccggcaagccggtgccgtccctcaccaagaccctccccgtgaaccggttcaacgcccccggctcgtactggggcttcaacaccttcatccggagggaagcgctggagaagtcgaggcacctcaaggacgactccttctgcgtccgctgcgacgtctgcgtcgtcacccagttccgcgccgaggacgccgccgccagagccgcggccgcctccgtcgcgttcgtccgcgttccgccgccggacctgtcgcagaacttgggcgaactcctgcggagcgagctgggcgccgacgtgcgcttccgggtggacggggaggagttcgcggcgcatcgctgcgtgctcgcggtgaggtcgcccgtgttccaggcccagctgttcggcgccatgaaggaggcgtctctttccgccagggaggtgcagatagatgagatgagggcggacgtgttcaggaacctgctgcacttcatctacaccgacgcgctgcccaagtccgagccccaggaagaagaggcccttatggctcagcacctgctcgtcgccgccgacaggtatggcatggagaggctcaaactcgtctgcgaggacatcttgtgcaggcacatcgacgtcagtaccgcggccaccacgctggcccttgctgagcagcaccaatgccaggggctcaaggaagcatgctttcagttcctcaagaagtctcctgggtcgctgaatgatgtcatggcaactgatggatttgaccatctggccaacagctgcccgtccattataaaggagttgatgtctagacttgctgctgcccattattccaactgaaacaagacatgtccaactccaacatgacctagatggagtttcagcaaccatgacaaatgcaggtactacctgttgctgttgttactgttagtcacaaaattgaatgtgtgccgcgccggatcgatatgcaacgtttgtgtaatccagcggtgactgctattagcattgtatcttgttcattttcttgcctgcttggctgttgtatccaatccatgacaaaggtaagtacgttgatctggtgaccatacattagcctggaagaagtgccttgtagacatttgtccaatttcatgatgattgaagcaactgcaatataatactagctacaacttcgtatt

SEQ ID NO: 89783 - DNA, 1652 bp, Zea Mays
ggcgtgaacgcatgcagccggccggcgggcgggcgggcgggcggctcacgagtgaaggtgagagaccctctccctccctccgcggcacacatcgcagggccacccttactatttcaattttagggtagggaaacccttgattcacccccaaaccctcgctccttaacaaatccatccgccaccgtcggccaggtaaccatgtcgatgtcctcgcccacggtccaggtttcgtcttcatcgtcctccatcatcgccaccaccgctgtcggctcgcacgtgctcaagatcgacggctactcgcgcaccaagggcctcgccaccggcatccacctcaagtcctgctcgttccgcgtcggcggccactcctggcacctcgcttacctccccaacggcgactgcgcgcagacggccgactacatctcgctctacctcgttctcgaggacgcacccgccaaccgcacccccgcgctcgcgcagctcagcgtcggccttctcgaccgtgccggcaagccggtgccgtccctcaccaagaccctccccgtgaaccggttcaacgcccccggctcgtactggggcttcaacaccttcatccggagggaagcgctggagaagtcgaggcacctcaaggacgactccttctgcgtccgctgcgacgtctgcgtcgtcacccagttccgcgccgaggacgccgccgccagagccgcggccgcctccgtcgcgttcgtccgcgttccgccgccggacctgtcgcagaacttgggcgaactcctgcggagcgagctgggcgccgacgtgcgcttccgggtggacggggaggagttcgcggcgcatcgctgcgtgctcgcggtgaggtcgcccgtgttccaggcccagctgttcggcgccatgaaggaggcgtctctttccgccagggaggtgcagatagatgagatgagggcggacgtgttcaggaacctgctgcacttcatctacaccgacgcgctgcccaagtccgagccccaggaagaagaggcccttatggctcagcacctgctcgtcgccgccgacaggtatggcatggagaggctcaaactcgtctgcgaggacatcttgtgcaggcacatcgacgtcagtaccgcggccaccacgctggcccttgctgagcagcaccaatgccaggggctcaaggaagcatgctttcagttcctcaagaagtctcctgggtcgctgaatgatgtcatggcaactgatggatttgaccatctggccaacagctgcccgtccattataaaggagttgatgtctagacttgctgctgcccattattccaactgaaacaagacatgtccaactccaacatgacctagatggagtttcagcaaccatgacaaatgcaggtactacctgttgctgttgttactgttagtcacaaaattgaatgtgtgccgcgccggatcgatatgcaacgtttgtgtaatccagcggtgactgctattagcattgtatcttgttcattttcttgcctgcttggctgttgtatccaatccatgacaaaggtaagtacgttgatctggtgaccatacattagcctggaagaagtgccttgtagacatttgtccaatttcatgatgattgaagcaactgcaatataatactagctacaacttcgtatt

SEQ ID NO: 89784 - DNA, 109 bp, Zea Mays
tttttcttttgtttttatttgattttagtctatttctatcttttacctatttctattcaaatttagatatagtttttgaatcgaaaattcaaatatacttcttgagttt

SEQ ID NO: 89785 - DNA, 1219 bp, Zea Mays
ggccggggtacagtacaggatgcgggggttgacacgcgctgcgaaacgcgcaggggagatggcgttcaacgccggtggtggcgccgtcaactggttcccgggccacatggccgcggcctcccgcgccatccgcgatcgtctcaagctcgccgacctcgtcatcgaggtccgcgacgcccgcattccattatcctcagcaaatgaagaccttcaaccagtgctctcagcaaagaggcgaattcttgctctaaacaagaaggatctagcaaaccccaacataatgaataggtggctgaatcattttgaatcatgcaagcaggattgtatctcaataaatgcacatagctccagttctgttaaccagcttcttggttttgctgagctgaaactaaaggaagcaatctcaaaggagccaacccttctgattatgcttgttggtgtccctaatgttggcaagtctgcactcataaattctattcatagaattgctacttctcgatttccagcgaaagataaaaataaacgggctacagtggggccactgccaggtgttacacaagatattgcagggtataagattgcaactcagcccagtatttatgtgcttgatacacctggtgttcttgtgccaagcataccagatatggagacagggttaaagcttgctttaacaggagctgttaaagactcggtagttggggaagaacgtatagcaaaatatttattatctctttttaacattaaaaagacacctctacactgggagcggttgttgcacagaaaagaagagtggtgtgaagagatatgcagcagtaataaaaaagacaattcattacggaggactcggttgaataactctgatgccgtatatgttcaggatttagtgacggaggtgcagagggcactatgccgtacgttcctgaacttcactggcaacatcgaggaagaaagtgagctggaaaccctcatagacatgcagcttgtggagctccgcaaggtgttcaggataccccataagcctttcgatgaaacgcagggccctacctccaagaagctcctaactctcttcagatcaggaagcttgggccgttcatcctcgacgaccttcctgatggatctgagaaataacctgtttacttgattctttttattttgcactcggcagctgatgttctatgatggaaggcattggtacgagctgatgttcttgcagggagga

SEQ ID NO: 89786 - DNA, 1715 bp, Zea Mays
gctaaattcattcgcagccacaaacaaaccctaaacccctaaaccgccgccgccgccgccgccgccgccatggccaaaaagaaatctgccaccgtcaatggcaacggtaaccacgccgccgcagaggaagtgccgccggcgaaggccgcggaggaccggaaggcagagcagctgaaggcgctgaacaccatgctcctcaaggaggcgacggagcggcgcggtcaggtggcggcgctcacagcgcgccttgacgagctctccgccgacgacgtcgcgctgtccgccgccgagcgcgtggtggcgcaggccgccctcgccgcgccactccgcgcggccgccgacgaggtcgccgcgctccgtgcctgcctcgccgccgtccagggttcgctccgggacgcagaggcgcgggcggctctggaggagagcgccaggggcgaggccgacgcgcggctcgaggaggctgccgcggagagcacgcggtcgatgaagctgctccgggagaaggaagcggaggtggcggccgtgtccagcaaggttgcccgattggaggcccttgtggcggagctagagggcaagaactctgaattttttggtgagaagggtgagctggcggagaaattgggggaggccaaggaggcggttcggattgtgtcgagtgaaaaggcggaggtggagaggagcctgcaggacttcaggaaggcggctgaggcttatcgggtggacatggagggaaaattgaaggcaaagttggatgaattgaaggtgttgggtgccgagaaggcggagattgaggccagagtagagtcattggaggcgaagctggtggctgcaatggttgacaagagggaactgcaggctgaggtggcggcaaagaagaaggagtctggtttggtgaagggagaaaatgataagcttcagtctgaggttgtggctgctgagaagaagcacaactttgctgtcgcagaggttaaaagtctcaggatggaattggccacgttgctggctgagaatgaggctgctgctaaggcatttgatgctgagaaggctagacttttgggcgagttggagagcctgaagaggaagttggaggaaatccaggcagacaaggaagtagctgaggtaacaacccgtgagaaggatgctcaggccattaagttgagggccaaattggaggagctccacagttccatgtcccaacttcaagcttcctgcaatgatcttgatatgaagtgttcacgcctgcatgatgagaagaattcagttctgaaggctctggacactcagaaggctgaagcagtaaagctgaggtcaaaaattgaggagctcgagaagtgcagtgggaagaaagatgatgacattgggaagttgaatgcagcattggaggaaaagaaggggaagatcaataacctgagcaaggatatcgagctactgcaactcacagtggctgaggcggagaaaagaaggaagggtggcatctggacatggttgtatgctgctaccacaacagtggtggctgccatctccttcatttatgcctccaggtctcattgaaggactgcacatttcatttttaatgttctgcattccatttgcaccttaagtccgtaaaacttgaaatgatcatgttgccatcctgttgttgctacttaatgaatcagctggttatgaaatgaagtttaacctttgcttacatcatggtagtgtttgttgtgctg

SEQ ID NO: 89787 - DNA, 239 bp, Zea Mays
gatccatacaattgtgaaccgttattcgaatttggtagcaaactattaggttgcttcactacatggcacacaacattctgcacagtcgcaaacttactttcctgatagtgttctggatgttcacgttcgacagattctgcatgaaaaatactaacgtgtcatgtgctccgccgcttgaatgatgatgagggtgctgttgggggccttcgtcttccgaaggtcctcaaaaacatgattta

SEQ ID NO: 89788 - DNA, 1134 bp, Zea Mays
aggatcctttcgcagccgcatctccaactccaaccattgcaagcagcagtacaaaaaaaggaaagctaccagcaatatgtgcacctcaaagtcaaagctcattgcagccgttcttctcgcagcagctgccctccccctccatgccccaacgaccatggcagcaaactccaacctcttccgcgactacatcggcgccatcttcaacggtgtccagttcagcgacgtgccgatcaaccccgatgtcgagttcgactacatcctcgccttcgtcatcgactactccaccgaaaccgatcctccttccccgacgaatgggcagttcagcatcttctggcaggactcggtgctgacgccctccgcggtggccgccatcaagcagagcaacccgaacgtgcgggtggccgtcagcctcggcggcgccaccgtgaacaacagcccggtgttcttcaacgtcacctccatcgactcctgggtccagaacgccgtgtcctccctgaccaccatcatccagcagtacaacctggacggcatcgacatcgactacgagcagttccaggaggacccggccaccttcgccgagtgcatcggccgcctggtgaccacgctcaagagcaacggggtgatcaagttcgcctccgtcgcgccgttcgccgacgccgacgtgcagagccattaccaggcgctgtggtcgagctacgggattagcgtggtagactacatcaacttccagttctacgcgtacgacgcgagcacaaccgcggagcagtacgtgaactacttcgacgagcagatggcgaactaccccggcggcaacatcctggccagcttcaccacggcgccaacgacgacctcggtgccagttgacacggcgctcagcgcctgccagaccctgcagtcgcagggaaagctctacggcatcttcgtctgggctgcggattactccaaggaccaagggttcaagtacgaaacacaggcacaggcactgttggccaacagtacgtagtacatagcttggaccttattagcttgcttcgactagttacagcaataccaataatactacagtgttatatggaacaaaaatgttgtagcaagaatataatggagaataaaataaatctcttgtcagcagct

SEQ ID NO: 89789 - DNA, 1152 bp, Zea Mays
tccacctccaccaatccaaccaaccattggccattgcagagaagagattactttaagaatgggctactcgaagcgcattgcactggtacttgtagcggctgttgtagcgctccacgtccatgtcccgatggccacagcagcgaactccaacctcttccgggactacatcggcgccatcttcaacggcgtcaagttcaccgacgtccccatcaacccgagggtccgcttcgactacatcctcgccttcgtgatcgactacaccaccgcgacggagccgcccaccccgaccaacggccagttcaacatcttctggcaggactcggtgctgacggcgtccgcggtggccgccatcaagcagagcaacccgaacgtgcgggtggccgtcagcatcggcggcgccaccgtgaacgaccgccctgtgttcttcaacatcacctccgtcgactcctgggtccagaacgccgtctcctccctgaccaccatcatccagaagtacaacctggacggcatcgacatcgactacgagcagttccaggccgacccggccaccttcgccgagtgcatcggccgcctggtcaccacgctcaagagcaacggggtgatcagcttcgcgtccatcgccccgttcgacaacgccgacgtgcagcgccattaccaggccctgtgggcgacctacggaagcgtcatagactacgtcaacttccagttctacgcctacggcgccagcacgaccgaggcgcagtacgtcgacttcttcaaccagcagcttgtcaactaccccggcggcaacatcctggccagcttcaccacggcgcccaccaccacgtcggtgcccatcaacacgtcgctcagcgcttgccagacattgcagtcgcagggcaagctctacgggatcttcatctgggcagccgaccattccaggagccaaggcttcaagtacgacacacaagcacaagcactgctcgccaacgcccctgctggctactagtagatggctaccataccttcaatgcgtttaagttggatttggatttcattttcaggtgaacaaataatattattatgtatggaataaggctgtcattggaatataatacggggctatttctatattcctgtgttctctataaaaattaaacaattcttataaga

SEQ ID NO: 89790 - DNA, 3546 bp, Zea Mays
gcgtggatgcagaagtggtcgaaggcgagcttgaagtccggcaggtaggcgcgcactctggcgcggaagacgcggttgaggacgacggtggccaggaagcggagctgctcggacatgggcaggacgagcgggcccagcgtggtgatgttggtgcgcagggcctcgccggcgaccaccatgagctccttggccagggagacgccgacgcaccccgcgtcgtcctcctcctgcgtgacgcagccgaagctctggtcgtgcgcgccgcggtgcgtgcgcaccgtgtggatgagctggtacttggcgcggcggcggtcggcgcggcggttggacagcaggatggccgcgccgccgacgcggaagagcgtgttggtgaccagcatggggcggttgttgcccatgtaggcgttgagagtgatgttctccgtgctcaccaccagcgcgtacgtgtccgagtgcacctgcatgtcgtcgtcgtcgtccggaaacatagcatcaacatgtattactataatcgtccgaaaaaacaagacatgcatgtagtactactacgtgattagtatgaaggtcaggtcccagcacgtacgcacagtagcaatacacgcaagcttgtccaccagaaccgcacatatgactcttgtcagactaccattgaccgcggtaaaccttgtgtagtacgggagagctgggacctggactggagagcagcaaccaggcagtgcatgggtcgctgcgacgaccatgggtgtgggtgcctctgggtggatgtgggaacagacagagtgacagacgattataatagtattacgagtggtgatgtttggttgacatatttgtaacattaaattatatctgtttaagtccaatcttaattagataccgcactaaaaactgataatatcctaattcaaacttattaccactggtaataattaccgttgtcatttatattacatttcgtgaaccaaacggcaccagataccataagattatgcatgacccaaaaccaaatacaaaacctaagaactatctagtctagttaataataagattttagaatgaaatctttaaaatgagctatcaaccgaaacaaagcccataactctagagggagagggaagcaatggccacatgctgcactttcaggccctgtttgggaaaagtttttgaaaaccatagtttttgaaatattacagtatactttagttatgacaataccgtagtttacaataccacaattttggaaactgaggtccagacctaagtttagaataccttaaaacaactatagtattgcaatacttcagttttgaaaacagagattttagacagcttgccaaacaccattctgtatataatactgcagtatttgagaatactgcagtattctttcaaaactttgaaaaaacttcactcacaaacaccccctcattttccacatttgacatcacatgcatggttccgttttgaccagaggccagcagacttcctatcacattttttttattccactttatatttcaaacttctctctaaatttatattatagtaacttctctgtaaatttacagtgcatctacacagcgcagaacaacgaaccaagcgcgcagttactataattactagctcattttctactagtatatatgttatcaaatgcatgtatgcatggtctctgtaggtgatgtgcagccatgctggagtaataaggatcaggaccggacctgcaccggcacatggctgtaaaagctccctgtgtgtgctctccgttacaaacacacataaacatgggtcgatccacaaataggtattttcagttcttaactttcacgtttctgcgaagcatgtttttttttaaaaaaaaacctccacacatttgaccacctgccgttaattagaacgatcatattttttttgctgtatggagtgcgtagtgccatgttttcatgacaaattcacacttatatatactgatctctccaatttattgtgattgtcttgataaaaaggacagtggccagagtcatttacatatacttatttaaataaacaggaattattgaaactagttaccaaaaaggcagggtcaacaactatgcatgcatgcatgcaagggcaacacggacggaagggacctacgctctcacgcatatatatgatcgtagtcagctaccctatttaattatgggttcagaagaagtaaaggacccgacagcgatccatcggcatcaaatgccgaaacactatttgcattgcaagagatgccttgctgtgcagcagtatatatgtccaacggtcacgtacgccaatgcaatcaacaacgtagctatatgtatgtgttcaattatattattcttggcgcatggaaatagaataaaccatgcatgtgcacgcacataaattatctgcaaaaaccagcctggaagcagaatattggtactacgtacgtacgtggtgaaatcactgtgcctgagtgtctcatgcactgcctaagaaagattgacgtataaaccatgtacctgtagcaggcgcttggcgaggtcgatggcgatgatgccggcgctgcatcccattccgctgaggttgtggctgacgacgtcgcgccgcatcccgtagcggttggcgatgagcgacgtgaaggacggcgtggggctgagcaggctggagttgaagatgagcacgccgacgtcgccgcccgccacgcgcgccctgcggaggaggtcgtccacgacgccgaagatgacggcgtgggactcctcccgcgccgtgcggaggcacatgtccacgggcacgctgatcagcgacgccgggaagtgggtctgctccccgagccccgaccgctccagcatccgcttctggaacgccatgctctcgtcgctgaaccgcccgcaccgcccgaagtgggcgatcgtcttggcgcgggacgcctcgtgcgacgcgcccgccacgtacccggacaggtccaccaggtacacgggccggggccgggacaccgcgtacgcccacgccgccaccgcagccgcccagcaggccaccgccaccgccgccgggctctgctgcagccccagcttctcgaggccgcccggaaggttccacgacagccgcggggccaccaggaagacgacgacgccaacgaggacgagctggatgacgcggcggcggctcatcaccgccatctgcttcgttcttgccctgcgagccgctccctactatatatatggcgatcgatatgatctagctcgatggtcgatggaggaatagcgcggagaccggatttataggagggaggaggggttaatgttaatggcaagcagcagctggtaggtgatgggccggtgacggtgagggagatcgggggcagtgccaagttgccagcgcaataactgctcgtagccatgaacagtagagcatgcatgcattgcatttgcagcgccacaccatgaccatggaaccttgcgcccccatgccatgtgttgcagttgcagttgcaaggagggagagatgagtaggtgtagatggcagcagtgaattcattgtccagtgcgaaag

SEQ ID NO: 89791 - DNA, 381 bp, Zea Mays
gtccctccctctataaataaataaataaacttttttaggagacgaagcacaccgcaggacaggagaagcttgggtctcctatcctccccacccctctctcggtctcttccccaccgcgtcttcgtcgtctcgtcttcctgcctccttcgcccgagaaaggagaggtaagcccgccgagatctccttttcttgcgtgcttcatcacgccaggctcgtcccggtgactggctggttttggctctgggttgtcggctccggcctccgggtccgggcacagagcgcgccgcgcaatggcgccgtgcggatgtctttcggttgactgagtccatgcatgcaggttttgtgcctggaattgctaggattttttaggattttccatag

SEQ ID NO: 89792 - DNA, 1546 bp, Zea Mays
gtccctccctctataaataaataaataaacttttttaggagacgaagcacaccgcaggacaggagaagcttgggtctcctatcctccccacccctctctcggtctcttccccaccgcgtcttcgtcgtctcgtcttcctgcctccttcgcccgagaaaggagagaatggggagcagcgagaagaccgttaccgcttacggcgagtacacctacgctgagctggagagggagccctactggccgagtgagaagctgaggatttcgattactggggctggtggtttcattggatcccacattgctcgccgtctgaagaacgagggccattacatcattgcctctgactggaagaagaacgagcacatgaccgaggacatgttctgccatgagttccacctcgttgatctcagggtcatggacaactgtctcaaggtcacccatggtgtcgaccatgtcttcaatcttgctgcagatatgggtggcatggggttcatccagtcaaatcactctgtgatcatgtacaacaacaccatgatcagttttaacatgctggaggctgcacgtatcaatggtgtgaagaggttcttctatgcctcgagtgcatgcatttaccctgagttcaagcagcttgacacaaatgtgagcttgaaggaatctgatgcctggcctgctgagcctcaagatgcctatggcttggagaagcttgcaaccgaggagctgtgcaagcactacaccaaggactttggcatcgagtgccgcgtcggccgcttccacaacatctacggccctttcggaacatggaaaggtggccgcgagaaggcaccggctgccttctgcagaaaggctcagacatccacggagaggtttgagatgtggggcgatggtctccagaccaggtccttcaccttcatcgacgagtgcgtggagggtgttctgagattgaccaagtcagacttccgcgagccagtgaacatcggaagcgatgagatggtgagcatgaacgagatggctgagatcgtgctgggctttgaggataggaagctgcccatccaccacatccctggcccggaaggggtccgcgggcgcaactctgacaacacccttatcaaggagaagcttggctgggccccgacgatgaagctcaaggatgggctgcggttcacctacttctggatcaaagagcagatcgagaaggagaagacgcagggggtcgacatcgcggcgtacgggtcgtccaaggtggtgtccacccaggcgcccgtgcagctgggctccctccgcgccgccgacggcaaggagggcctctaaagcgacgacccagggctgtctggcgtaccatggcgggatatactgtttgcggtagaatatcacagtagcagcaaaactagtacttttggaggttcagacatgacggtcgccttcttttctattttcccattcatcgctccatttatttatgatgccatgcaactcgttgaatttttgctgtactccctttatttggtcttggccggccggcaataaaattctccctgtttctactaca

SEQ ID NO: 89793 - DNA, 97 bp, Zea Mays
ttctttcatatttcaaatccaactttaggcaagagtggtaaactcaaatatgcacagaacagaaatccagaaggatgcaaatcatgtattcattttt

SEQ ID NO: 89794 - DNA, 1374 bp, Zea Mays
cccccactccggcattcccccccaaaaaatcgagccgaaaaagatcaaaagaaaaaaaaaagaagaaaaaaaccctaaccactccgatcgaatcatccgagggccgcagcagcccggcgaggctatgtctcaggcaaccgccgcctcccgggatcgcttcccctggtgatacaactcgggccgttcatttcgtctttccgtagggatatgagggccgctccaaccgatccgcccacggcgccggcgaagtcgatgctgaggcggctgttcgatcgccagctcctgcggatctcaccagcggagcgtctaccatcggcgggggcgggagagaaggatgaggcggagccgagctccgtgtgcctggacggcatggtgcgcagcttcatggaggacgacgtcggcagcgagaaggctgcccacgggggccggtactgtaactgcttccacggaggcgataattcagatgacgaggaggacgacgaagcggcggcggcggcctccgacgtcgccgagacgatcaagggcctcgtccactgcgccacgcttcgggagcgcaacctcctcgccgacgtgtgcgcgcacctggagcggcatcgcgaggcgggggcgcggcggcgcgacctcctccgcctggtagcctcgtcgctgcgcggcgcggggcacgacgcctccgtctgcgtctcccgctgggacaagtccccgtcccacccggtcggcgagcacgcttacatcgacgtgctcctcccggcggcctcggaccgcggcgcgcgcgagcgcgtcctggtggacgtggacttccggtcggcgttcgaggtcgcgcgacccaccaaggcgtaccgcgccctgctgcagcggctgccggcggtgttcgtgggcaaggacgacaggctccgcctcctcgttgccgccgccgccgacgccgcgcgcgccagcctcaagaagcgcggcctccacctcccgccctggcgtaagcccgagtacatgcgcgccaagtggctctccccctaccaccgcgaggcgccggtggccgaagaggcggcctccgcctccgcggacgaggacgacggggacggacccggacccggaaccggaaccggaaccgcggcgtgacaactggacacttgcaatttttgtcttggaagaggttgtagctgcaaaagcttgagattctcttgaaattgaactcttttttcgggggttgtacctagagtaactatggactacgacgtgtgtgtgagagagaggtatgcatcacagcatcactcatcactgtgctgagtaccgcgcgagaaatgaaggcgaggggtatgatgggtagtgctagttttaggaagagaaataaagcaaaatatcggattaatatccacttttggt

SEQ ID NO: 89795 - DNA, 2681 bp, Zea Mays
atgaagctcctctcgccggcggccgcaccgtcgtcctcgccgttgttccctcctcgcatcgtcgaagctgcagctcgtcaatcaggtccatgccgtatccgcatccgtatccgtggcaaagcagcagcagcaggaggaggaggaggcgcgggcgcgacggggccccgcggcagcctcaggctcgccgggtggtggagagcgcagcagcaggccccggccacggcgacgacaacgcagcagcctgacaacgtctccagtgctaaagtgttccagaccagccgtgtggaaaccgagtccgaaattgcgaaatggccagggaaaccacaagaccttgaggatgagcaccaggctgaggaggcagagctgcagccacttatcgaccaggtgagggcgatgctacggtcgatgaacgacggggataccagcgcctcggcgtacgacacggcgtgggtggcgatggtgccgaaggtgggcggcgacggcggcgcccagccccagttcccggccaccgtgcgctggatcgtggaccaccagctgcccgacggctcctggggcgactcggccctgttctccgcctacgaccgcatgatcaacaccctcgcctgcgtcgtcgcgctgaccaagtggtcgctggagcccgcgaggtgcgaggcggggctctcgttcctgcacgagaacatgtggaggctagcggaggaggaggcggagtcgatgcccatcggcttcgagatcgccttcccttctctcatccagacggctagggacctgggcgtcgtcgacttcccgtacggacacccggcgctgcagagcatatacgccaacagggaagtcaagctgaagcggatcccaagggacatgatgcacagggtcccgacgtccatcctgcacagccttgaagggatgcctgacctggactggccgaggcttctgaacctccagtcctgcgacggctccttcttgttctctccttcggctaccgcttacgcgctgatgcaaaccggtgacaagaagtgcttcgaatacatcgacaggattgtcaaaaaattcaacgggggagtccccaatgtttatccggtcgatcttttcgagcacatctgggttgtggatcggttggagcgactcgggatctcccgctacttccaacgagagattgagcagtgcatggactatgtgaacaggcactggactgaagatgggatttgctgggctaggaaatccaatgtgaaggatgtggatgacacagctatggctttccgactactaaggctacatggatacaatgtctctccaagtgtgtttaagaactttgagaaagatggagagttcttttgttttgtgggccaatcgactcaagccgtcactgggatgtataacctcaacagagcctctcagataagttttcaaggagaggatgtattgcatcgtgctagggttttctcgtatgagtttctgagacagagagaagaacaaggcatgatccgtgataaatggatcgttgccaaggatctacctggcgaggtgcaatatacactagacttcccttggtatgcaagcttgcctcgtgtagaggcaagaacctatctagatcaatatggtggtaaagatgacgtttggattggaaagacactctacaggatgcctcttgtgaataacgacacatatctagagttggcaataagggatttcaaccattgccaagctctgcatcagcttgagtgtaatgggctgcaaacgtggtacaaggataattgccttgacgcttttggagtagaaccacaagatgttttaagatcttactttttagctgctgcttgcatttttgaacctagccgtgctgctgagcggcttgcatgggctagaacgtcaatgattgccaatgccatttctacacatcttcgtgacatttcggaagacaagaagagattggaatgtttcgtgcactgtctctatgaagaaaacgatgtatcatggcttaaacgaaatcctaatgatgttattcttgagagggcacttcgaagattaattaacttattagcacaagaagcattgccaattcatgaaggacaaagattcatacacagtctattgagtcttgcagtaagttatccccacttgtacttaattagattataacgacttcttctcaacaatcattctaatatgtttgtctatacttctagtggaccgaatggatgttgcaaaaggcaaataaagaagaaaacaaatatcacaaatgcagtggtatagaaccacaatacatggttcatgataggcaaacatacttacttttagttcaggttattgagatttgtgctggacgaattggtgaggctgtgtcaatgataaacaacaaggataatgattggtttattcaactcacatgtgctacttgtgacagtcttaaccataggatgttactgtcccaggtaaaccttgtatcataattaaattatttttactctttatgtatagctagatacatgtgtggtctaatgattgttccattagggggtaataataattttaggatcaaaccatcacatatataactatttttagcaccttaattctccaccaaagactagaatttgctcctagatccttacaacctcaagttttggattaggtcattgtgtaggtttctttgtctttccttggcttagtgaattcaaaacattaag

SEQ ID NO: 89796 - DNA, 2802 bp, Zea Mays
atgaagctcctctcgccggcggccgcaccgtcgtcctcgccgttgttccctcctcgcatcgtcgaagctgcagctcgtcaatcaggtccatgccgtatccgcatccgtatccgtggcaaagcagcagcagcaggaggaggaggaggcgcgggcgcgacggggccccgcggcagcctcaggctcgccgggtggtggagagcgcagcagcaggccccggccacggcgacgacaacgcagcagcctgacaacgtctccagtgctaaagtgttccagaccagccgtgtggaaaccgagtccgaaattgcgaaatggccagggaaaccacaagaccttgaggatgagcaccaggctgaggaggcagagctgcagccacttatcgaccaggtgagggcgatgctacggtcgatgaacgacggggataccagcgcctcggcgtacgacacggcgtgggtggcgatggtgccgaaggtgggcggcgacggcggcgcccagccccagttcccggccaccgtgcgctggatcgtggaccaccagctgcccgacggctcctggggcgactcggccctgttctccgcctacgaccgcatgatcaacaccctcgcctgcgtcgtcgcgctgaccaagtggtcgctggagcccgcgaggtgcgaggcggggctctcgttcctgcacgagaacatgtggaggctagcggaggaggaggcggagtcgatgcccatcggcttcgagatcgccttcccttctctcatccagacggctagggacctgggcgtcgtcgacttcccgtacggacacccggcgctgcagagcatatacgccaacagggaagtcaagctgaagcggatcccaagggacatgatgcacagggtcccgacgtccatcctgcacagccttgaagggatgcctgacctggactggccgaggcttctgaacctccagtcctgcgacggctccttcttgttctctccttcggctaccgcttacgcgctgatgcaaaccggtgacaagaagtgcttcgaatacatcgacaggattgtcaaaaaattcaacgggggagtccccaatgtttatccggtcgatcttttcgagcacatctgggttgtggatcggttggagcgactcgggatctcccgctacttccaacgagagattgagcagtgcatggactatgtgaacaggcactggactgaagatgggatttgctgggctaggaaatccaatgtgaaggatgtggatgacacagctatggctttccgactactaaggctacatggatacaatgtctctccaagtgtgtttaagaactttgagaaagatggagagttcttttgttttgtgggccaatcgactcaagccgtcactgggatgtataacctcaacagagcctctcagataagttttcaaggagaggatgtattgcatcgtgctagggttttctcgtatgagtttctgagacagagagaagaacaaggcatgatccgtgataaatggatcgttgccaaggatctacctggcgaggtgcaatatacactagacttcccttggtatgcaagcttgcctcgtgtagaggcaagaacctatctagatcaatatggtggtaaagatgacgtttggattggaaagacactctacaggatgcctcttgtgaataacgacacatatctagagttggcaataagggatttcaaccattgccaagctctgcatcagcttgagtgtaatgggctgcaaacgtggtacaaggataattgccttgacgcttttggagtagaaccacaagatgttttaagatcttactttttagctgctgcttgcatttttgaacctagccgtgctgctgagcggcttgcatgggctagaacgtcaatgattgccaatgccatttctacacatcttcgtgacatttcggaagacaagaagagattggaatgtttcgtgcactgtctctatgaagaaaacgatgtatcatggcttaaacgaaatcctaatgatgttattcttgagagggcacttcgaagattaattaacttattagcacaagaagcattgccaattcatgaaggacaaagattcatacacagtctattgagtcttgcatggaccgaatggatgttgcaaaaggcaaataaagaagaaaacaaatatcacaaatgcagtggtatagaaccacaatacatggttcatgataggcaaacatacttacttttagttcaggttattgagatttgtgctggacgaattggtgaggctgtgtcaatgataaacaacaaggataatgattggtttattcaactcacatgtgctacttgtgacagtcttaaccataggatgttactgtcccaggatactatgaagaatgaagcaagaataaattggattgagaaggaaatcgagttgaatatgcaagagcttgctcaatctctccttttgagatgtgatgagaaaactagcaataagaagaccaagaaaaccttatgggatgtcctaagaagtttatactatgctactcattccccacaacatatgatcgatagacatgtttccagagttatctttgagcctgtttaaaaatgtttaagtggtagaccattatgttaggtgtaaatgtgtacataaaagttatcataaggagtaatggtagcagaagcatgcagttgtaagtttatttgttgcttagaatagaaattagtgtagctataatatcaagaatgttcctatataagtaatcatattatggatagaggtgttcatatgaataataattttatatgttaagtgttatcttacctaattttagtagca

SEQ ID NO: 89797 - DNA, 2763 bp, Zea Mays
agttcctcaccgctgcttttgcttttctgctttcacttgcctgcagctgcagctcgtcaatcaggtccatgccgtatccgcatccgtatccgtggcaaagcagcagcagcaggaggaggaggaggcgcgggcgcgacggggccccgcggcagcctcaggctcgccgggtggtggagagcgcagcagcaggccccggccacggcgacgacaacgcagcagcctgacaacgtctccagtgctaaagtgttccagaccagccgtgtggaaaccgagtccgaaattgcgaaatggccagggaaaccacaagaccttgaggatgagcaccaggctgaggaggcagagctgcagccacttatcgaccaggtgagggcgatgctacggtcgatgaacgacggggataccagcgcctcggcgtacgacacggcgtgggtggcgatggtgccgaaggtgggcggcgacggcggcgcccagccccagttcccggccaccgtgcgctggatcgtggaccaccagctgcccgacggctcctggggcgactcggccctgttctccgcctacgaccgcatgatcaacaccctcgcctgcgtcgtcgcgctgaccaagtggtcgctggagcccgcgaggtgcgaggcggggctctcgttcctgcacgagaacatgtggaggctagcggaggaggaggcggagtcgatgcccatcggcttcgagatcgccttcccttctctcatccagacggctagggacctgggcgtcgtcgacttcccgtacggacacccggcgctgcagagcatatacgccaacagggaagtcaagctgaagcggatcccaagggacatgatgcacagggtcccgacgtccatcctgcacagccttgaagggatgcctgacctggactggccgaggcttctgaacctccagtcctgcgacggctccttcttgttctctccttcggctaccgcttacgcgctgatgcaaaccggtgacaagaagtgcttcgaatacatcgacaggattgtcaaaaaattcaacgggggagtccccaatgtttatccggtcgatcttttcgagcacatctgggttgtggatcggttggagcgactcgggatctcccgctacttccaacgagagattgagcagtgcatggactatgtgaacaggcactggactgaagatgggatttgctgggctaggaaatccaatgtgaaggatgtggatgacacagctatggctttccgactactaaggctacatggatacaatgtctctccaagtgtgtttaagaactttgagaaagatggagagttcttttgttttgtgggccaatcgactcaagccgtcactgggatgtataacctcaacagagcctctcagataagttttcaaggagaggatgtattgcatcgtgctagggttttctcgtatgagtttctgagacagagagaagaacaaggcatgatccgtgataaatggatcgttgccaaggatctacctggcgaggtgcaatatacactagacttcccttggtatgcaagcttgcctcgtgtagaggcaagaacctatctagatcaatatggtggtaaagatgacgtttggattggaaagacactctacaggatgcctcttgtgaataacgacacatatctagagttggcaataagggatttcaaccattgccaagctctgcatcagcttgagtgtaatgggctgcaaacgtggtacaaggataattgccttgacgcttttggagtagaaccacaagatgttttaagatcttactttttagctgctgcttgcatttttgaacctagccgtgctgctgagcggcttgcatgggctagaacgtcaatgattgccaatgccatttctacacatcttcgtgacatttcggaagacaagaagagattggaatgtttcgtgcactgtctctatgaagaaaacgatgtatcatggcttaaacgaaatcctaatgatgttattcttgagagggcacttcgaagattaattaacttattagcacaagaagcattgccaattcatgaaggacaaagattcatacacagtctattgagtcttgcatggaccgaatggatgttgcaaaaggcaaataaagaagaaaacaaatatcacaaatgcagtggtatagaaccacaatacatggttcatgataggcaaacatacttacttttagttcaggttattgagatttgtgctggacgaattggtgaggctgtgtcaatgataaacaacaaggataatgattggtttattcaactcacatgtgctacttgtgacagtcttaaccataggatgttactgtcccaggatactatgaagaatgaagcaagaataaattggattgagaaggaaatcgagttgaatatgcaagagcttgctcaatctctccttttgagatgtgatgagaaaactagcaataagaagaccaagaaaaccttatgggatgtcctaagaagtttatactatgctactcattccccacaacatatgatcgatagacatgtttccagagttatctttgagcctgtttaaaaatgtttaagtggtagaccattatgttaggtgtaaatgtgtacataaaagttatcataaggagtaatggtagcagaagcatgcagttgtaagtttatttgttgcttagaatagaaattagtgtagctataatatcaagaatgttcctatataagtaatcatattatggatagaggtgttcatatgaataataattttatatgttaagtgttatct

SEQ ID NO: 89798 - DNA, 838 bp, Zea Mays
tgggttccatgttggctgaaggtgctgcatttcgtactaaatagggtgctcatcccgaaactttttgtgaaaacaagaacatagctattttcacacaagagccaaaaccagagttggagttgttgacacaaaagtctaactaaaggcgggcaaacatgcatacctggtattccgcggtgtgttggtcttgcatatattcaattttcctattaagttcacaatgtttacattttattatttactaggtaggtgctcgtgtatggttaccgtttctatatatcatataggtagaccttgattaaatgtgtcaatgataaacaacaaggataatgattggtttattcaactcacatgtgctacttgtgacagtcttaaccataggatgttactgtcccaggatactatgaagaatgaagcaagaataaattggattgagaaggaaatcgagttgaatatgcaagagcttgctcaatctctccttttgagatgtgatgagaaaactagcaataagaagaccaagaaaaccttatgggatgtcctaagaagtttatactatgctactcattccccacaacatatgatcgatagacatgtttccagagttatctttgagcctgtttaaaaatgtttaagtggtagaccattatgttaggtgtaaatgtgtacataaaagttatcataaggagtaatggtagcagaagcatgcagttgtaagtttatttgttgcttagaatagaaattagtgtagctataatatcaagaatgttcctatataagtaatcatattatggatagaggtgttcatatgaataataattttatatgttaagtgttatct

SEQ ID NO: 89799 - DNA, 646 bp, Zea Mays
tacatgcaaatggaataccaaatgtttcttaagaaaagtatagatactatctttctaggcacttgtagcaatcatagactctactttgttttatgaccattaatttataataagttaaatttgtgattgtacatataatcacacattccataaaatttatttatttttacatgccaacatgttgaactaatgacaccatgtgcaggatactatgaagaatgaagcaagaataaattggattgagaaggaaatcgagttgaatatgcaagagcttgctcaatctctccttttgagatgtgatgagaaaactagcaataagaagaccaagaaaaccttatgggatgtcctaagaagtttatactatgctactcattccccacaacatatgatcgatagacatgtttccagagttatctttgagcctgtttaaaaatgtttaagtggtagaccattatgttaggtgtaaatgtgtacataaaagttatcataaggagtaatggtagcagaagcatgcagttgtaagtttatttgttgcttagaatagaaattagtgtagctataatatcaagaatgttcctatataagtaatcatattatggatagaggtgttcatatgaataataattttatatgttaagtgttatct

SEQ ID NO: 89800 - DNA, 462 bp, Zea Mays
atggcgttggtttgggctttgatgccttcattgcatgcaaacaatgaagatgtggttgacgctgatgagcttaagggcgcattgtctgatgagaacctgcagttgcaagaggttgcatcggtacactttgttgctatgtcgcacaaggttttgacgccgatgcatgcaagggcacctatgaccaagaagaagattgcgacagcagagcggagcatcttcacagcacactgcaaccctaggttatcagtcatcgtttgtcttgataagtgccattgcaggcagcacaaagtccatagggtgaagaacccaactgcacagcagactgatacgaagtccccagagaagagcattgctacgaagatgacggtgatcatatccatgtatgcagacgtgtatgtcagaaggcacaggaaggatctgcagctcctgttcttcttcgtctgcggtataaattggcgatga

SEQ ID NO: 89801 - DNA, 248 bp, Zea Mays
tttcttttttttcttatcctcaaccaccatttttggatcggagaaggtcatgcgtggggaatgttaatatgtagtacctatttcgctaccatgccattgtgtcaaagcggaactatcaagcgtcgcaccaaagaatgaaccttcgtaggatcctaacacttgtctgcctacgtgaacgaagtttctctaaattaaagctactaaattaatatttgtattttactataacacaacaaagatatattatt

SEQ ID NO: 89802 - DNA, 231 bp, Zea Mays
atggaaggcgtgcgtcatgggggagaggatggaaggggaatgaagagtgctgattggggacgtggattcacgggcaactcttatggaaggcgagaccggcgtggtagcgaggaaggaaggtggatctcggtgcagggcgcgaggttggtttccattgatggactgtcgtcacaaccaaccttgattccactaatccagtcgaggatggaagaaaacacgtcgagtgggtaa

SEQ ID NO: 89803 - DNA, 1719 bp, Zea Mays
atgcgcgaagccgcgaacgagggagagctgctggtggccctcgtcatcggcagtgaccattcgctccgtcagcgtgctccatctctgatccctaattcctcctttaggtttcgcattcagtgcaagcacagtcacttcccgatcagattccagcagtgccaacataacttgctagatctgagtgctttgctgcgttccttcgtgttcaagggcaggaagaagatcgtcaagcggggttccttcaacaccttctacgaatatggtatcgagcttgttctcggaacgaaggtgatttccgtcgatgtgcgccggaaaacactggatacttccaccggggaaaccatcagctatgaaacgcttattgttgcgacgggtgctcgggccgtgaagctggaagagatcggagggaacggcggctcagatgccgagaacgtctgttatctgcgcgacatcgcggacgcggataagttagtctgtgtgatgagatcatgtcctgctggcgccgacgccgtggtcgtcgtcggcggatacataggaatggaatgcgcagccgctctggttgccaacaggatgaaagtcattgtcgtcttccccggaaaacacttgagtgacggcagcaatcctgcgagacggcaggcgcctacctgcggacatgccaaggagtaccgcgccacgctcgagttctactgggcgcccttcctcgtcgagtccaactctgacaaccccaacttccacagtaccaaggaacagatcgtcaatcccgagcggatcgagacgcacgccaagcactggaaggatgttgactacctcatcttcaacacctacatctggtggatgaacaatgtcgacatcaaagtcaggagacccaattcgaggaactggtctgacaatgatgaggttctcaggattgaggtgtatggccgtgtgttcaagacatggtctgattggctcaatgacaacatcgatcctgcccgaacgtccatcttcttcatgacgatttctcctcctcacctcagctattgtaagccccgagattttgggctactaagcaggcaatgtcattttcgcttagcctcttgtgctgctggtgggggattaagaactgttgcagaatgtgttaagatagcgattggttattcggacttgctggaagctcgtggtctatcactttcgtcagttctgatgaagcaattcagaccctctgttgagcaagcattagattccaatttgaggagaattgaagagagtactgctgctttagctgcagctgatgactggatactcacctatcctccaacgggtatacgtccactggctagatcatctggtaatctggcactccagccgaagctctcaagcagtgctcaccgtttcaattcaatggttcaggatttctttgaggatgttggaccactggttagcttacagctaggtggttccgcgatggatgggcttctgaaaatattcaactcgtatgtaaacttgctcataatggaaactggttgttatttatttaaccttgtctcccttgcttatgtggtctataatgcatcaaacaatgagcttgtgaggactcagactcttgtgaagagcgccattgtacaagttgatgctgcaccattcaagcagtggtacctcactcactatggagtggacatcggtaggaagaagaagataactattgccaactgcggtggtaaagcaaacgggcatatgtga

SEQ ID NO: 89804 - DNA, 1180 bp, Zea Mays
ggtgcgtgcctacggcgcgtggcatcgtgtgacttgggcaactgacactcctccccgcgacgccgcgccgcctgcccggctgccatccgaatcccatgtcgtcgctgctcctcctccaggccctggctccagccatgaccgtcccccgccaccatttcctcatctcccctctccgcctcgcctctgcagccacagttccgttcgctcgacgcttctccaacgccgcttccagcaacaagccggagccactcctctcggaaccggatctggagtcaggtctgtatcttgtgtcaacgccaattgggaaccttgaagatatcaccttaagggcactgcgtgtcctaaaatgtgctaatgtgatactatctgaagacacaaggcattcaggaaagctacttcagcattacaacatcaagacacctcttcttagcttccataagttcaacgaacgggagagagagcccactatcttaaggaggcttcatgaaggtgaagcagttgcactgataagtgatgctgggacgccaggtattagtgaccctggcatggaactggctagactatgtgcaactgagaaaatccctgtcattcccattcctgggccatctgctgcaattgctgctctttctgcatcgggtttgccatcaaatgaattcacatttgttgtaaggaactattggggtcagttcatattttcaattttagttgggtttttaccaaagcatgctcggtcaagaagagataggcttgagatatctgctcgtgaagctgctacacaaatattctatgttcctccccatggcattcagcagtttcttgttgatgctgcttcatcttttggcgattccaggcattgtgtggtcgcaagggagataacaaaaatacatgaagagttttggcgtggaactttaggtgaagcaaatgaagcttttgcaactcgacaaccaaagggagaaataacagtgctcatagaggggaagttaatttcagatgacgaaattccatcagaggatttccttgagcatgaactaagagaattgacggcaaagggatatactctttctgcggcggtgaaattggtcactgaagccacatcagcaaagaagaaagatgtttatgcactcgcattgaggttgtttggaaaataagtaaaatggaatttttggtcgcatctggtaat

SEQ ID NO: 89805 - DNA, 1138 bp, Zea Mays
ggtgcgtgcctacggcgcgtggcatcgtgtgacttgggcaactgacactcctccccgcgacgccgcgccgcctgcccggctgccatccgaatcccatgtcgtcgctgctcctcctccaggccctggctccagccatgaccgtcccccgccaccatttcctcatctcccctctccgcctcgcctctgcagccacagttccgttcgctcgacgcttctccaacgccgcttccagcaacaagccggagccactcctctcggaaccggatctggagtcaggtctgtatcttgtgtcaacgccaattgggaaccttgaagatatcaccttaagggcactgcgtgtcctaaaatgtgctaatgtgatactatctgaagacacaaggcattcaggaaagctacttcagcattacaacatcaagacacctcttcttagcttccataagttcaacgaacgggagagagagcccactatcttaaggaggcttcatgaaggtgaagcagttgcactgataagtgatgctgggacgccaggtattagtgaccctggcatggaactggctagactatgtgcaactgagaaaatccctgtcattcccattcctgggccatctgctgcaattgctgctctttctgcatcgggtttgccatcaaatgaattcacatttgttgggtttttaccaaagcatgctcggtcaagaagagataggcttgagatatctgctcgtgaagctgctacacaaatattctatgttcctccccatggcattcagcagtttcttgttgatgctgcttcatcttttggcgattccaggcattgtgtggtcgcaagggagataacaaaaatacatgaagagttttggcgtggaactttaggtgaagcaaatgaagcttttgcaactcgacaaccaaagggagaaataacagtgctcatagaggggaagttaatttcagatgacgaaattccatcagaggatttccttgagcatgaactaagagaattgacggcaaagggatatactctttctgcggcggtgaaattggtcactgaagccacatcagcaaagaagaaagatgtttatgcactcgcattgaggttgtttggaaaataagtaaaatggaatttttggtcgcatctggtaat

SEQ ID NO: 89806 - DNA, 1218 bp, Zea Mays
ggtgcgtgcctacggcgcgtggcatcgtgtgacttgggcaactgacactcctccccgcgacgccgcgccgcctgcccggctgccatccgaatcccatgtcgtcgctgctcctcctccaggccctggctccagccatgaccgtcccccgccaccatttcctcatctcccctctccgcctcgcctctgcagccacagttccgttcgctcgacgcttctccaacgccgcttccagcaacaagccggagccactcctctcggaaccggatctggagtcaggtctgtatcttgtgtcaacgccaattgggaaccttgaagatatcaccttaagggcactgcgtgtcctaaaatgtgctaatgtgatactatctgaagacacaaggcattcaggaaagctacttcagcattacaacatcaagacacctcttcttagcttccataagttcaacgaacgggagagagagcccactatcttaaggaggcttcatgaaggtgaagcagttgcactgataagtgatgctgggacgccaggtattagtgaccctggcatggaactggctagactatgtgcaactgagaaaatccctgtcattcccattcctgggccatctgctgcaattgctgctctttctgcatcgggtttgccatcaaatgaattcacatttggtaaataatgctgatactgtactcattttatttttcagttgtaaggaactattggggtcagttcatattttcaattttagttgggtttttaccaaagcatgctcggtcaagaagagataggcttgagatatctgctcgtgaagctgctacacaaatattctatgttcctccccatggcattcagcagtttcttgttgatgctgcttcatcttttggcgattccaggcattgtgtggtcgcaagggagataacaaaaatacatgaagagttttggcgtggaactttaggtgaagcaaatgaagcttttgcaactcgacaaccaaagggagaaataacagtgctcatagaggggaagttaatttcagatgacgaaattccatcagaggatttccttgagcatgaactaagagaattgacggcaaagggatatactctttctgcggcggtgaaattggtcactgaagccacatcagcaaagaagaaagatgtttatgcactcgcattgaggttgtttggaaaataagtaaaatggaatttttggtcgcatctggtaat

SEQ ID NO: 89807 - DNA, 1210 bp, Zea Mays
accagccaacgctgtttcttcatcccaacgtcttcctcgcagcgccgccgctccatcttccgctctctcacttattactcgcgttcggcacgcgggcgacggcggcggcgcccaggctctcagcgacggcgcacaggctctggctctcagcgacggcgtcaacggcttcccctcccgcctctcgccagtcgcctcgctccctcgcctccggtcctccgcacaccgtccgttgatcctgcgtgcgtgcctctctctctcctcccgcctccggtggatcgtcaatggcgctcggacggcaatgggagccagcagccgctgctccaccaaggcggtcggctgctttgggagcgcttatgcccgaaatcgaagcgttacccggcctcttagcgcttcagcgcgctgaagcgtgcgcttagtgccgccatttggaaccctggttacaaccatgctcttctggttagatagatggaggtgccaatgaactctacgcaatctggtcctcacttccctgtgcagcatcagtccctctcattagacatcaagggaaataaaacagatattgttatcagtaaatatgaagatacctttctgctgattgtggcacaaatcggctgcatgggaaccatactagctgccaagaaagacgaaagtgttttctcggacccaacctacaatgtgtctgttctttttgggaagagaaatgagccactcctacaagcttgcgcacgtcaacttattgagcacataagtggcagtggctcagctcggtcattggttatttctctgggtctgaaagatcattctcagggaacactgaaggatatcattgtagctgtgatcgagaatcgcctttggtgatgattgaataactgagctgggcatgggattgacatattcagcccatcgataaagatattgcttagcattgcgcaagaggagccatcgtttataccatgcactaaattctggtagttttgtagttagaccttctatctacttggattaacaaaaggtggctttaagctgctgtcaaaatttgagtgtcagctctcacgctaaacaaaaggcactgtatgctggtaaaacacttctgaggtgaatcatgcttttcgaggctatttgacaatttcggctatagcttccccaggcttgctaccaacccagtccaactccaaggtttggaaaattctgtaaaaaaaatcaaaacaaa

SEQ ID NO: 89808 - DNA, 1001 bp, Zea Mays
accagccaacgctgtttcttcatcccaacgtcttcctcgcagcgccgccgctccatcttccgctctctcacttattactcgcgttcggcacgcgggcgacggcggcggcgcccaggctctcagcgacggcgcacaggctctggctctcagcgacggcgtcaacggcttcccctcccgcctctcgccagtcgcctcgctccctcgcctccggtcctccgcacaccgtccgttgatcctgcctcttctggttagatagatggaggtgccaatgaactctacgcaatctggtcctcacttccctgtgcagcatcagtccctctcattagacatcaagggaaataaaacagatattgttatcagtaaatatgaagatacctttctgctgattgtggcacaaatcggctgcatgggaaccatactagctgccaagaaagacgaaagtgttttctcggacccaacctacaatgtgtctgttctttttgggaagagaaatgagccactcctacaagcttgcgcacgtcaacttattgagcacataagtggcagtggctcagctcggtcattggttatttctctgggtctgaaagatcattctcagggaacactgaaggatatcattgtagctgtgatcgagaatcgcctttggtgatgattgaataactgagctgggcatgggattgacatattcagcccatcgataaagatattgcttagcattgcgcaagaggagccatcgtttataccatgcactaaattctggtagttttgtagttagaccttctatctacttggattaacaaaaggtggctttaagctgctgtcaaaatttgagtgtcagctctcacgctaaacaaaaggcactgtatgctggtaaaacacttctgaggtgaatcatgcttttcgaggctatttgacaatttcggctatagcttccccaggcttgctaccaacccagtccaactccaaggtttggaaaattctgtaaaaaaaatcaaaacaaa

SEQ ID NO: 89809 - DNA, 2075 bp, Zea Mays
accagccaacgctgtttcttcatcccaacgtcttcctcgcagcgccgccgctccatcttccgctctctcacttattactcgcgttcggcacgcgggcgacggcggcggcgcccaggctctcagcgacggcgcacaggctctggctctcagcgacggcgtcaacggcttcccctcccgcctctcgccagtcgcctcgctccctcgcctccggtcctccgcacaccgtccgttgatcctgcgtgcgtgcctctctctctcctcccgcctccggtggatcgtcaatggcgctcggacggcaatgggagccagcagccgctgctccaccaaggcggtcggctgctttgggagcgcttatgcccgaaatcgaagcgttacccggcctcttagcgcttcagcgcgctgaagcgtgcgcttagtgccgccatttggaaccctggttacaaccatgctcttctggttagatagatggaggtgccaatgaactctacgcaatctggtcctcacttccctgtgcagcatcagtccctctcattagacatcaagggaaataaaacagatattgttatcagtaaatatgaagatacctttctgctgattgtggcacaaatcggctgcatgggaaccatactagctgccaagtacgcttgtttctttctaggcaaattcgttctcctaagcatgtaaaattcagttttgttatttgcattattagttccgcataagtaactccatcgctatttctttcacaacacattgattattgaagttgtcattccgttcgatccttatgagtagtcaggccccctccacaaatattttcacagactcgatcatctagtagaaagatctgcgatatactgcagccacaagcatattagttcacaactggcagattgttcacatgtctaagcctgtatgcaagataatacctttattgctacctcagcaagtcagcattctagatgatatttgttcacaagcatatcaatttacaactggcagattgttgctcgctagatgttggctgtttgaaaacctaaactttcaatgttggaacttggttaatatgttaataatagttattccatcaccatattgtattgttagtttgttgcaaaaaaattgtgctgatcatgctattccctttccgaaccaaatgagggaaccgtgaacaagcaaggattgttttcatacaagttttcctagttttgcaacttacaactaaaataaacacctatatattattattattgcaatatatatacattttataacaaatttctatgtctgaaatgcgtgttggaatcagtgtgtcatatcttactatttgtaaggcctttgaatgacatttctacaaaaggtggaaagtcggtctctctggagattctagcttaagaatgatgaccttataaagttataatgaatgtaggcaaccatttttccttttaccttaaaactttgtatactatattttttcattaaatctttaactccacttgataggaaagacgaaagtgttttctcggacccaacctacaatgtgtctgttctttttgggaagagaaatgagccactcctacaagcttgcgcacgtcaacttattgagcacataagtggcagtggctcagctcggtcattggttatttctctgggtctgaaagatcattctcagggaacactgaaggatatcattgtagctgtgatcgagaatcgcctttggtgatgattgaataactgagctgggcatgggattgacatattcagcccatcgataaagatattgcttagcattgcgcaagaggagccatcgtttataccatgcactaaattctggtagttttgtagttagaccttctatctacttggattaacaaaaggtggctttaagctgctgtcaaaatttgagtgtcagctctcacgctaaacaaaaggcactgtatgctggtaaaacacttctgaggtgaatcatgcttttcgaggctatttgacaatttcggctatagcttccccaggcttgctaccaacccagtccaactccaaggtttggaaaattctgtaaaaaaaatcaaaacaaa

SEQ ID NO: 89810 - DNA, 1682 bp, Zea Mays
gcttgcaaacgccgcattctcgacagacgacaggtgctttgcaacatagacgccgatgcacccgtcaccctgcaagaaaagaaatctacaggaagactcccagctcgccggtgatcgagtggcatggatgtgccaaacgcaaccgtggaggccgagccactgctcgtgccacgcaggtccaccgaaggtggctcggcggcggcaaccgagtcgaagagacttctccggctcgctgggccactggtcctgagcttcatcctgcggaacgccgtccagatggtgtccgtcatgttcgtcggccacctcgggaagctccccctcgccggtgcctccctggcctcgtcgctcgccaacgtcacgggcttcagcctggtcgccggcatggccggcgccctcgacacgctgtgcgggcaggcgttcggggcgcggcggtacgcgctgctgggcgtctacaagcagcgctccatgctggtgctggcgctcgccagcctccccgtggtgctgacgtgggtgttcgtggagcagctcctcctggccatcggcgaggacccggacatcgccgcggaggccggcgcgtacgcgcggtggctgatcccgtccctcgccgcgttcgtgcccctcacctgccacatgaggttcctgcagacgcagagcgtcgtggtgcccgtcatggccagctccggcgtcacggcgctcgcccacgtcctgctgtgctacacgctggtgtacaaggtgggcatggggagcaagggcgccgcgctcggcgccgccgtctcctacagcgtcaacttggccgtgctcgctctttacgtcaggctgtccagcgcttgcaaggcaacatggacagggttctccaccgaggccttctctttctctggtctgcgggagtacgcgaagctcgccgtcccgtcggcgatgatggtttgcttggagtggtggtcgtttgagctgctcgttcttctctctgggtttttgccaaaccctaaactcgagacttccgtcctgtcaatatgcgtcaacaccgctattctgctgtacatggtaccgctgggccttggcacatctgcaaggtgttcgaccatcagggctgaacagaagattggatgtggcaaacagaagattggagcacgcgtaaacctcggcgccttttacatggttggcattccaacagggctgttgcttgcgtttgtgttcaacctaaatggaatgggtctttggcttggcattgtgtgcgggagcatcagcaaactggcgttgctcctgtggattgcactgcgcatagattgggagagcgaagctatcaaggccaaggacagggtcctccgttcgtcagggcaaacataatgatgagggtctcctacctttgtcgcataaacatatgtcatttgtcagggatatttagtggtaaggatccgtttggcattgctgaaccacccaatctcagtctcagctctacttcaaagccttcatcatgaagttagagaaggggaaaaaaggcgtgcaactttgacgttaactccagctactgccggtcctgcttttaagggcatgcgtgtatttttatactatgttccagcaagtgtgtgtattttttatataccatctaatttttattgtctcctattttacttttaaactacaacacgataaataaaaaagaattgagagagtatgtatgatct

SEQ ID NO: 89811 - DNA, 1827 bp, Zea Mays
cacactgccagatcggtctaagctagtggcgagagaggtcgtgcgcagtgcctggtgggtctagtctagtggcatcatggaggaggcggtggaggccgtggtcgcggccggagtggagccgttcccgacggtggacaagtgcgacgcgtcgggccgcggcgcgcacgccgtggtggcggacctggacggcgcgctgctgcgctcccgcagcgcgttcccgtactacgcgctggtggccttcgaggccggcggcgtgccgcgcctgctgctgctgctgctgctggccccgctggccgcggcgctgcgggcgctggcctcggagtcggcgtgcgcgcgcgtgctggtgttcgcggccacggcgggcgcccgggtgcgcgacatcgagtcggcggcgcgcgccgtgctcccgcgcttctacgccgccgacgtgcacccggccgcgtggcgggtgttctcggcctgcgcacggaggcgcgtcgtgctcacggccgcgcccaggatcatggccgagccgttcctcagggactgcctcggcgccgacgccgtcgcgggcaccgagctcgccacgtggcgcggccgcgccacgggcatggtggacagccgcaggggcgtcctcgtcggctggagcagggccgacgcgctgcgggagatattggccggcgacgacgacgacgacgccgcgcccgacgtcggcctcgggaacagccgctccgactaccccttcatgagcatgtgcaaggaggcgtacatcgtcccgcgcgcgccggtggagccattgcccatggaccagctgcctcgcccggtcatcttccacgacggccgcctggtgcgccggccgacgccgctggcggcgctgctggtcgtgctgtggttccccgtgggcttcgcgctcgcctgcctgcgcatcgcggcgggggcgctgctgcccatgccgctggtgtactacgccttctgggcgctgggcgtgcgcgtgcacgtccggggcgccccgccgccgccgcgcgccgagcgcgccacgggccggaggggcgtcctcttcgcctgctcgcaccggacgctgctggaccccatcttcctgtccaccgcgctggggcgccccgtggcggcggtcacctactcgctctcgcgcctctccgagttcctctcgcccatccggacggtgcgcctcacgcgggaccgcgcctccgacgccgccatgatccgggacctgctggcggagggcgacctcgtcatctgccccgaggggaccacgtgccgggagcccttcctgctgcgcttctcggcgctcttcgcggagctcacccacgaggtggtgcccgtggccatggagaaccggatgagcatgttccacggcacaacggccagggggtggaaggggatggacccattctacttcttcatgaaccccagcccggcatacgtcgtcaccttcctcaacaagctcccgcccgagctcacctgcgccggcggcaggacaagccacgaggtggccaactacatccagaggctaatcgccgccacgctctcctacgagtgcacaagcctcaccaggaaggacaagtacctggcgctcgcaggcaacgacggggtggtggccacccccaagccgccggcgccggccaagaaacccaatggctgctaatataacaacaaggtcgatgatcgaaaaaaggaaaagaaaattgggttattgtgatgtgtctttgctgcagaattaatactactagtagtatattcattgtgatgatgcttggcaatgggctgtaatttttctccttgtattggtcacatctactatatattatagcaatggctttattgtaccaa

SEQ ID NO: 89812 - DNA, 1157 bp, Zea Mays
cttgtttgatcttagtgactatgggccatgtgtcatcgctagactccttaacgatagtctaaatgatgggggagtcacgtctgccatggtgtggccacaacgtcgctatggagaaggagagagaggcatcggtgcctatgaggactctgcatgactatgtcccgctccaccatgttgtgctgctcctgctcacttgtgtccacacgcaggcagcatcgtcagccatgtgcggcctagcgggtcgtctcagccacgaggcgtacatcgtcccgcgcgcgccggtggagccattgcccatggaccagctgcctcgcccggtcatcttccacgacggccgcctggtgcgccggccgacgccgctggcggcgctgctggtcgtgctgtggttccccgtgggcttcgcgctcgcctgcctgcgcatcgcggcgggggcgctgctgcccatgccgctggtgtactacgccttctgggcgctgggcgtgcgcgtgcacgtccggggcgccccgccgccgccgcgcgccgagcgcgccacgggccggaggggcgtcctcttcgcctgctcgcaccggacgctgctggaccccatcttcctgtccaccgcgctggggcgccccgtggcggcggtcacctactcgctctcgcgcctctccgagttcctctcgcccatccggacggtgcgcctcacgcgggaccgcgcctccgacgccgccatgatccgggacctgctggcggagggcgacctcgtcatctgccccgaggggaccacgtgccgggagcccttcctgctgcgcttctcggcgctcttcgcggagctcacccacgaggtggtgcccgtggccatggagaaccggatgagcatgttccacggcacaacggccagggggtggaaggggatggacccattctacttcttcatgaaccccagcccggcatacgtcgtcaccttcctcaacaagctcccgcccgagctcacctgcgccggcggcaggacaagccacgaggtggccaactacatccagaggctaatcgccgccacgctctcctacgagtgcacaagcctcaccaggaaggacaagtacctggcgctcgcaggcaacgacggggtggtggccacccccaagccgccggcgccggccaagaaacccaatggctgctaa

SEQ ID NO: 89813 - DNA, 171 bp, Zea Mays
atgacctcgagtccttcagatgagcaggggcgaccttcagatgatgaccacagtcctggagacgccagagacggcgcaggtggagagccggcgcgggaggactgcacagcacaactagagcagccaccgtcgattgccctggaaggccgccggcggcagaggacaggctaa

SEQ ID NO: 89814 - DNA, 2685 bp, Zea Mays
atgaatgtacaagcactacattccattacttcgtacacaagcaaagaatctacattatactcatttccatctcggaaccattcaaacccagaacatgacgatggaaaggaagtgaaatcgattggagtgccgtctgctcacctgcttcctctcgaggaacatgccggagctggtgcgcacctcactctggacactcttaccggactcgttatcggccaccatagacttctccagcttgtccttggcctttcaaccaatcaaacaccaaatcaaccaacgatggaacgaaccaaagcagacatcacaagccaatccacccagcctctggcactcaccagcgcgatgaggtggtcgcactccgcatccgacaggaaacccttgtgcaggaacgccctaatagccacacgaaatcacacatccgtcagactcccgcgcgacctagggtttgcggaagcagagagcggagtgggagggagatcagattgccacctggggcgccacgagagttggaccactcgggatgggtcgaaggaaccagcgcccctgctcgccgcagaagcgcagacagcgaggaggagcgcgaacaccgcggcgaggagcaggtggcggcagaaattcatgtcgcggcgagatgggaaggcgacgagcggtgtggcacttgaactggggaagaagcggtgtgttatgtcagaactgccggtgacagcggacccgccaatgcgaggacccgagtccctagcgaagaacggaggggttgaccagaatggagtgtgggcgcctggcgcggccatgcccccgcctccgcctcccgtgcgcgatgccccaacggccccacaccgacccagagaaagtgccagcggtcaccagaaggtgcgcttccgccggaagcgcctggccgttgcgaggaggccaacgccgaggcacctggcccacacgcccacctccatcgcccaccgcaccgtctccatctcgacctcctgctcctcctcctctgtatccccgaccacctcccaccccgtcgtcgtcgcactcacagcggcaccagccatagaggcctgtggtgacgtcctccttcggtatcccctccagccgggtggctccgcaccgcatccggccccggccccggccggccgcgcgggccctgtcccgcatcagcacgccgccctccgcgagcaccaccacatccgccacgcacacctccggcgaggccagcgcctggcggcactccacgtgccaccccgccccccgcgtcgagcggagaagacgccctccaccgcggcctcctccccggcggcggcgagcacctcgaatcacgcgctcgcgtacgcgtcggtggcgacccggcggagcgtgaccttggcgggcacgcctggcgggagcgtgcgactgtttagccccagcgtcgcgcccccgatggccgggtggtaggccagcgtgagctccgcgggcgtcgtggcggagcaggaggagactggagaggcaaaggtagaaagcgtggatgtcgaggcgcgcgggacgggggcgggcggaggaagccgccctctatcgccgtggcacggcacatcgcagaaaccggtcgctgaacctgcatcgtcttgctgctgctcggatgctgtcctcgtggtcaccgaagggcaaagcagcttgtgctactgggatcttttgctaataaaagcggagcgcgggggcgataagcgtcgggcagtggcggagggcaaaccaaaattaaggtgttgctactgcaacacgaaatagaaaaaagtcacacaaacttttggtggagattagacaaaaaatcagtattcatttggatttggttctgtgagctaaaagaaacatgttcaacacagttttcaccatgcatgcccacctgcagaaatgcagaatcaatttcaacatgctctctaccctgcttacccaccagaataactctttcagtaatccaaaggaaatcaaggagctggagcgttaagaattagtatggaccggaggagcgttaagaattagtatggactggagttcatccaaacaacaagcatgacgctggatgggcaattatgaagttattattataattatatgagcatgcctaacattggatgccaattactagccaaactagccatcaacactacaattgcaagacgaacgagtcacctagagaccatacccactgctttccgaatcacgattcacgaatcactcgaaaaaggacatcccagaggccagagcaagagatctctagatactgttgcgattttgacgggcgacggcgacgagtacctggcgagcgcaagcacacaggcaggaagctccctagctccaggtggaacaactgctcggcattgttgtgcgtcagccacaagcggtgggagactggaggcgaacgggggcacgaccgcccgagacgacagagttggcggagtggcagaggctcggcgtcggcagcttgctcgacactcattggatgtgtggtcgcgtggaacagggtagagttagctagggattagatttttttcactgttgatctcttctcgggctgaatcaaggtattgcttgagcaacaccgagctatagtgagtcctccgcccctggtgtcgggtcgtccgatggttttccgcgtggcgcccggggttttcttttcgtggctgaatcggccgaaactgagcacacggtttggtttgc

SEQ ID NO: 89815 - DNA, 210 bp, Zea Mays
gtgcacgggcgagaagatggaggcgaggcgagtcactccatcacgctgcgcatgtcaccaaggaatggcctcccatctcgagcctagacttttcaacgaaggttatgcatttggcagcaggggaactcctggagattgtgcctcttggaaaaggcttctttcttgccaactatcctatttcaattttggattgaccattattgtttgcgt

SEQ ID NO: 89816 - DNA, 757 bp, Zea Mays
atcttttacctcttgtagttacacaagaacaacttgattgtgctaaagaggcaatcaaatctacagttctgatgaacttggaatcaagggctaaagtaacctgtctctgtttggtcattatgctctaggatccttcaacttgacatcacagcaatcgttgaggagtgtaaccagcaacctcagctctgaaagaaccctagagtaaacactcacatcaagacactccactgttcactcttgggctgctcctaccaatgaagcaagagcatctccacctggcaatggtccactcgtattcatcactaagtcagctcgattccaccaattggtgttcatgctgttggatggcaaatgacaacccctctttgcatcctgtagtgtttcgcctttctaatatttctgtttgctcccagcggcttgaacccctacaagtgcacctggcattggttaccaatcagcagattcataacatctcatgaaaaggatatgtgttggacaaccagataaggtattacagagaatatgaataatctggaggttctgctgatgcatgtaaattatggaattatggtttcaattctagattatttgagaatggcacctctatatgctcattgggcaatgatcagaaagttggagatcatagaaatactgagaacggtgaatcttgtttacatttatgggcacttttgaaaagaaattattttgtatggtagtattgttgaaaagatcaataattttagaggatttgatgatc

SEQ ID NO: 89817 - DNA, 104 bp, Zea Mays
gtatatcctttatgaatagatactttatattaataaatattttaataaatattactcagtatataattctgcaaaaggataagttgattcatataaggatcttg

SEQ ID NO: 89818 - DNA, 787 bp, Zea Mays
acaatagatcacctacctttctcacccttcatccaacggcgccagcacgcacgagcagtgcgccgccatccgttgcgccgtcgtacgcagccagctggagcgccgcttcccgccagccagccggagcgccgccgcccgcgagagtcccgcccccggcgtgtatcagaaccccccccccctccccggcgccgcgcagcagagctccgtggcccccgccctcgccgagcagcagagggccgcctccagccagctcgccggctatggctgccgctggagatccaccacctcctatttatgctgagggtgctgcaaggacaagaggagaaatatctccacatttccagacaattacaattaaatatataatcatcgacttatgttcgactagtcacgactagtctgcatggttattaaggcgtccattaagtgtcgcctaggcgagatttcagggcctgagtgtaagcaacgagactcttactctcatcgagaggatgacactatgagttgaggcgattttctgtttattttttcaaacactacacaatgtcatacccgtctaagggttgagatacatatttatagcctaaggggctgcaacatatgcttcctagagatgtgaatatgttgtactaaaaactgcactacctgtcctacagactggactaactactaggtgctgttgtactctagtcaaaagaaaactgcagcaagctgctgtcctccaaaagctagaaaagcggaaaagaaaatgcctgcaacacgctgtccttgcagtcaaaagactgaa

SEQ ID NO: 89819 - DNA, 711 bp, Zea Mays
atggctctgttggtggtggtccaagtgatgttggtggtaccgatggtgcttgtgcatatgaccctatggctgatccaaagcggagagcaaagtccaacgatcccggatggaactatgggtattggacagaaattgggaaccgagataaggtcacatgcaacagttgcaagtccgttacaactggatgaatcaaaagatgaaaagtattccaaaagggagaaagctggctcaagttatgacccattagttatggaagactcgtcggtggtacatcctggcagcgataataatgatattaatgctttaacatgggatcatgttgatattgctactggagcatcagagtcacttcaagggcgcaaccttccaaggcaagctagacagacacaaacctacacaaggcgtgcaagaatgaggacacaagaagttgaagaagaagaagcacatgattctagtgatgatgacattggggttgatccacatgatgacatagatgtgagtgatgctgatgaagctaatggtggggaagaaggcagagaagacaatgttgatctcattgtcgatgagtttgatgatggatattgagagtttgggacttcattgagagatgagagtatcaaaaactacttatgttgccttttagcttattatgcttgtttgtgttgaacttgaagactgctatttagtactatccaccttttatttgggacc

SEQ ID NO: 89820 - DNA, 1452 bp, Zea Mays
ctcactgagcactttcatgctttgtaaaactactattctacttcatatttttgtttttactttagggattctgataagctcatttttgagcgcctacagaaagaatttgaggctgcacgggctgctcaaaccgaagagatatcaataaatgatgatgagtggaatgatggtttactggcaaccatccgtgagaagaccaggttcatatggaggctgataggaaggccatgtccaaccaagtaaatgttccagcagatctttcatttcaatcaaggactacatataggattagaaataaggttatatattgcttggatggagctaggattggcatacagtatgagacattctttgctggagagccttgtgaaatttttcattgtgttttggaaagcaagtcattcctggaaaagatgattatgattgaacacaccttacctttctttctgcctgtacgtgaattagaaagtgatctgttgtcatctaattcaattaaattcattgatcatcttgaagaaattttacaggcttatattgacaggagagagcaggttcgtcttatcaaggagctctacgggaaccaaattggcgagctgttccatagtcttccttataatatgatagagtttgtattggaggattttgagtggtaaggataatatttaattactgctaatgcttggattgcatcaataagttctgttttgttgctagtacactccctcatagaatatgtacacctagtgcagccttctatttttgttatcttgcagcgtgcatgctgaatatcgcatactgattttaagctgctaatatgcataagtagcttgttgcacattttgtagagattgatctgtttgccacttataagcagcaaggttacaatcagtatccgatattcggatctactgcagaccctgccgagtcaggcaagggtcttggcttggccacttcgctcggccaagaaaatatctacaagaagcagcagtgcatcagctgcgcaaccagtaccctttcacctttcatatgccgaggaagcactcaaaaccttgtgtctaccagaaggtgcttcctgtcaccttggcttacagcatacatggctttgtgctgaattgatctgtttctccctgttctgtgtttcagcatacgcagacattgtgctggagctaccccatgctttgaagaggattttatcctctcgggacagtgactaaatcgtgacctcaagatgtccagttttgttgtgcataagattcacatctcaatcgtggggcatgtttttgaagatattgttcagaatcttgtggtagtatagcctgcagttgtggactgcaattcctgtgaaagcaaggcagacatttgcgtgggccgctcgaaatattccggctacagttcctgttaaaagaatcaaaatcctaggaaggccttatggtcgaggcataatcttgccaa

SEQ ID NO: 89821 - DNA, 1319 bp, Zea Mays
ctcactgagcactttcatgctttgtaaaactactattctacttcatatttttgtttttactttagggattctgataagctcatttttgagcgcctacagaaagaatttgaggctgcacgggctgctcaaaccgaagagatatcaataaatgatgatgagtggaatgatggtttactggcaaccatccgtgagaagaccaggttcatatggaggctgataggaaggccatgtccaaccaagtaaatgttccagcagatctttcatttcaatcaaggactacatataggattagaaataaggttatatattgcttggatggagctaggattggcatacagtatgagacattctttgctggagagccttgtgaaatttttcattgtgttttggaaagcaagtcattcctggaaaagatgattatgattgaacacaccttacctttctttctgcctgtacgtgaattagaaagtgatctgttgtcatctaattcaattaaattcattgatcatcttgaagaaattttacaggcttatattgacaggagagagcaggttcgtcttatcaaggagctctacgggaaccaaattggcgagctgttccatagtcttccttataatatgatagagtttgtattggaggattttgagtgcaaggttacaatcagtatccgatattcggatctactgcagaccctgccgagtcaggcaagggtcttggcttggccacttcgctcggccaagaaaatatctacaagaagcagcagtgcatcagctgcgcaaccagtaccctttcacctttcatatgccgaggaagcactcaaaaccttgtgtctaccagaagcatacgcagacattgtgctggagctaccccatgctttgaagaggattttatcctctcgggacagtgactaaatcgtgacctcaagatgtccagttttgttgtgcataagattcacatctcaatcgtggggcatgtttttgaagatattgttcagaatcttgtggtagtatagcctgcagttgtggactgcaattcctgtgaaagcaaggcagacatttgcgtgggccgctcgaaatattccggctacagttcctgttaaaagaatcaaaatcctaggaaggccttatggtcgaggcataatcttgccaactgctgtccttgtccttgatgtgtgctccttttttttctccactctggctatgtttgtttccttttagaattatactagcgcgttacgcgcgcctgcacgcgcgtgttgacaaacctattttatttcaaatatcaagtatctaagaagacatgctaaaatttcaacaata

SEQ ID NO: 89822 - DNA, 1033 bp, Zea Mays
ttgcttatctctaggatatgcttcttgccctccaagtcatgtactcctatatattctccctagaggcttaatgcaatacatcccacacattatacacattctctccttcaggttctggtccagtatctgaaattgcaaccctgagtattataaaagaattgatatatgagtcatgacatttttctttttaatgagtgtgccttctatcattggccaatcaattgttgaggcacttgtagctttaaagattggagctaagggtcaaatgtggaatctggagacagatgggtcatacagtctttgatggtacatcgctaattatagtttttatttcatgttcaaggttcgtcttatcaaggagctctacgggaaccaaattggcgagctgttccatagtcttccttataatatgatagagtttgtattggaggattttgagtgcaaggttacaatcagtatccgatattcggatctactgcagaccctgccgagtcaggcaagggtcttggcttggccacttcgctcggccaagaaaatatctacaagaagcagcagtgcatcagctgcgcaaccagtaccctttcacctttcatatgccgaggaagcactcaaaaccttgtgtctaccagaaggtgcttcctgtcaccttggcttacagcatacatggctttgtgctgaattgatctgtttctccctgttctgtgtttcagcatacgcagacattgtgctggagctaccccatgctttgaagaggattttatcctctcgggacagtgactaaatcgtgacctcaagatgtccagttttgttgtgcataagattcacatctcaatcgtggggcatgtttttgaagatattgttcagaatcttgtggtagtatagcctgcagttgtggactgcaattcctgtgaaagcaaggcagacatttgcgtgggccgctcgaaatattccggctacagttcctgttaaaagaatcaaaatcctaggaaggccttatggtcgaggcataatcttgccaactgctgtccttgtc

SEQ ID NO: 89823 - DNA, 1009 bp, Zea Mays
ttgcttatctctaggatatgcttcttgccctccaagtcatgtactcctatatattctccctagaggcttaatgcaatacatcccacacattatacacattctctccttcaggttctggtccagtatctgaaattgcaaccctgagtattataaaagaattgatatatgagtcatgacatttttctttttaatgagtgtgccttctatcattggccaatcaattgttgaggcacttgtagctttaaagattggagctaagggtcaaatgtggaatctggagacagatgggtcatacagtctttgatggtacatcgctaattatagtttttatttcatgttcaaggttcgtcttatcaaggagctctacgggaaccaaattggcgagctgttccatagtcttccttataatatgatagagtttgtattggaggattttgagtgcaaggttacaatcagtatccgatattcggatctactgcagaccctgccgagtcaggcaagggtcttggcttggccacttcgctcggccaagaaaatatctacaagaagcagcagtgcatcagctgcgcaaccagtaccctttcacctttcatatgccgaggaagcactcaaaaccttgtgtctaccagaagcatacgcagacattgtgctggagctaccccatgctttgaagaggattttatcctctcgggacagtgactaaatcgtgacctcaagatgtccagttttgttgtgcataagattcacatctcaatcgtggggcatgtttttgaagatattgttcagaatcttgtggtagtatagcctgcagttgtggactgcaattcctgtgaaagcaaggcagacatttgcgtgggccgctcgaaatattccggctacagttcctgttaaaagaatcaaaatcctaggaaggccttatggtcgaggcataatcttgccaactgctgtccttgtccttgatgtgtgctccttttttttctccactctggctatgtttgtttccttttag

SEQ ID NO: 89824 - DNA, 2533 bp, Zea Mays
agcacacggacagaggatagagaaaacagagtgcgacgccgacgaagagagagacagagagcaaaacccaaaccctaacaatcatttgcagcccccggcgtctcgagaacctccaaggaaccatccacaggagaaggcgcgagcgcgggtgtttggatcgggggaggcaacgctggcggctcgcggcggcagcaggtgatggcggatccgcctagcggtgggggatctagggcttgtgtctgcagggagagacaggtcgaggaggcagaggcgggtctggggctcgggagaagagaacaggggaggaaggagggaggatgctgagcgtggttcgggtacacctgccgtcggagatcccgatcgtgggctgcgagatcacgccgtacgtgctactgcggcggcccgacggtgcagtctccaccaacgatgtccccgaaaccgcgcccgctgatggccagttcatgcggtacagatggtatcgcatacagagcgaccggaaagtccctatctgcagtgtgcatccaatggaacaagcaactattcagtgcctcggttgtctcaagtcaaaaatacctgttgctaagagctaccactgttcagccaaatgcttctctgatgcatggcagcaccacaaagttttgcatgaacgagctagtagtgctctaaatgaaaatggggctgaagaagaggagttatttggcagatttggcagtggtggttctggggttctaagtactgctggatctggttctttgtcaaattttggacaaagccctggtgttaataatggacctgtgcctttctatccctcaggtaccgataaaaattctggagaaacttggtttgaagttggacgctcacgaacatatacaccaactgctgatgatattggacatgcactaaagtttgagtgcgtagctgtggattcagaaaaaaagtctccaattggaccctcaacctcaatcatgacatcacgtgtaattcccgcgccaactcctacccctcgccgccttatccaagtgaatggggatgttttaggtcacttggatttagacagccaaatttcgtccttagggacattcactgtgttatcctacaatattcttgctgatgcatatgctacaactgatgcatatagctactgcccaacatgggcacttacctggaattatagaagacaaaatttgctgcgtgaaattattggttatcatgctgatatcatctgtctacaggaggtacaagtaaaccatttcgaagattttttttcacctgagcttgacaaacatggatatcaggcgctttacaagaaaaggacaacagaggtgtattctggaaatcctatggccatagatggatgtgctactttttttcgtagagacaagttttcacatgttaaaaaatacgaggttgagttcaataaggctgcacagtctttaacagatgctattattcctgctgcccagaaaagagtggctttaagtcgattgattaaagacaacattgcactaattgcggttttagaagccaaatttggtaatcatggagctgaaaatcctggtaaaagacagctcctttgtgtggcaaatacacatataaatgtccatcaagacctaaaagatgtgaagctatgggaggttcataccctcctaaaaggattggagaagatagctgtcagtgcagacattcctatgttggtctgtggagatttcaactcaacccctgggagttctccacatgcgcttctggcaatgggcaaagttgatcagcatcatccagatctggcaatagacccccttggaattttacgccctccaagcaagttgaatcaccagcttcctttggtcagtgcatactctgcatttgcaagaatggtaggtgttggctatgatttggagcatcagcggaggacagaccctgcaacaaatgaaccactcttcacaaattgcacaagagattttactggaactattgattacatattttacacagcggactcattgacagtggattcattattggaacttttggatgaagaaagcttaagaaaagacacagctctcccatcccctgaatggtcatcagatcacatagcactcttagctgagttccggtgcaagccaagaatcagacgttgacacattaggtcttgtagaaaaggtcattgtcatcatccttggtggtggaacaccgttccatgtgggaacttgaggcagggcgggaacgcgggctctcggggaagcaaacaaccaagcagcctcaggaaggggaagaggcttgtaacatttgatttttaccctcctacatttgagctcatgatacttaagatgcccctgtgtaccattactttctatagaagaaaaatacttgagagaaatatttgaagggttataaggcccgtttttcttttttgttcactgcggtcgcgttcgattccttttggctgtgtccatgctcgctgcctacaatacgcagccacgcaggagtcctcgacttctgtaaattctgtaccaatgtaataccagttccagttttt

SEQ ID NO: 89825 - DNA, 1700 bp, Zea Mays
agcacacggacagaggatagagaaaacagagtgcgacgccgacgaagagagagacagagagcaaaacccaaaccctaacaatcatttgcagcccccggcgtctcgagaacctccaaggaaccatccacaggcgaggcctcgctccgtgcccggatctcccatttccgcccggccggcgcggcgggatcctgatactggtgctgtctgctggggtttcgtgtaggagaaggcgcgagcgcgggtgtttggatcgggggaggcaacgctggcggctcgcggcggcagcagctactgcccaacatgggcacttacctggaattatagaagacaaaatttgctgcgtgaaattattggttatcatgctgatatcatctgtctacaggaggtacaagtaaaccatttcgaagattttttttcacctgagcttgacaaacatggatatcaggcgctttacaagaaaaggacaacagaggtgtattctggaaatcctatggccatagatggatgtgctactttttttcgtagagacaagttttcacatgttaaaaaatacgaggttgagttcaataaggctgcacagtctttaacagatgctattattcctgctgcccagaaaagagtggctttaagtcgattgattaaagacaacattgcactaattgcggttttagaagccaaatttggtaatcatggagctgaaaatcctggtaaaagacagctcctttgtgtggcaaatacacatataaatgtccatcaagacctaaaagatgtgaagctatgggaggttcataccctcctaaaaggattggagaagatagctgtcagtgcagacattcctatgttggtctgtggagatttcaactcaacccctgggagttctccacatgcgcttctggcaatgggcaaagttgatcagcatcatccagatctggcaatagacccccttggaattttacgccctccaagcaagttgaatcaccagcttcctttggtcagtgcatactctgcatttgcaagaatggtaggtgttggctatgatttggagcatcagcggaggacagaccctgcaacaaatgaaccactcttcacaaattgcacaagagattttactggaactattgattacatattttacacagcggactcattgacagtggattcattattggaacttttggatgaagaaagcttaagaaaagacacagctctcccatcccctgaatggtcatcagatcacatagcactcttagctgagttccggtgcaagccaagaatcagacgttgacacattagctctccaggtcttgtagaaaaggtcattgtcatcatccttggtggtggaacaccgttccatgtgggaacttgaggcagggcgggaacgcgggctctcggggaagcaaacaaccaagcagcctcaggaaggggaagaggcttgtaacatttgatttttaccctcctacatttgagctcatgatacttaagatgcccctgtgtaccattactttctatagaagaaaaatacttgagagaaatatttgaagggttataaggcccgtttttcttttttgttcactgcggtcgcgttcgattccttttggctgtgtccatgctcgctgcctacaatacgcagccacgcaggagtcctcgacttctgtaaattctgtaccaatgtaataccagttccagtttttgttttccac

SEQ ID NO: 89826 - DNA, 2645 bp, Zea Mays
agcacacggacagaggatagagaaaacagagtgcgacgccgacgaagagagagacagagagcaaaacccaaaccctaacaatcatttgcagcccccggcgtctcgagaacctccaaggaaccatccacaggcgaggcctcgctccgtgcccggatctcccatttccgcccggccggcgcggcgggatcctgatactggtgctgtctgctggggtttcgtgtaggagaaggcgcgagcgcgggtgtttggatcgggggaggcaacgctggcggctcgcggcggcagcaggtgatggcggatccgcctagcggtgggggatctagggcttgtgtctgcagggagagacaggtcgaggaggcagaggcgggtctggggctcgggagaagagaacaggggaggaaggagggaggatgctgagcgtggttcgggtacacctgccgtcggagatcccgatcgtgggctgcgagatcacgccgtacgtgctactgcggcggcccgacggtgcagtctccaccaacgatgtccccgaaaccgcgcccgctgatggccagttcatgcggtacagatggtatcgcatacagagcgaccggaaagtccctatctgcagtgtgcatccaatggaacaagcaactattcagtgcctcggttgtctcaagtcaaaaatacctgttgctaagagctaccactgttcagccaaatgcttctctgatgcatggcagcaccacaaagttttgcatgaacgagctagtagtgctctaaatgaaaatggggctgaagaagaggagttatttggcagatttggcagtggtggttctggggttctaagtactgctggatctggttctttgtcaaattttggacaaagccctggtgttaataatggacctgtgcctttctatccctcaggtaccgataaaaattctggagaaacttggtttgaagttggacgctcacgaacatatacaccaactgctgatgatattggacatgcactaaagtttgagtgcgtagctgtggattcagaaaaaaagtctccaattggaccctcaacctcaatcatgacatcacgtgtaattcccgcgccaactcctacccctcgccgccttatccaagtgaatggggatgttttaggtcacttggatttagacagccaaatttcgtccttagggacattcactgtgttatcctacaatattcttgctgatgcatatgctacaactgatgcatatagctactgcccaacatgggcacttacctggaattatagaagacaaaatttgctgcgtgaaattattggttatcatgctgatatcatctgtctacaggaggtacaagtaaaccatttcgaagattttttttcacctgagcttgacaaacatggatatcaggcgctttacaagaaaaggacaacagaggtgtattctggaaatcctatggccatagatggatgtgctactttttttcgtagagacaagttttcacatgttaaaaaatacgaggttgagttcaataaggctgcacagtctttaacagatgctattattcctgctgcccagaaaagagtggctttaagtcgattgattaaagacaacattgcactaattgcggttttagaagccaaatttggtaatcatggagctgaaaatcctggtaaaagacagctcctttgtgtggcaaatacacatataaatgtccatcaagacctaaaagatgtgaagctatgggaggttcataccctcctaaaaggattggagaagatagctgtcagtgcagacattcctatgttggtctgtggagatttcaactcaacccctgggagttctccacatgcgcttctggcaatgggcaaagttgatcagcatcatccagatctggcaatagacccccttggaattttacgccctccaagcaagttgaatcaccagcttcctttggtcagtgcatactctgcatttgcaagaatggtaggtgttggctatgatttggagcatcagcggaggacagaccctgcaacaaatgaaccactcttcacaaattgcacaagagattttactggaactattgattacatattttacacagcggactcattgacagtggattcattattggaacttttggatgaagaaagcttaagaaaagacacagctctcccatcccctgaatggtcatcagatcacatagcactcttagctgagttccggtgcaagccaagaatcagacgttgacacattagctctccaggtcttgtagaaaaggtcattgtcatcatccttggtggtggaacaccgttccatgtgggaacttgaggcagggcgggaacgcgggctctcggggaagcaaacaaccaagcagcctcaggaaggggaagaggcttgtaacatttgatttttaccctcctacatttgagctcatgatacttaagatgcccctgtgtaccattactttctatagaagaaaaatacttgagagaaatatttgaagggttataaggcccgtttttcttttttgttcactgcggtcgcgttcgattccttttggctgtgtccatgctcgctgcctacaatacgcagccacgcaggagtcctcgacttctgtaaattctgtaccaatgtaataccagttccagtttttgttttccacaa

SEQ ID NO: 89827 - DNA, 1618 bp, Zea Mays
aacaatcatttgcagcccccggcgtctcgagaacctccaaggaaccatccacaggcgaggcctcgctccgtgcccggatctcccatttccgcccggccggcgcggcgggatcctgatactggtgctgtctgctggggtttcgtgtaggagaaggcgcgagcgcgggtgtttggatcgggggaggcaacgctggcggctcgcggcggcagcagctactgcccaacatgggcacttacctggaattatagaagacaaaatttgctgcgtgaaattattggttatcatgctgatatcatctgtctacaggaggtacaagtaaaccatttcgaagattttttttcacctgagcttgacaaacatggatatcaggcgctttacaagaaaaggacaacagaggtgtattctggaaatcctatggccatagatggatgtgctactttttttcgtagagacaagttttcacatgttaaaaaatacgaggttgagttcaataaggctgcacagtctttaacagatgctattattcctgctgcccagaaaagagtggctttaagtcgattgattaaagacaacattgcactaattgcggttttagaagccaaatttggtaatcatggagctgaaaatcctggtaaaagacagctcctttgtgtggcaaatacacatataaatgtccatcaagacctaaaagatgtgaagctatgggaggttcataccctcctaaaaggattggagaagatagctgtcagtgcagacattcctatgttggtctgtggagatttcaactcaacccctgggagttctccacatgcgcttctggcaatgggcaaagttgatcagcatcatccagatctggcaatagacccccttggaattttacgccctccaagcaagttgaatcaccagcttcctttggtcagtgcatactctgcatttgcaagaatggtaggtgttggctatgatttggagcatcagcggaggacagaccctgcaacaaatgaaccactcttcacaaattgcacaagagattttactggaactattgattacatattttacacagcggactcattgacagtggattcattattggaacttttggatgaagaaagcttaagaaaagacacagctctcccatcccctgaatggtcatcagatcacatagcactcttagctgagttccggtgcaagccaagaatcagacgttgacacattaggtcttgtagaaaaggtcattgtcatcatccttggtggtggaacaccgttccatgtgggaacttgaggcagggcgggaacgcgggctctcggggaagcaaacaaccaagcagcctcaggaaggggaagaggcttgtaacatttgatttttaccctcctacatttgagctcatgatacttaagatgcccctgtgtaccattactttctatagaagaaaaatacttgagagaaatatttgaagggttataaggcccgtttttcttttttgttcactgcggtcgcgttcgattccttttggctgtgtccatgctcgctgcctacaatacgcagccacgcaggagtcctcgacttctgtaaattctgtaccaatgtaataccagttccagtttttgttttccacaa

SEQ ID NO: 89828 - DNA, 2715 bp, Zea Mays
atgagcgcgcggataaaggagatggtgcgtgtggccacggcgcggctgggcggtgagcaggtgggggctggcggggtttcctcctcgggtatcgcgcgtcgggagtccacggcgcggctcggcggcgggggtacaagcctccggaggcagccgcagccgatggcgccctccgtgcgcaccgtctgctgcaacgaccgcgaggccaacgcccctgtcgggtacaagggaaattctgtgtcgactacaaagtacagcatcctgactttcctacctaaaggattatttgagcagttcaggcgggttgcaaatctttactttctcatgatctctatcttgtctactacacctatcagtccagttcatcctgtcactaatgtcgttcctctaagtcttgtgcttctggtgtctctcatcaaggaagcttttgaggattggaagcgtttccagaatgatatgtcaattaacaatgcacatgtcgatgtattgcaaggtcaatgttgggaaagtactccatggaaacgactgcaggttggagatattgtgaggacagcaaatcttgatggggaaacaaatctgaaaataaggaaggctttggagaaaacttgggactatgtaattcctgaaaaggcttctgagttcaaaggtgaagtgcagtgtgaacagccaaacaattccctttatacttttactggcaatcttatcatggacaagcaaactatacccctctcaccgaaccagttactcctaaggacaagcaacatatttggagttcctaagattggccgcattgcattcaccggcggctgctccaatacaccggcgccggctctccaggactccaccagcgttgtctccagaccagcaccggtgagcaatgacgaagaggacttgatgactggtgctggtcccttccttctcccccttttctatcttattatcagtatgtctacactctgcggcgcctggtcggtcctccgggacgaccagctggtcgctcgacttgaaatcagtggtggtaaaggttatgatgaattccatgaatgttccctcaaaaagaagtacattggaaaaaaagctagacaagcttatccttgctctttttgcaaccctctttacaatgtgtgttattggcgccattggaagagctcagagctagccgttaggttgacaggtgggccgcgcttggctgataggggggcaccggccgctgggggtccatcgtgcctcaccctcgagctttggatccctaaggacttcacgtcaaggtcctggatgcattcccgttatcccacgtacgacaccgaagtggagtgcttgcccttcggccttgccacgtcttccccctggctaggacccatcgcctacatgtccgagccgaggcaagatgggaagttagtaggaaatgtgatcgaggtcagggtttggcttcacccaatagataccatgctggagatagctgtggtcaatgtagtcaaggtagttgatgttgaggtggctgtatatgaagctgctgacacaaagaggtgccatgatgatgacaaagatgtgtcgggtggcatatttattaatgaaaaatacttttatcttggattgcgtgggcatgtggaggatcagttcaatcctaaaaacagatttgtggtgaccattttaaccatgtttactctgataactctatactcaacgatcatccccatttccctttacgtgtccattgagtgcacacaattcattaataacgatcttcatatgtaccatgctgagagtaacacccctgctttggcacggacttctaatcttaatgaggagcttggacaggttgaatatatattttctgacaaaactggcacacttacaagaaatctgatggaattctttaaatgctcaattggtggagaaatgtatggaactggcatcacagagattgagaaaggaggagcagaacgggctggaattagaatcgatgatgatgagggcaaaagatctgctaacgcggtccatgaaaaaggattcaattttgatgacgctagaatcatgcgcggtgcatggagaaacgaacctaatcctgaggcttgcaaggaattctttagatgccttgcaatctgtcatacagttcttccagagggtgaggagactccggaaaagataagttaccaggctgcctcacctgatgaggctgcacttgtgtctgctgctaaaaattttggtttcttcttttataggcgtacacccacaactgttatggttcgtgagtcacatgttgaaaggatggggagtatacaagatgttccatatgaaattctgaatgttctagaattcaacagtacaagaaagcgacaatcggtggtttgccggttcacaaatggaagactagttctctattgcaagggtgctgataatgttgtatatgaacgattggctgatggaaatcatgatatgaaaaagatcagtagagagcatctagagcaatttggttctgctggcttacgtacactttgtcttgcctatcgggatcttagtagggagcaatacgaaagctggaacgagaagtttgtacaagcaaagtcatctttacgagatcgtgataagaagcttgatgaggttaatgagttaccatcttttggttatatgacaattgacatgaactctgacagtgtattctgtatttgcttgaaaatgtggtcctttctgttagaacttatgctactggatctataa

SEQ ID NO: 89829 - DNA, 1603 bp, Zea Mays
actcttcgtgttgatcttcttggattgagtctaagttgccactctgttatatgctgccgagtttctccgctgcagaaggcacaggttacaagcttagttaggaagggtgctgagaaaataactctcagcattggtgacggtgctaatgatgtgagtatgattcaagctgctcatgttgggattggcatcagtggccaagaaggaatgcaagctgttatggctagtgactttgccattgcacagtttcgttttcttactgatttgcttcttgtacatggacgatggtcttacttgagactgtgcaaggttatcacatacttcttctacaagaatctgacatttacactaactcagttctggttcacttttcaaactggtttttctggccagcggttttatgatgactggtttcagtctctatataacgttatttttactgcgctacctgtaattatagttggattgtttgataaggatgttagcgcgtcactgtcaaaaaaatacccacagctttacaaggaaggcatcaggaattcattcttcaagtggagagtgattgcagtgtggggtttctttgccttctatcagtcaatagtgttcttctacttcactgcagctgcaagtcggcatggtcagggttcatctggcaagattcttggcctatgggatgttagcaccatggcatttacttgtgtcgtggtgactgtgaatctccgccttctcatggcatgcaactctataacgaggtggcattacataagtgtggcgggcagtatagtggcctggtttatgtttattttcatatactctgcaataatgacgtcatttgacagacaggaaaatgtgtattttgtgatttatgttctgatgagcacctttttcttctatctgacaatcgtacttgttccgatcatcgccctgtttggggatttcctatatctatcgatccaaaggtggctcttcccctacgactaccaaataatacaggagcaacacaaggatgagccacacgagtacagcagggtgccactaccagagaccagccacctaagcccagaggaagcgagaagctacatgatctcgatgctcccacgggagtcatcaaagcacactggctttgccttcgactccccaggatacgagtcgttcttcgcctcgcagcaaggcatcggcgtgccacacaagccgtgggatgtagcccggagagcgagcatgaaaccgcaacgagcaggaaaatcctagtcgggcgaacacctctccgctgtgtaaagtcttgtatatctggtttcttgaccacaggagtttttgtataggtagcagtactgtagcccttttttcgtgtttgtcacccatatgttgttttgggatgaaaagtaggcaacggtccgtttggctgttaaacaatcatgtagggatacttggtagataaaaccaaaggggtattggacatgcagttaggaattttagtttctggcgttcattgcgtgatgtagtcgagttgattggtcggcccgccatgcaacttaaatcatgttactattattggaggcctgtgcattgatcatatcccattttatttcaatataagaacacatcctactcc

SEQ ID NO: 89830 - DNA, 2061 bp, Zea Mays
caaaatagactaagctcatttcactaactataggtgctcatttgttatgttgttttggtacattcgatatgactgttggaccactgcattaggagttgcgacctatttgattgttaggcacttattggtttaggacttaagagttctattctgatatagattggaatgtatggacatagttggctctttgatgttgtatatcgttttcttatatgtttgcagctcttgaacactgaagctcctgacttgtacataaggcagaatccggttccaaatgcctacaccttagcaatcaacagcaaaaaaccattcattgtcgttcacacaagccttgtggagctgcttactccaagggaattgcaggctgttttggctcatgagctgggtcacctcaagtgcgatcatggtgtttggctcacttttgccaatatactcacaatgggagcatacactgtccctggtttcggcaggttactggctttctggaagagcagctatatagatggctacgagctgcagagctgacttgtgacagggcagctcttcttgtggtgcaagacccgaaggtacctttactgccttaactctgaaactacctcaatttttaaaatataagattgatttgtattgaacataagaactagcagaataaatagcgctatttttttgtctttgcttttgctcttgaaagtggatttttttcatggtctggccacaaattatatatgactccaagaaaaagtagaggtttgtgtagttttcaattcatcttccaagtaacaatctttagttcatagaaagaacagctgttctccaattttgatgaattagagctgcagcttgtagttttaacatataatggatacatgcttactctacaagttggtatcatcacctaatactaaactcctgattgtcctgaggtggtcatctctgttcttggctgtctgaaaataggaacgccttgttgtgtgttgtaatgcttatcctacaagtctgtcatcacttgatacttattcttgattgtcaagaggtagtcatctctgttctgatgaaattggctggaggatgcccatctcttgccgacaagctaaatgtggatgccttcctggagcaagctcgttcgtacgacaaggctgcatcgaacccagttgggtggtacatccggtcagaactgttgtcacttgaaccatgattcacgatattattgttgtggaaatgcatatgtgtttgtgttgtatgacatttctttctcaatctctttacatgttgcaggaacgcacaaaccagagagctttcacaccctttgcctgtgatgcgagccagagagattgatgagtggtcaagaagccaggagtacaagaccctaatgcaaaaaatgtttcagatggggctgaacaaagtatagttagtggcgacacatacgaagaggactgtagagtttgtagcttgtgtatggaagggaatgtctgtatatggagaaggctggtgcttcttcaccttctttagcgccatcacgcttgatttctattgcagtctcggttcctcatccctggctgggtttcgtttggatcgcgtagcagcaacatggcaactacgtcgcgaggcgaagcatccagttcatctccaccgcgaaaaacactggtgagcatttcattcatggtgattttgatgtttttaaaattttctctgagatttttccaggtgctaattcatggtgctaattcatggctatctcctttttgggtgcggggctgattggttagtggtgagcttggctctcatatgttccttctcgtggatgaggtcacacctaggtctcgaaggggatgcgaaaccagaaacagtgccagaggagaccgtacttgcgttgccgacatcttgcgccattccacagcgctccgcgtatcagaggatgggaagaaagttggtaggtctaaggagttgttgaagccagatgaggttatagagcaagtggactctaggacagttgctgcatcaccgcttccttacaatgtaaaactggaggaagtcgaatctttttttgctcagtgtggcaag

SEQ ID NO: 89831 - DNA, 1338 bp, Zea Mays
acgcattcaaccgaagcatctttgcgtgctacttcaggcgaagtcattgagttcgtctgcggtaaggcatcccatgttcctccgccgccgtctcctctccaccgctgccgctgcgaccgccgcccgcggcccaccgccgatccgcgtgtccctaacggagtccgcgggccgcggcgtcttcgctacccgcccagtatcttctggcgagctcctccactcagcgcagcccctcgtctcccacccctcccactctctgctccacgaggtttgctacaattgcctcagaaggaagcccggggaagggcgcgcttcaagcgggggtgactacttctgcagcgatgcttgcagggaccacgccaaggggttccatgacattgaaaagaatgtagattggtctttattcgattaccactgcagttcacgtgatctgaagtacccatacatggccaagcgccttgcttgcatggttatatcaggagctgctaatgcagattgccttaacatacttcagccagctctgttgcaccaggggacgctgattgagatgaaagaggaatttgagttgttggaatccacttttagaaaagctggatttcaggaagaaatcacaacctttttgaccatagattggtacatcaatgtattggcaagaatacgcataaatgcttttcgtattgaattggttgcaagttcatatgaggatctcttatcctcagcggcagcctctgtatcatgtgattcatcagttggcaatgcggtttatatgctcccatctttctacaaccatgactgcgatccgaatgctcacattgtttggctgcaaaacgcggacgcgaaattgaaggctctccgcgacattgaagaaggcgaggagctgtgcatctgctacatcgatgctagcatggatgccgacgctagacagaagattcttgctgatggatttggcttcgagtgccgttgccttcggtgcttgtctggagactagaaaccatgtctactttcttcctgagcatgagtttgtcttcgattgtagcggattgaagcggttggtgctgagtaccatcagaatcttaagttgcaatcttctgtacactagttacagccacgccaattgagttgtggttaagcattactttgccttttgcacttccctaccacgacatgctagaaatgttgtggtgtaaatgttgtagccgtttttgtttagcttcttgttcagtccttagtgtcagaaataaaatttcgataatactcggatcatttgaataccggaaaccttgtagctgtagttggggtagcattacatatattatactcttgactctctccgtttttttt

SEQ ID NO: 89832 - DNA, 653 bp, Zea Mays
aaagagaaaatttgggttgtaaatcgccactcctcttcccacacagtcattgagttcgtctgcggtaaggcatcccatgttcctccgccgccgtctcctctccaccgctgccgctgcgaccgccgcccgcggcccaccgccgatccgcgtgtccctaacggagtccgcgggccgcggcgtcttcgctacccgcccagtatcttctggcgagctcctccactcagcgcagcccctcgtctcccacccctcccactctctgctccacgaggtttgctacaattgcctcagaaggaagcccggggaagggcgcgcttcaagcgggggtgactacttctgcagcgatgcttgcagggaccacgccaaggggttccatgacattgaaaagaatgtagattggtctttattcgattaccactgcaggagctgctaatgcagattgccttaacatacttcagccagctctgttgcaccaggggacgctgattgagatgaaagaggaatttgagttgttggaatccacttttagaaaagctggatttcaggaagaaatcacaacctgtatcctttaaattttgtttcctctcattgtgactactcttagtttcttacaaccgaatgttgagaaaattgagtttttcatagagttcttatct

SEQ ID NO: 89833 - DNA, 1614 bp, Zea Mays
aaagagaaaatttgggttgtaaatcgccactcctcttcccacacagtcattgagttcgtctgcggtaaggcatcccatgttcctccgccgccgtctcctctccaccgctgccgctgcgaccgccgcccgcggcccaccgccgatccgcgtgtccctaacggagtccgcgggccgcggcgtcttcgctacccgcccagtatcttctggcgagctcctccactcagcgcagcccctcgtctcccacccctcccactctctgctccacgaggtttgctacaattgcctcagaaggaagcccggggaagggcgcgcttcaagcgggggtgactacttctgcagcgatgcttgcagggaccacgccaaggggttccatgacattgaaaagaatgtagattggtctttattcgattaccactgcagttcacgtgatctgaagtacccatacatggccaagcgccttgcttgcatggttatatcaggagctgctaatgcagattgccttaacatacttcagccagctctgttgcaccaggggacgctgattgagatgaaagaggaatttgagttgttggaatccacttttagaaaagctggatttcaggaagaaatcacaacctttttgaccatagattggtacatcaatgtattggcaagaatacgcataaatgcttttcgtattgaattggttgcaagttcatatgaggatctcttatcctcagcggcagcctctgtatcatgtgattcatcagttggcaatgcggtttatatgctcccatctttctacaaccatgactgcggtatgctcttcacttatacatttggaatgaatgcattttcttatcatcttcactacttgaatttcgttttgctaccagtgattcagttgaaaggttgaccaaccaaactccaggatttatcaccacccttgtggtatagtgcttgttcactatactactgaacttgtcatatctatattagaccattagtctctattgtattgcatagtggatgtctttgctagactactttcgatataaggacaaatttagctaagcttttgtatgtatggtaatgtaattgttatgtacggacaggcctatactaggcgcaacagggcctcacgatagggcccaaggcccatagttcatacttatctagatagcttagttcatacttatctagatagctagctttcttataaatacttgtaagacaccttgggattgtttaagcataaacaagattgtttccggcttcctttagggagtcgggattcctccagttctagccctagccgccacctctggccctagccggccgcccctgtgggctgcgccgtcaactacggcgtcggctcggcgttcctcgcacttcaagcctcgacccccaatctcccaccgctataacctacgatcagtaaggctagaggatttggtacataacaatctggtatcagagacctcgacgatcatgagcacgtccgccccctccaagccaccatcgccggtgcagcagccgccgccgtcgtcgggccagtctgcagcactgcccgctaccctggccgcgacccccatgtcgtcaggcgccatggtgatcgtccctcccggcgcgtcc

SEQ ID NO: 89834 - DNA, 1307 bp, Zea Mays
aaagagaaaatttgggttgtaaatcgccactcctcttcccacacagtcattgagttcgtctgcggtaaggcatcccatgttcctccgccgccgtctcctctccaccgctgccgctgcgaccgccgcccgcggcccaccgccgatccgcgtgtccctaacggagtccgcgggccgcggcgtcttcgctacccgcccagtatcttctggcgagctcctccactcagcgcagcccctcgtctcccacccctcccactctctgctccacgaggtttgctacaattgcctcagaaggaagcccggggaagggcgcgcttcaagcgggggtgactacttctgcagcgatgcttgcagggaccacgccaaggggttccatgacattgaaaagaatgtagattggtctttattcgattaccactgcagcgccttgcttgcatggttatatcaggagctgctaatgcagattgccttaacatacttcagccagctctgttgcaccaggggacgctgattgagatgaaagaggaatttgagttgttggaatccacttttagaaaagctggatttcaggaagaaatcacaacctttttgaccatagattggtacatcaatgtattggcaagaatacgcataaatgcttttcgtattgaattggttgcaagttcatatgaggatctcttatcctcagcggcagcctctgtatcatgtgattcatcagttggcaatgcggtttatatgctcccatctttctacaaccatgactgcgatccgaatgctcacattgtttggctgcaaaacgcggacgcgaaattgaaggctctccgcgacattgaagaaggcgaggagctgtgcatctgctacatcgatgctagcatggatgccgacgctagacagaagattcttgctgatggatttggcttcgagtgccgttgccttcggtgcttgtctggagactagaaaccatgtctactttcttcctgagcatgagtttgtcttcgattgtagcggattgaagcggttggtgctgagtaccatcagaatcttaagttgcaatcttctgtacactagttacagccacgccaattgagttgtggttaagcattactttgccttttgcacttccctaccacgacatgctagaaatgttgtggtgtaaatgttgtagccgtttttgtttagcttcttgttcagtccttagtgtcagaaataaaatttcgataatactcggatcatttgaataccggaaaccttgtagctgtagttggggtagcattacatatattatactcttgactctctccgtttttttt

SEQ ID NO: 89835 - DNA, 1323 bp, Zea Mays
aaaatttgggttgtaaatcgccactcctcttcccacacagtcattgagttcgtctgcggtaaggcatcccatgttcctccgccgccgtctcctctccaccgctgccgctgcgaccgccgcccgcggcccaccgccgatccgcgtgtccctaacggagtccgcgggccgcggcgtcttcgctacccgcccagtatcttctggcgagctcctccactcagcgcagcccctcgtctcccacccctcccactctctgctccacgaggtttgctacaattgcctcagaaggaagcccggggaagggcgcgcttcaagcgggggtgactacttctgcagcgatgcttgcagggaccacgccaaggggttccatgacattgaaaagaatgtagattggtctttattcgattaccactgcagttcacgtgatctgaagtacccatacatggccaagcgccttgcttgcatggttatatcaggagctgctaatgcagattgccttaacatacttcagccagctctgttgcaccaggggacgctgattgagatgaaagaggaatttgagttgttggaatccacttttagaaaagctggatttcaggaagaaatcacaacctattggtacatcaatgtattggcaagaatacgcataaatgcttttcgtattgaattggttgcaagttcatatgaggatctcttatcctcagcggcagcctctgtatcatgtgattcatcagttggcaatgcggtttatatgctcccatctttctacaaccatgactgcgatccgaatgctcacattgtttggctgcaaaacgcggacgcgaaattgaaggctctccgcgacattgaagaaggcgaggagctgtgcatctgctacatcgatgctagcatggatgccgacgctagacagaagattcttgctgatggatttggcttcgagtgccgttgccttcggtgcttgtctggagactagaaaccatgtctactttcttcctgagcatgagtttgtcttcgattgtagcggattgaagcggttggtgctgagtaccatcagaatcttaagttgcaatcttctgtacactagttacagccacgccaattgagttgtggttaagcattactttgccttttgcacttccctaccacgacatgctagaaatgttgtggtgtaaatgttgtagccgtttttgtttagcttcttgttcagtccttagtgtcagaaataaaatttcgataatactcggatcatttgaataccggaaaccttgtagctgtagttggggtagcattacatatattatactcttgactctctccgtttttttt

SEQ ID NO: 89836 - DNA, 535 bp, Zea Mays
taccaacctgttcatttacttgttgggactcctggccaaatacttgatcttaccaggagagcatttgtgtgctgaaagattattcaatgattgtcatggtgaggcagacaagctattagctccagagtttcagccttctgtggaggcacttgttcatttccttccacctagtcggcaacagcaacctttcctgttaatgtcaagggattcaaagagaaatatcttcctagaccttatgtgattaatctaagggttaatcatgtctgtgccattataattttccatgttttgatatgtgccactgaactttttaagcttacaaatgtgccattaaacttccagtcaaatatgaaatagaccattttatacggttttgtctgaatcagaccatccaccagtgatgtattttcgtatttctttgtacccttgcttgaacgaacactgattttgcgatgaacgcatcacgacttgtattctcctggctgctggagctgcacttcctaccagagctgcgcttgctcttgaagtgctaaat

SEQ ID NO: 89837 - DNA, 531 bp, Zea Mays
gaatttctgcgatttcatcaatacgttcgcaaggcgagtgtgagatgtcatcatcacgcacgtaaagctgctttccggggtaagcccgaagaaatagtgaaatcccgcgctcgatatccgcgtgtgtatcaactgaagcgtgactttccgcatctgacaatgtcgattaacggtggtatcaagtcgctggaagaggccaaagcacacctgcaacatatggatggcgtgatggtcgggcgcgaggcgtatcagaatccgggtattctggcggcggtagaccgggagatctttggttcctcggataccgatgccgatccggtggcggtagtgcgcgccatgtatccgtacattgagcgtgaactcagccaggggacgtatctcggccatattacccggcatatgttgggcttgttccagggtattcctggcgcgcggcagtggcggcgttatttaagtgaaaatgcccataaagcgggtgcagacaataatgtgctggaacacgcgctcaaactggtggcggataagcgttaa

SEQ ID NO: 89838 - DNA, 2046 bp, Zea Mays
ctcctttggtccacgcttttttcgctgatgatcccaccgtgaccgaggttttgtcaaaaaaaaaaaaaaacaacaacagtccctcccctcccctccctgctcctctaccccttcctctcccggcgaccagctggcctctcctttgttgaggcgagagacccccacccgatccggcgatggacgccgcgtccaggccgcctccgccccacggaacaggggtccgcgtccgcgccccgctggtggagtctgtctcctgctactgcagattagatacaggccttaaaactgttgttgaggccaggaagtttgttcctggcgcgaaaatgtgcatgcaacctgaagtcaaacaaaacaagcgcaagtcaaggggctcaaaaaaggaaaggtgcaggactcaagcaccacttttacctggccttcctgatgatcttgctattgcctgccttatacgagttcctcgacttgaacagcccaaactcaggatggtttgcaaaagatggaaccgtcttttgtctgggaattacttttactccttgcgtaagaaaattggagtggcagaagaatgggtatatgtctttaaaagggaccgtgaagggaagatatcctggtatgcctttgatccactccaccagctatggaagtcactcccaccagttccacaagagtattcagaagcattgggctttgggtgtgccgttctgagtggttgctatctgtacttgtttggcgggaaagatcctttgaggggttctatgaggcgtgttgtattctacaatgctcgtacaaacaaatggcaccgggctccggatatgatgaggaaacgtcacttttttggttcttgtgtaataaacaattgtctctatgttgctggaggagagtgtgaaggaatacagaggacgctgcagtctgcagaagtttatgatccaaataggaacagatgggcctgtgttactgaaatgaacaatgggatggtgcctttcattggagttgtatatgatggcaagtggttcttaaaggggctagattcccatcgccaagtaactagtgaggtctacttaccatcatccaatacatggtcagcaattgatgatgagatggtcacaggctggcggaacccaagtatttctttcaatggccgtctctattcagctgactgccgggatggctgcaagcttagagtctatgatgagaacacaggaacatggacaaggttcatggacagcaagcaccacttgggcagctcacgtgcctttgaagctgcagctttggtgtcactaaatgggaaactctgtgtcatcaggaacaacatgagcataactcttgttgatgtctccaacccaacaatgagtgtcgagacagatagtgcgcgcatgtgggaaactgttgttcggaagggccagcacaggtcgtttgtggcgaacttatggtcgagcattgcaggacggaacttaaagagtcacattatccattgccatgtgctgcaagtttgaggtcaggttttgttagtgggaacatgatcaagttttttaagaagcaaaaggttcagatcagtgacagaaccctccatttcgaaggtagtaaggtttcattgcagaatcgcggggaaaaaggtcattggcgtgccactgctgcccccaaagtcccaaatagttatttgctctcttccagaactgaaaattccaattactttctggcaacatttgaagactcttatcattcatggataaggttttttcagattttgagtgcaaaccagaaagtgactaggaacttccctagtgtaatgacattttccccttgctggcaggctgggaaatgtgtttggtggatatattggtctcttatcatatttatctatctttgcattgtgtaatatgtggcatcttactgtgtaatgttggtgtatattgtagcggcggactagctagactccaggattagagtagtcaggattatgcctattatgcttcaattttttgttggaatgcctgatatcctccgttaataaatatgtgttaataaatatgtgataccgtgggctttttt

SEQ ID NO: 89839 - DNA, 913 bp, Zea Mays
agaaaatgttcctcgcaaagtttggctgacggcacccaccgcccacagaagcgcacctctgttctttggtgtgtggccgtgtggattcaaaaccgctgaccggccgcttatttaagcccttgccccgccggttttctcttctcccgtcggcgctggtccacgcggctccaacacctgcctgcctgcctgattcttacaccaaccaaccacgcgcgccaagccgaattcgtcttccaccgatccgccccgcccgtttcccattgcttagcttgctatggcgcagcagcagccggtgcggcggattctgaaggtggcaccgccggggaagggggacggggaatccttccccacggtgcaggcggcggtcgacgcggtgccgctgggcaaccgggcgcgcgtcgtcatccgcctcgcgccgggggtctacagggagcctgtctacgtcgccaagaccaagaacttcatcaccgtcgcgggggcctcgcccgaggccaccgtcgtgtcatgggacaacaccgccacgcgcatcaggcactcgcaggtacgccgcggcgtctgctcccttctccgcctgcctgcgtccagctcgacgaaatgcccgacaggcttgtgtgcatgtgctacggtcgctatgattagtaggtcccaaggatcggattttagctgagctgattaacgtaaacctttcttagcttccgccacatagtttgatcaaagtcatgcagatgtttggagttttatcataagatgcatgtgtcttcacattaaaagcagacacaatactgctggtgcatatgcatatatatagagacaaccaagaaactgttcctgcatggtttcaccaatttcattcctcgaaatgtgcttaatattttgactaattcttatttacatatctcataacgatgaactg

SEQ ID NO: 89840 - DNA, 1560 bp, Zea Mays
agaaaatgttcctcgcaaagtttggctgacggcacccaccgcccacagaagcgcacctctgttctttggtgtgtggccgtgtggattcaaaaccgctgaccggccgcttatttaagcccttgccccgccggttttctcttctcccgtcggcgctggtccacgcggctccaacacctgcctgcctgcctgattcttacaccaaccaaccacgcgcgccaagccgaattcgtcttccaccgatccgccccgcccgtttcccattgcttagcttgctatggcgcagcagcagccggtgcggcggattctgaaggtggcaccgccggggaagggggacggggaatccttccccacggtgcaggcggcggtcgacgcggtgccgctgggcaaccgggcgcgcgtcgtcatccgcctcgcgccgggggtctacagggagcctgtctacgtcgccaagaccaagaacttcatcaccgtcgcgggggcctcgcccgaggccaccgtcgtgtcatgggacaacaccgccacgcgcatcaggcactcgcagtcatccagggttataggaactggaacattcggctgtggtacgttcatcattgagggggaagatttcattgcagagaatatcacgtttgagaactcagctccccagggctctgggcaggccgttgcagtccgggtaaccgcagataggtgtgctttctacaactgccggttcctcggttggcaagacacattatacttacactacgggaaacagtacttaagagactgttatattgaaggccattgtgacttcatctttggtaactctgtcgcccttatggagcattgccatatccattgcaaagcagcgggatacatcactgctcatagccggaagtccacatcagaatctactggctatgtgttcttgaggtgtactattactggacatggagaagctggatacatgttcctaggtcggccatgggggccctttggaagggttgtctttgcgtacactttcatggatcgatgcatcaagccttctgggtggcacaactgggacaaatccgagaacgagcgaactgcttgcttttatgagtacaggtgctcagggccaggcgccctcccatcgaaccgggtcacatggtgtagacagttgctggatgttgaagcagagcagttccttgcgcacacttttatcgacccagacgtcgataggccatggctcctccagatgatggcgataagaataccagcctcagcatagtttgatcccggcagccgcaggtcctgcatggttcatgcctcctttctagcctatttaaataaactaagttggaggatgcattatatttgcataagtttgtaacgtttggtgaattagtatccactttcatctcactgtgggcggtggggatagggaatgagagagcttctcttgtaacgaaccccagcactaggctgaaatatatgcagattttattttgcatgaactttttttgtttcattcagaactcgagcactttctctttcttttttttgcgtgttataagcgtatatggtaccacagattatact

SEQ ID NO: 89841 - DNA, 288 bp, Zea Mays
atgcgcggtggcggtggttccacgatccagagtagtggcggtggttcccaggtcggtggccgcgactccctgatccagatggcgagcgatggcggggcccctgtgcaggcagcggcggcgtccctggggcctcgaggcggcgacactcccaaggcgggggagcaagtggcgctccccgacgtgcgagtagcgacggtgccgcacgaggcgcgaggttcgagcggcgtcacagaaggcgcgaggtgcacgcagcgacgatcgcgcatgacatcctccgatccggcgtag

SEQ ID NO: 89842 - DNA, 931 bp, Zea Mays
aagatagtatttgtggcttccaagtacgaagtcatatgaagcacatattaggaggtggagtgcaagcaagagctcaggaaagtaaatcctgcaaatgcaatgattgcaaaataagcacaacaaacaagtagcattttttattccttcagcacggaaagagtgaattgatatgctatgtaagcctcctcagttacctctcaacgcattctgttggcttcactggttcaaggagtggaacatctaggtcatccttcacaagatctcctaccttctcagtgactacccaatcatttgcccgtgcagtctcaagtaaaccggttacagcagcacgcatgcggtgcatggacataacattctcgaagagaatccagaagggcatcaaatggagagacctgatatatcacacaatataatccaaagatggccacattgacggaagatggaaggttgagcattgttggattatgcgtaccaaggatttctgatggcgttcatacatgtgattgcagtgggaatatagaccagcccccatacaggaatgctgacaccaggaaccatggcagacaaagggatgacaacacaataaaacaagaatgtcacaaggggagcaataacccttcggacaaagaaaaagctgtataacagatgatgtttcttccatattgacacctcctgcatcatgtgcagatggcaattataacatgagaaactcatcataattccttacagggtgaggaccaagagaacaaaccttgttcgtaatgatttcccatgccattttcctgaagagattggcggcaccacaagtccacctatgttgttgatgacggtaggctttgaaggtacttggtagttcactcttaacctgtataagattcacaataattgtaatgctgacatggtacaatagatatagctcatcaaaaagcaa

SEQ ID NO: 89843 - DNA, 892 bp, Zea Mays
agcacatattaggaggtggagtgcaagcaagagctcaggaaagtaaatcctgcaaatgcaatgattgcaaaataagcacaacaaacaagtagcattttttattccttcagcacggaaagagtgaattgatatgctatgtaagcctcctcagttacctctcaacgcattctgttggcttcactggttcaaggagtggaacatctaggtcatccttcacaagatctcctaccttctcagtgactacccaatcatttgcccgtgcagtctcaagtaaaccggttacagcagcacgcatgcggtgcatggacataacattctcgaagagaatccagaagggcatcaaatggagagacctgatatatcacacaatataatccaaagatggccacattgacggaagatggaaggttgagcattgttggattatgcgtaccaaggatttctgatggcgttcatacatgtgattgcagtgggaatatagaccagcccccatacaggaatgctgacaccaggaaccatggcagacaaagggatgacaacacaataaaacaagaatgtcacaaggggagcaataacccttcggacaaagaaaaagctgtataacagatgatgtttcttccatattgacacctcctgcatcatgtgcagatggcaattataacatgagaaactcatcataattccttacagggtgaggaccaagagaacaaaccttgttcgtaatgatttcccatgccattttcctgaagagattggcggcaccacaagtccacctatgttgttgatgacggtaggctttgaaggtacttggtagttcactcttaacctgtataagattcacaataattgtaatgctgacatggtacaatagatatagctcatcaaaaagcaa

SEQ ID NO: 89844 - DNA, 372 bp, Zea Mays
atgggggtgctccttacaatgccaaccacaccaacagatcggatgaaggaaattgcacaagcttcacaagaatttatttatactgaaacggttttaaatgcaaacagtgatcctgcaaaaccgccttccattgaagtacctgcattgtcattagatgaattgagggaaaagacggatgattttgggtccaaggctttggttggtaaggggtcatatggaagagtatattatgctgttctggaaaacgaacaacatgtggctgtcaagaagcttgatacttcagcagatcctgagcctgataatgaatttctagcacaggtcactcgaaacttggaaaaccgtgaatgcaaaaatgatatccatgctacatag

SEQ ID NO: 89845 - DNA, 207 bp, Zea Mays
atggcgatcgcagcatgcacggacgcggttggagcaaacacatcaagatcggagcacgacgtgaattttgggaagccacagttggagcgcctgcgggcgaggatggtggtcgcggttggagctcctgcgattataggtgggttcatggcgagcggaggggttgcgagatttctggggcgctcgggtcagttgcaagctccatgttaa

SEQ ID NO: 89846 - DNA, 2177 bp, Zea Mays
aagagaaagaggaaacgatcgtggcagcgtgggaaggcacagccaggtgtccgacgacggcgacgcgcggggcgaaaaaggcgaagggcgagcgaggaggagaatcaaataacgcagcccggaggccacaagacgagcttgtggctgtgcgcccctcgccgtggcccccacccaccttcttcccctcttataccctcccctgccgcccacggccaggccagagcagatatcatccgttcgtttgtttgcccttttttgccggcctcctcgtctcttccggttccggctacaagtgaagtgagctcggccgtctgttgcctagcgtgctgcttcgttcgtcgttggcttgcagcagcttgccgaagagaagaaagcagcaggcccggagctttctgtttgtttggatccgagtgagaagaagatggtggccgagtgccacggaggaggaggagcagcagcaggaggaggggactttctcatcaagctcttcgggatgaccatccccgtgccggagtgcggcgacgccaaggatcttcagcagagcaagagcaacaggtggaccgagcaggatcaggattcccatggcctggagaccgcgcccgcgcccgcgcacacggacacctccgacccgtccccgcagccggaggtcgtggacgccgaggaccccacggagacgcaacagaggccctgcaacggcgacggcgacggcgatgctgccggccagagggagaagctgaagaagcccgacaaggtgctgccgtgcccgcgctgcaacagcatggacaccaagttctgctacttcaacaactacaacgtcaaccagccgcgccacttctgcaagaactgccagcggtactggacggccggtggcgccatgcgcaacgtgcccgtgggggccggccgccgcaagaacaagaacgccgccgcctcgcacttcttccagagggtccgggcgaccaacgccacggtgctcagcttcgggggccatggcggcgcgcctcctgctgcccgcttggacctggacctcgccgagcagctgagccaccagctggccccggtcaggagcgccggcgacgcgggccgcccttgcagcgaaggatcgagcagcagggacggcaacggcagcaggtcttctgtagacgaagctgcagcaaacgcagacgacgggtcagtgcagcagcacccaggcccagcaagcatgaacagcagcggggcaaccgtgtggccgccgtacagctgcgccccagctccggcggcgtacttcccccagggcatcgcgattccgatctacccggccgcaccggcctactggggctgcatggttcccggagcttggagcctgccatggccggtgcagcacccgtcgtcgtcgtcgtcgcccaccaccaccagtgctccttcagtcgtctcgtcatccggggcagctgacgactcatcatcccacgcgctgggcaagcgcccccgggaccgggagggtgacgatgggagaaacggcggcaacgccaaggtgtgggcgcccaagagcatccggatagacgacgtggacgaggtggccaggagctcaatctggtccctcgtcgggatcaaaggcgaccagacgaagcagcaggacgcagcagacgaccacgccggtgggcacagcaagcagctcgggacggtgttcgagcccaagcgcggcgaggccaccaagaaggccatgatgacaagctcgccgctccttcacgcgaaccccgttgcgctcacgcgctccgtggccttccaggaggggtcttgattcttcttcaagtacatccatcagcagcagcaggaatttcctcatgcagcgttccttctcatctgaacttctgaactgaacatgagctgatcagcctgacagtacgtactgaattttgtttttatataaatcatcataggattgtaatatctatctatatgctgagtgggaaacttagctagcgtatgtgtaagtggacttgtaatataggcggcacgcaggatgtacatagaattaattagctatatgggtttgagaaagaccaggagatcaataagaggtccctgggtgtagataaataacattaggggaaggaatgtattgcttcaggtatttcactcttcagcaacttgttgtcaaagtcgattctataacaaagtattctattttttgttcatatata

SEQ ID NO: 89847 - DNA, 78 bp, Zea Mays
cacaaaaacgatgggaagcttcgacatccagccgatgggaagcagtggcaagatttcaatgagaaccatcgagacttt

SEQ ID NO: 89848 - DNA, 2110 bp, Zea Mays
gtcgtaagtctgcgctttcatcccttattgttccaggaacaaacaaaatctacaggtttccaagacaccaggacggagacatcgaggaggcggcggagacgccgccgcgtccttccgcttctgagccgtataacaacaaacccctcggccccgtcccctctgtccatcgatcaccttgaccacgtgcctgtgccgcaggccgcagccaggcatctccggcgaatctggtttgaggcgcggagagaggatatttgcatgcgggactgatcaatcaaagcaatggcagtagcgcccatggactgcggtgctggttcgattagtctaggccacaaggttttatgccgtttcggagtacccaacagcagtagattgcgatgggtgggatatgacaggaaacaaaggacagatcagttgattgctagagccgtatccgtggatcggacacaactagacttctcgaatccggactggaagacgcagtttcaagaggatttcgataagcgcttcagcttgccacacttgacagatgtaattgatgtggaaccgaggccaactactttttctctcaagagcagagcccctcttgagaacgcgaatggtaccatgcaaggatcatggaacggctatgtcaatgatgatgacagagcacttttgaaggttattaagtttgcctcaccaacttctgctggagctgactgcattgaccctgattgtagctgggttgaacaatgggtgcaccgtgctggtccacgcaaacaaatatattttgagcctcaatatgtgaaggctgggattgtgtcgtgtggtgggctctgcccaggtctcaatgatgtcattcggcagattgtgcttacacttgaaaaatatggggtgaaaaacattgttgggatacagcatggattccgtggattttttgaggatcacttatcagaagtgccactttctaggcatgtagtccaaaatatcaatcttgctggtggtagcttcttaggagtctctcgcggtggtgcaaacatttcagacattgttgacagtattcaggctaggaggcttgatatgctatttgtgcttggtggaaatggaacacatgctggagctaatgctatacatgatgagtgccgcaagagaaaactgcaagtatcgattgtatgtgtccccaaaactattgacaatgacatattactgatggacaagacctttggatttgatactgcagtggaagctgcacaaagagctatcaactctgcatacattgaggcacattctgcatttcatggcattggactggtcaagctgatgggaagaagcagcggcttcatcacaatgcatgcctccctgtcaagtggccaagtagatatctgtctgatacctgaggtaccattcactgttgatggaccgaatggagttcttcgacatctcgaacacctgatagagaccaagggatttgctctggtttgcgttgctgaaggagcaggacaggaatactttcaaaagtcaaatgcaactgatgcatcagggaacatggttcttagtgacattggtgtgcaccttcagcagaagatcaagtcccattttaaggacataggagtccattctgatgtcaagtatattgatccaacatacatgctccgcgctgtgcgagccaatgcatccgatgccatcctgtgcaccgtgcttggtcagaatgctgttcatggtgcctttgcgggttttagcggcatcacaaccggggtgtgcaacacacacaatgtgtacttgccgataccggaagtgatcaaatccacgaggtttattgatccaaacagtcggatgtggcaccggtgcctgacctcaaccgggcaaccagacttccattgatcaattattaaggaagcttgtagtagcatccgagtgtaaaggaaggttgtgtatagtatagcgaaagggacctaattgctttgtcaggccttgtctagcagcatatggttctgcaaaacattgttttgcattgtagataggctaagtttgaaataagaggtgagataggcaggatagccttagtatggcaaaatgatcatcttgaaggattcatgagtgaatgatagctaataaaatatttacgcttgatcaa

SEQ ID NO: 89849 - DNA, 753 bp, Zea Mays
acgacccgaggtggagctcgatgcggccagggcgcgacgagcagagagagggcgcggctggagagagatggagggaggagagaggagaccgcgtgcacacagcagagaagctcggctggggaggcgcagcggccatggagcttggggccgggcatgcagggagcagcgcggtcagccgagctggagggcgagcaacgccggcgagctcgcacgcggagaagcagcaggcacggcaaccatggctggagcaggaacgcgccggggaagagcagcagccgggagagggcgctcgcagcagccgtcaccggcgaggaagggtgtaggggcacggccaaaaccaaacacagggagccatggctgcaactccggcggctggagacctacagtgtccatggacgcgagcagggatccggcgaagtggaagacgagcagaggcgcggtccgagcgcatgggagctccaggacgtgcggcacacagaccagagagagaaagaagggcgcggcttgggaaagcaggaggcgcgccagggagcttcacagcgagcggacgccagggaaccgcagccatggaggtgggcgccggcagaggagcgcggcgcggagggagatggagcagggagggcactggcgcgtccacggcgaccatggaagagaagcgtgcgcagggagacgagggagggagaggagctcgaccagagagaggggcgccacgatggagggactcggccagcgctggggacgacggagcagagg

SEQ ID NO: 89850 - DNA, 1655 bp, Zea Mays
aggttccagctcggcatctctggcacagagacgcgccctcaaccaacaccccctctctagctctctgaatctgtgcttctgttgggaaggaaggaaggttgatatactccccagctcccccatgctcctctcgctcctgtgatgaagccaatggccaccaatggcatggccccttccttctacccggccaacttcctcctccaaatgcagcaagccctgcctcaccactaccagcagcaggagcagcaccatgaaggccacgacgacgaggaccacgaggcggcgcaccatctcctggctccccctcccgcggccctcgtcagccctttcctccacgacttcggcggcgccatggcggccgcgccgccgccgccaatgctggccggcggcttcggcggcaagcgcatgtatccagacgtcggcgggatggccggcgacgacagccaccacctgcacgcggagccccagcagcagcaggagcagcaggcgtcggacgacgaggaggaggggtccgccgcggtgggcggcggcgagcggaagcggcggctgagcgtggaccaggtgcgcaccctggagcgcagcttcgaggtggccaacaagctggagcccgagcgcaaggcgcagctggcccgcgcgctggggctgcagccccgccaggtggccatctggttccagaaccgccgcgccaggtggaagaccaagcagctggagaaggactacgacgcgctgcgccgccagctcgacgccgcccgcgccgagaacgacgccctcctctcccacaacaagaagctacaggcagagatcatggcgctcaagggaggcggaggcggcggagggaggcaggaggcggcgtcggagctcatcaacctcaacgtcagagagacggaggcgtcctgcagcgagaataacagctccgagatcaacggcctcgacgtctccaggcctgatccggccgccggcgagagccccgccatgaacagctaccgcggcggcctcccgttctacgcctccgctgccgcccgcgccgacatccaccaccagctcctgcacagcggcggccagccgtccccagccgcggcggcgccgcctaagatggagctcgcccccggcagtcctcccgccacggccggtggcggcggaggcacctttggcagcctgctgtgcggcgccgctgtcgacgagccgccgccgttctggtcgtgggccgacggacaccacacctgcttccagtgaacaagtcaaatacgtacgattcttcccattcgtcatacacggtgagccacggatccaacagcacgtcgtcggccgccgccgacgtatatgttgtgggcaatgcaaatgcctcgtacgtgttgaacaaattgatcaaagaagcagctcggatatgcgaggtgatccattggatgagatgttccaatttgagttcgatcgagattaggatcatgcacggagtgaatcatatatacgagtatagctagattttggagttgagtagtatgtttttcttcttctttctattattacttaattatttctcccatctctctttatttatcactgttttcctgtttaattaatatcatatataggtgaatacatttgtgaggcagtggtgatgttatatattatgcatataggattatggtaccttgtca

SEQ ID NO: 89851 - DNA, 545 bp, Zea Mays
tcccccactccagtcgttgcttttctttctgttacttcgaaagtagctgcttcagctttagccacgtgaattctcgatattcttttttatttctcatcaaacgaatggcatcttcttctggaaatcctagctattcttagcatgatattggggaatctccttgctaaaccatcaaatttgatctccttccatatttcacaagttgtggctagttcagcactccatttgcaatctgctttgataatttcattaccttcacgagcaagatcgtgcccttcgttacgagcttgtacacaggcttctaaagccgcacgattagctgctgcaccaggtgcatttccccaaggatgtcctaaagttcctccaccaaattgtaatacggaatcatctccaaagatttcggtcagagctggcatatgccaaacatgaatacccccagaagccaccgatataacacctggcatggatacccagtcctgagtgaaaaagataccgcgagaacgatctttttcaataaaatcatcgcgcaataaatcaacaaaacc

SEQ ID NO: 89852 - DNA, 210 bp, Zea Mays
atggcttatggggattctgctagggcatataaattaacaggccggatggggattggagatataccaggatggggattggagagccacttgttggattggagggcgccgccgccgaggattgggattggggtggcagcggatatctgtcttgggtgcgatggggattggggtggcatggtctttaaggaacaccatcatctgcgtagatga

SEQ ID NO: 89853 - DNA, 2297 bp, Zea Mays
ggttagaaaacagaaccaaaataaaagcagcacaaaagaagaggagaaaacgaattagaataagtaaaagagaagaatcccaagtacacattttaggtgcgtgtacaccacattgcagaggggagagagcgtgctacggcggcggcggcggcacagcaggggaagaacgtacacccgcagtcgaaagaggacggcgagacagctctcttcctatccacattctatataatctatggctaatcaggtagagattagagtgattgagagagcggggaaggaagttttgtacagagaagagaaagaggtagttgatgggaagggtttgatgtgattgccctttcttttctctttgcttcctggacacaacagccgccgccacttcctgccatcctttcgtcgttgattcggtgttcttggatcggatgccttcatctgcctagatcggagctagagcaaggtgcgtggtgtaaatcccgagaggaggaagaggggagggggtccaggccgcttgttcttgccgcgtacggttcttccaagaacccgcggcggggatggatctctacgatgagggagaggaaatggccttacaagacggggactcctgcctcgcgccacgggcttcgcggggcggatgcgaggtggacttgcagtgggcggatggcctcctcgaaggcgccgaccggaagcggcgtgcgcgggaaggcttcaaggatgaggtccatttcgtccaggaaatggacgaggtggatggcagcggcaagcgcagcaagccgccgtcgccgcaaccgcacacaccagatattcgtgaagctcatgcccctggccgccgtcgcaccgtggtggccggcggtggggagctcagctgtggcggtggtgatctcataggacaaattggccgggacctgtccatcaactgcctcctccggctgtgccggtcagaatatggctcagtggcatcgctgaatcatgatttccggtctcttgtgcgaggaggggagatctacaggctgcgacggcagaataacatcgcggagcattgggtgtacttctcctgtaatgttttggagtgggatgcttatgacccttaccgcaagcgttggatctcggtgcccaagatgcctcctgacgagtgcttcatgtgctcagacaaggagtctttggctgtgggcaccgagctacttgtgtttggaatggcacacattgtcttcagatacagtatactgacaaactcttggacacgaggtgaggtgatgaattctcctcggtgtctatttgggtcagcaagcgttggggagaaggcatatgttgctggtggcactgattcttttggcaggattctcagctcagcagagctgtacaactcggagacacatacttggacaccactccctagcatgaataaggcacgtaaaaattgctctggggtgttcatagatggcaagttttgtgtcattggtggtgtgacaaacaacaacatgatcttgacctgcggtgaagtgtacgatgtgcagagcaagacttggagggtgattgagaacatgtctgggggtcttaatggagtgagcggtgcacccccacttgttgcagtggttaagaatgagctgtatgctgctgattacagcgggaaggatgtgaagaagtatgacaagcagaataatgggtggatcacacttggtaaattgcctgagcggtctgtgtccatgaatggatggggccttgcattcagggcatgtggtgagaggcttattgtcattggtggcccaagaacaccagttgggggcatgattgagctgacctcatggactcctgatgacaagccacctgtgtggaatttgatggacagacggccatctggaaattttgtgtataattgcgctgtgatgggctgctgagctcgcttcatcaagggtctgcatagtgatgtttacaaagagaggtatgcacaggcaggcttgtttagcttcagcactccttgatgggtttctgcctttgaccttgtagctgatgtagttggcatccacaggaacaggatctttgtaacctttttcatacatcagtttctgccccagctaatccatttctttcatttacatttggatcagtcttatgatctagaagatgataccatgcaaaagatgtcataccaataatctagaaacatcaaatttcagaggctgtccatcattgatgatgacagagcaagttattttggtcattttcccttgtctctgtctgcaacaaagaagtgaccatcttgttattagcgtgttcctaatatttgagttatcatatatgtt

SEQ ID NO: 89854 - DNA, 2039 bp, Zea Mays
gagagagcgtgctacggcggcggcggcggcacagcaggggaagaacgtacacccgcagtcgaaagaggacggcgagacagctctcttcctatccacattctatataatctatggctaatcaggtagagattagagtgattgagagagcggggaaggaagttttgtacagagaagagaaagagatcggagctagagcaaggtgcgtggtgtaaatcccgagaggaggaagaggggagggggtccaggccgcttgttcttgccgcgtacggttcttccaagaacccgcggcggggatggatctctacgatgagggagaggaaatggccttacaagacggggactcctgcctcgcgccacgggcttcgcggggcggatgcgaggtggacttgcagtgggcggatggcctcctcgaaggcgccgaccggaagcggcgtgcgcgggaaggcttcaaggatgaggtccatttcgtccaggaaatggacgaggtggatggcagcggcaagcgcagcaagccgccgtcgccgcaaccgcacacaccagatattcgtgaagctcatgcccctggccgccgtcgcaccgtggtggccggcggtggggagctcagctgtggcggtggtgatctcataggacaaattggccgggacctgtccatcaactgcctcctccggctgtgccggtcagaatatggctcagtggcatcgctgaatcatgatttccggtctcttgtgcgaggaggggagatctacaggctgcgacggcagaataacatcgcggagcattgggtgtacttctcctgtaatgttttggagtgggatgcttatgacccttaccgcaagcgttggatctcggtgcccaagatgcctcctgacgagtgcttcatgtgctcagacaaggagtctttggctgtgggcaccgagctacttgtgtttggaatggcacacattgtcttcagatacagtatactgacaaactcttggacacgaggtgaggtgatgaattctcctcggtgtctatttgggtcagcaagcgttggggagaaggcatatgttgctggtggcactgattcttttggcaggattctcagctcagcagagctgtacaactcggagacacatacttggacaccactccctagcatgaataaggcacgtaaaaattgctctggggtgttcatagatggcaagttttgtgtcattggtggtgtgacaaacaacaacatgatcttgacctgcggtgaagtgtacgatgtgcagagcaagacttggagggtgattgagaacatgtctgggggtcttaatggagtgagcggtgcacccccacttgttgcagtggttaagaatgagctgtatgctgctgattacagcgggaaggatgtgaagaagtatgacaagcagaataatgggtggatcacacttggtaaattgcctgagcggtctgtgtccatgaatggatggggccttgcattcagggcatgtggtgagaggcttattgtcattggtggcccaagaacaccagttgggggcatgattgagctgacctcatggactcctgatgacaagccacctgtgtggaatttgatggacagacggccatctggaaattttgtgtataattgcgctgtgatgggctgctgagctcgcttcatcaagggtctgcatagtgatgtttacaaagagaggtatgcacaggcaggcttgtttagcttcagcactccttgatgggtttctgcctttgaccttgtagctgatgtagttggcatccacaggaacaggatctttgtaacctttttcatacatcagtttctgccccagctaatccatttctttcatttacatttggatcagtcttatgatctagaagatgataccatgcaaaagatgtcataccaataatctagaaacatcaaatttcagaggctgtccatcattgatgatgacagagcaagttattttggtcattttcccttgtctctgtctgcaacaaagaagtgaccatcttgttattagcgtgttcctaatatttgagttatcatatatgtt

SEQ ID NO: 89855 - DNA, 1955 bp, Zea Mays
atggatctctacgatgagggagaggaaatggccttacaagacggggactcctgcctcgcgccacgggcttcgcggggcggatgcgaggtggacttgcagtgggcggatggcctcctcgaaggcgccgaccggaagcggcgtgcgcgggaaggcttcaaggatgaggtccatttcgtccaggaaatggacgaggtggatggcagcggcaagcgcagcaagccgccgtcgccgcaaccgcacacaccagatattcgtgaagctcatgcccctggccgccgtcgcaccgtggtggccggcggtggggagctcagctgtggcggtggtgatctcataggacaaattggccgggacctgtccatcaactgcctcctccggctgtgccggtcagaatatggctcagtggcatcgctgaatcatgatttccggtctcttgtgcgaggaggggagatctacaggctgcgacggcagaataacatcgcggagcattgggtgtacttctcctgtaatgttttggagtgggatgcttatgacccttaccgcaagcgttggatctcggtgcccaagatgcctcctgacgagtgcttcatgtgctcagacaaggagtctttggctgtgggcaccgagctacttgtgtttggaatggcacacattgtcttcagatacagtatactgacaaactcttggacacgaggtgaggtgatgaattctcctcggtgtctatttgggtcagcaagcgttggggagaaggcatatgttgctggtggcactgattcttttggcaggattctcagctcagcagagctgtacaactcggagacacatacttggacaccactccctagcatgaataaggcacgtaaaaattgctctggggtgttcatagatggcaagttttgtgtcattggtggtgtgacaaacaacaacatgatcttgacctgcggtgaagtgtacgatgtgcagagcaagacttggagggtgattgagaacatgtctgggggtcttaatggagtgagcggtgcacccccacttgttgcagtggttaagaatgagctgtatgctgctgattacagcgggaaggatgtgaagaagtatgacaagcagaataatgggtggatcacacttggtaaattgcctgagcggtctgtgtccatgaatggatggggccttgcattcagggcatgtggtgagaggcttattgtcattggtggcccaagaacaccagttgggggcatgattgagctgacctcatggactcctgatgacaagccacctgtgtggaatttgatggacagacggccatctggaaattttgtgtataattgcgctgtgatgggctgctgagctcgcttcatcaagggtctgcatagtgatgtttacaaagagaggggctgcggacatatgatggctgctgtttctggtttctcattatcgtcagcgtcacatggatctacacttagagatggcagatggcaaaggggcccgattccccttttttttgcggggaattcctcttgtttggttaggtatgaattggtgggaatttaagtggaatccactcaaattctcattaatccacccataaccgaacaagcctagaggtgatgaaaaatgttcttcctccacagagatgtaatccacccataactgaacaagcctaaaggtgatgaaaaatgttcttcctccacagagatgtaaacggggaaaaaattatctcggcggataaagagagatggagaagcattcctcattatcgtttcccgcgggtccaatttatatatgatgatgttttcatatacacaaaatgatttcttacatgtaaattactttatcaagagaccaatcgttgtataaatgtgttaattttgacgtacacaaaatgattttttacatgtaacaatatgtgtaagtgacaatgttgtattaataacaaataaagtatgccatgattataattt

SEQ ID NO: 89856 - DNA, 502 bp, Zea Mays
cgttggcccttgcccctgcacgggcttgtcgcgttagtcaaccccgcctcgatcctcgtcgtcgatattgcgcttgctggtggccaaagctcgcgctaacctactcgatcacacctcgtcagctcgttccatactcaatctcgtcgtcgcgttatgtgtgcatcactcgccagacatgtgtgatcaaagacgtcaaccggaaaccgtcggcgtgcttgcgactatcgcgtcgaattagtcaggataagtaaatttgttatttgtgttagtggattgatggatggtctgactaggtataaaatttattagattgcctgagtcgttttggtaatttggtcaatgtcgtaggatgaaagaggtctcatttggtctcagtgtttgcgggactgtagatgttaaaaatagaaagttttactagtatatatgatacacaggttaaccggtgaattggtttagaaagttaataaaagttcttctatcaaaatttataagtattaggtgt

SEQ ID NO: 89857 - DNA, 2155 bp, Zea Mays
acccattcactcactcatctcaaggcctaggtagcaccgtagcagctactagaagcagctagccagaacaactcgtccatggcgatggcctccgcggcttgctcatgcacggacggcacgtggtgggtgtacgcgctcccggcgctgctcggctccgacaccctgtgcgcccacccggccctcctggctggcctgatctttctggccaccgtctcggtggctctgctggcgtgggccacgtcgccgggcggtccggcgtggacgaacggccgcggccgcctcggcgtcactcctatcgtgggaccccgtggtctgcccgtgttcggcagcatcttcgcgctgtcccgcgggctgccgcaccgcgccctcgccgagatggcccgcgccgcagggccccgggccaaggagctcatggcgttctccgtcggtgacacgcccgcggtcgtgtcgtcctgcccggccacggcacgtgaggtgctcgcgcacccgtcattcgccgaccgccctgtgaagcggtcggcccgggagctcatgttcgcgcgtgccatcgggttcgcgcccaacggcgagtactggcgccgcctccgccgcgtcgcgtccacgcacctattctccccgcgccgggtcgcctcgcacgagccgggacgccaaggtgacgcggaggccatgctccgctccatcgccgccgaacagtcggcctctggcgccgtcgccctccgcccgcacctccaggccgccgctctcaacaacatcatgggcagcgtcttcggcacgcggtacgacgtcacatcaggcgccggcgccgcggaggccgagcatctcaagagcatggtgcgcgaggggttcgagctcctcggcgccttcaactggtccgaccacctcccctggctcgcccacctgtacgacccaagcaacgtcacccgccggtgcgccgcgctcgtgccgcgcgtccagaccttcgtccgtggcgtcatcgacgagcaccggcgccgccgccaaaactccgccgccctcaacgacaatgctgacttcgtcgacgtgctcctctccctcgagggtgacgagaagctcggcgacgacgacatggtcgccatcctctgggagatggtcttccgcggtacggacacgacggcgcttctgaccgagtggtgcatggcggagctggtgcgccacccggcggtgcaggcgagggtgcgcgccgaggtcgacgcggctgtcggtgccggaggttgccccaccgacgccgacgtggcgcgcatgccgtacctgcaggcggttgtgaaggagacgctgcgcgcccacccgcctggcccgctgctgagctgggctcgcctcgccaccgccgacgtgccactctgcaacggcatggtggtcccggctggcaccacggcgatggtgaatatgtgggccataacccacgatgccgccgtgtgggccgacccggacgcgttcgcgccggagcggttcctgccctccgagggcggcgccgacgtggacgtccgcggcgtcgacctccgcctggccccgttcggcgccgggcgtcgcgtctgccccggcaagaacctgggcctcaccaccgtgggcctctgggttgcccgcctcgtgcacgccttccagtgggccctgcctgacggcgcggcggccgtttgcctcgacgaggtcctcaagctctccctggagatgaagacgccgctcgtcgccgcagccatcccccgcaccgcctgatccgtcctgccgccgacgcgtcacgtcacgcgttgtttgcatggatgatggtatctttgtctgtctgtgtggtcttcgctaaagtttgcttcttctcgatcgtcggttcgttcgtgcctccaccttagcctagggtttggtttcttgcaaggtagtgagtgtgtcttagtctcaccatcaccggggctccaattttggaaagctgcgtgttaggagttaacccctagacatgtttgcgtcttgatcgccaccacccatcagtatcagcgcagaaactacatatagatcagtgtttgtcgaccagtcatggaagtcgtgtgctctcaagtctgatgtattatatacatatatatgtattgtaatgtgattatcaagaaccgtgctatttacatattgctgtttaattgaactaattaactaaatgtccctt

SEQ ID NO: 89858 - DNA, 1922 bp, Zea Mays
gagaatcgaggattattatcgaataacagaacaccacttacctggtattcatgcgtcgaccatcaccggcgacggcgtatctccgtgctcacgtcccggcgtcccgagccggcggccacgggccataacagacccggaggacatcaccagcgcgagcgccgccagccccaagcaccgaggccgagccgcccgagcgcggagcggcggtaccacgccacccgcccgccgccgcccgttgcggaggctgtgcagcacagccgttggggtgccgaggcaccgatcaggctgcgcaaccgccgaagtcggcctccgggtggcgccaagctgcagagcagcgcgccagcgcccctgtatcggactacctttttcggcgagaccaccctagtagaggatgatatacaccgcgattgacacgttctacctgacggaggagcagctgcgcaactcaccatcacggaaggatgggatcgacgaggccactgagactgtgctccgcgtctatggctgcgacctcatccaggagagcggcatcctcctcaggctaccacaagcagtgatggccacggcacaagtattgttccatcgcttttactgcaaaaaatcatttgttcgatttagtgcaaagagagttgctgctagttgtgtttggctggcagggaagttggaggagagtcccaggaaatcaaagcatattatatttgtcttccatagaatggaatgtaggagagagaacttgccaattgaattcttagatgtcttttcaaagaaatattcagaactgaggcgtgacctgatacggacagaacgacatctgttgaaggagatggggtttatttgccatgtcgagcacccccataagttcatatcaaactaccttgcaacacttgaagcccctcccgagcttactcaagaggcatggaaccttgccaatgatagcttaaggacaactctgtgtgtgcgatttaagagtgaagtagtagcatgtggagttgtgtatgctgcagctaggagacaccgggttccccttcctgaagatcctccgtggtggactgtctttgatgctgatgaagcaggaattcaggaagtttgcagtgttcttgctcacctctacagcctgcccaaggctcaatacattccagtgtataaagaatatgattcctttactgttaagagaatctctgatccacaggctttaaaggaaagtccagcaagggctgttgctagcgataagggtacccctataccctcaagttctaaccaggagaaggattcagtggctaagactataccgaatagggtgaaggaaaaaagtgatgacgaaggtagacacttgcctgctgaatttgatggaaaagaaaacctggtggtgaactcaaaaattgagaagtctgattctggtgttgactggagtcgagaaagagaaagagaaagagagagatcaagagggcgggaacgtgatgctaggggtagggattctgatcatgatagcaggggtcgtgactctgatcgcgagagggatcggagacgtcgctctagggatagaagttcagacaaggagaaatcaaggcgccatccatcacacgaccgagttgactactacagttcgcattcatctcgtgaaaaagatcggcatagacaccattgatcaaggtgaggaggatcccgggtttgcagggctttgctgcatggagaccaccacatggcagtgccgacagaatcatgaaaacttgtagattgtcatctcattggcggttgcatttgcttcattgtgttttgcaccttggattgtaacttgcagagcaacatgaatttgtagaaccttcatctccactagttcccaaaattctcgagaattaatttagggtgttactaataaaaaatcatcctctaaccgttttttaaataggtttcaaatatacgaa

SEQ ID NO: 89859 - DNA, 1936 bp, Zea Mays
gagaatcgaggattattatcgaataacagaacaccacttacctggtattcatgcgtcgaccatcaccggcgacggcgtatctccgtgctcacgtcccggcgtcccgagccggcggccacgggccataacagacccggaggacatcaccagcgcgagcgccgccagccccaagcaccgaggccgagccgcccgagcgcggagcggcggtaccacgccacccgcccgccgccgcccgttgcggaggctgtgcagcacagccgttggggtgccgaggcaccgatcaggctgcgcaaccgccgaagtcggcctccgggtggcgccaagctgcagagcagcgcgccagcgcccctgtatcggactacctttttcggcgagaccaccctagtagaggatgatatacaccgcgattgacacgttctacctgacggaggagcagctgcgcaactcaccatcacggaaggatgggatcgacgaggccactgagactgtgctccgcgtctatggctgcgacctcatccaggagagcggcatcctcctcaggctaccacaagcagtgatggccacggcacaagtattgttccatcgcttttactgcaaaaaatcatttgttcgatttagtgcaaagagagttgctgctagttgtgtttggctggcagggaagttggaggagagtcccaggaaatcaaagcatattatatttgtcttccatagaatggaatgtaggagagagaacttgccaattgaattcttagatgtcttttcaaagaaatattcagaactgaggcgtgacctgatacggacagaacgacatctgttgaaggagatggggtttatttgccatgtcgagcacccccataagttcatatcaaactaccttgcaacacttgaagcccctcccgagcttactcaagaggcatggaaccttgccaatgatagcttaaggacaactctgtgtgtgcgatttaagagtgaagtagtagcatgtggagttgtgtatgctgcagctaggagacaccgggttccccttcctgaagatcctccgtggtggactgtctttgatgctgatgaagcaggaattcaggaagtttgcagtgttcttgctcacctctacagcctgcccaaggctcaatacattccagtgtataaagaatatgattcctttactgttaagagaatctctgatccacaggctttaaaggaaagtccagcaagggctgttgctagcgataagggtacccctataccctcaagttctaaccaggagaaggattcagtggctaagactataccgaatagggtgaaggaaaaaagtgatgacgaaggtagacacttgcctgctgaatttgatggaaaagaaaacctggtggtgaactcaaaaattgagaagtctgattctggtgttgactggagtcgagaaagagaaagagaaagagagagatcaagagggcgggaacgtgatgctaggggtagggattctgatcatgatagcaggggtcgtgactctgatcgcgagagggatcggagacgtcgctctagggatagaagttcaggacactcagacaaggagaaatcaaggcgccatccatcacacgaccgagttgactactacagttcgcattcatctcgtgaaaaagatcggcatagacaccattgatcaaggtgaggaggatcccgggtttgcagggctttgctgcatggagaccaccacatggcagtgccgacagaatcatgaaaacttgtagattgtcatctcattggcggttgcatttgcttcattgtgttttgcaccttggattgtaacttgcagagcaacatgaatttgtagaaccttcatctccactagttcccaaaattctcgagaattaatttagggtgttactaataaaaaatcatcctctaaccgttttttaaataggtttcaaatatacgaacttcg

SEQ ID NO: 89860 - DNA, 747 bp, Zea Mays
gcatttcccaaaacataatccgcattttgtaacttagtttttcgcatcaaacaatcgcatcgcatattttcctatcaaaataaaaatatccgagttcttttctacttcattttcttctctacacgcgtccattcatacaaatatattttcacacacatataaacacgcaggcacatcatcgaccgaatacgtaaataaaacaaatcgcgaatcattcaaggcgaacaacctggcgaactcgcgtcgtgcatgcatgccattagtttgggctctttgccgacgagcgatgcgcgaggcgtgacgtcgataagggctgcgattaaatgacatacacaatcatttcacagcttattagttcagtcattttataaattcaaggaacatgggacagcgaggagctcaccgcgggtttcgacgatgacgcgtagactctgcgcagatcgacgacgtgaggcccgttctgacgagcgcgacgcagcgaagggcgtcgctgctgctgctgctcgagcgaggacgcagaccggtgaaggagcacgtgaggaggagctcggcgtgtgccccagcccgatgccgagggatggcagcggccagacttgccggagaagaaggtcggcgtggggagaacttggactgcaggaacagcagggggaggaggtcgactgctactggctgagggagatggtgggaaaaaaggagcctgagctagtgcccacaggtccgaggggaggcagggacgctcggtcctgg

SEQ ID NO: 89861 - DNA, 1425 bp, Zea Mays
acaagctcggtcatggctccgtccagcaagctagtcaagacgaactcactcccgagccaccagcgtagccttgtccaaccgctcggatctcccaggcacaagcgcgtctcggccttgttccgagcacctgagtcgtccctgctccaagaagagtttgtcaccgccgcctccggtgaagctcatcatcaggcaagggcaaggcgcgcttccgacgagacgctcgccgtgcacgctggggagaagctcgccggaaagaaggacgcggacgtgggtggcactggaacagagacagactcgacggccaccccgatcgtgagcggcacaacgcactggttcaagagctccgaggacctcatagccttcaaggaaggccggcggcacagcttcgagtatgggcggtacagcaacccgacggtgaaggtgctggaggagaagatcagcgcgctggagagagccgaggcgaccctggtgacgtcctccggcatgaacgccatcacaacgacgctcctcgccctcgtcccgcccggcggccacatcgtgaccacgaccgactgctacagcgaggcgcgcgtgttcatccgtgacaggctctccatgatgggcgccatccggtcgacgttcgtcgacctcgacgacggcatgaagtcgctgaaggccgtcctcgacgagaacgacgacgtggccctcttctacaccgactccccgacgaacccgatgctcaagtgcgtggacatcaggcacgtggctgagctgtgtcaccggaagggtgccctggtgtgcatcgacagcaccatggcgtcgcccatcaaccagaagccgctcaccctcggtgctgaccttgtcctccactctgccatcaagtacatggccggccaccacgatgccatcgccggatgcgtcagcggttcagaggcgctcatcaccaggatacgtgcttggcaccatcacctcggcggcgtcatctctccgagcgcggcatatatggtcatccgtgggctcaaaacgatggcactccgcgtcgaggcacataacagcacggcgctgcgcatggcacgcatgctagagcgccacccgaagatcgagcgggtgcactatcctgggctggagagcagcccctggcatgagcttgcaaggactcggatgtccggctacggaggcgttgtcagcttcgagttgaaggcggacttgcgtggtaccatgcgttttgtcgatgcgctggaaatccccttcatcgcgacctcgctaggcggctgcgagagcctggtgcagcaaccggcggtcatgtcgttctggggccacagtgaggaggataaggccaagaacgggatcaaggacaaccttgtaaggttcagttttggaatagagaagtttgaggatctcagggatgatatacttcaagcactaaacaagatttgatttaattac

SEQ ID NO: 89862 - DNA, 338 bp, Zea Mays
taattatgtctcctctcgtcagctgagagatcacgtccgaggatttataatcatgtttggtttctagcaaattatcctcgacagggagattaggagtcgagttacatatgaaattatctgatcttaaatcatatcaaacacaatttttaaatagcatgaccgatgttgtggagcgatccgatcgtatctcacccagatccaaacgtgcgggtataaatatctagtaaaaattttatttgatttttttgaacgtctaccaaaatgagcatcgtctaaatactgaagtcaatctccttttggtccaatccatttatgcctatgttaaaccttaatccgag

SEQ ID NO: 89863 - DNA, 570 bp, Zea Mays
atctgatttcttatccttctcaccgctcaactcctatcccttatccttccacgatgtgctgtcggcctcatctcccaagtccaagccattcttgttccttctctgctcgttctcatggccgagctccccacgtccgccgctcctccctggcgccctcacctccactggagctcgcccctgttgagctcacctgtgctcgtcggctgccctgcagttcccccatggacgcctcctttctaatctgtgtgcaggggtttccttcccatggtcgccctcaaccccatggtcgacctcgcctagcccttcccccatctcctccccaagctcggttcggcatggaggctggccacaggacgcagcacaccaacctcaccggccataccctctgcttttccccactgtccgcagccctgatgtcgtcgtcgtgattagacatgtgtggcgaaaagaaagattctagagtttggtgggaaaggaaagctctatcacgacgaccaccaggtacgttcattgatcacgtattgtggaggacaacaacaactggaataatctcaaagtgggattgatgaa

SEQ ID NO: 89864 - DNA, 338 bp, Zea Mays
taattatgtctcctctcgtcagctgagagatcacgtccgaggatttataatcatgtttggtttctagcaaattatcctcgacatggagattaggagtcgagttacatatgaaattatctgatcttaaatcatatcaaacacaatttttaaatagcatgaccgatgttgtggagcgatccgatcgtatctcacccagatccaaacgtgcgtgtataaatatctagtaaaaattttaattgatttttttgaacgtctaccaaaatgagcatcgtctaaatactgaagtcaatctccttttggtccaatccatttatgcctatgttaaaccttaatccgag

SEQ ID NO: 89865 - DNA, 526 bp, Zea Mays
atctgatttcttatccttctcaccgctcaactcctatcccttatccttccacgatgtgctgtcggcctcatctcccaagtccaagccattcttgttccttctctgctcgttctcatggccgagctccccacgtccgccgctcctccctggcgccctcacctccattggagctcgcccctgttgagctcacctgtgctcgtcggctgccctgcagttcccccatggacgcctcctttctaatctgtgtgcaggggtttccttcccatggtcgccctcaaccccatggtcgacctcgcctagcccttcccccatctcttccccaagctcggttcggcatggaggctggccacaggacgcagcacaccaacctcaccggccataccctctgcttttccccactgtccgcagccccgatgtcgtcgtcgtgattagacatgtgtggcgaaaagaaagattctagagtttggtgggaaaggaaagctctatcacgacgaccaccaggtgtttgatgaaatgaataaattga

SEQ ID NO: 89866 - DNA, 3870 bp, Zea Mays
ctctcaatcccccgcaccctctctccctgagcgctcgcgagcctgcggccaccaccgccgtctccacgccgcgcagatccgcccagccggttcggccccactcgagaatacgtgtacggacgcaggccccgcccacctcgccgaggactcgctcctgtgtcgtgcgcgccagcactaccggtggccgtgcgcggctgggccgtgccgattcgaccgaatccggtggaattcaccgtgccgtggtgtcaaatcggtgagctccgttgggttacgcgtgggtggaggctcgttcaggtctgggcggccgtaagtggcgccgggcatggttctagggtttggttttggtcttttggcgtgagggcatggcggatgggggccggatgaagggcgtacagagcgctggcggtggcgccggtgacgacgaagaggggaatgaggaggtgcgagaggagccggaactcgcgctgtcgctggggcggcgagtctggcacctcccgccgcggcaggaggccgctccccgctcacttaactggactccggttctgccggagtggaaccccgacgccgctgggagctcgcagggtgtggaaagggccttgggcggacaatccatctcttctcttgggttccatgacatgtttggtggtatcctagacgatccccaagcgggtggcagtatggaggttgggtggggcaagctgaacgaagaggatgaagacagagacctgcagaataaacggctcagagtacgacactttggcgaagaaaacccactgcattctggtgccagtgctactccctttggctctgaatcgtcatttttgcccatttctgatgaatgtgttcatttaaagctgtctcgtttcccagaacatgaattggaatttgggttgtcacttttcgcaaatgatggtagtgagagcccaagggatgccaataatgagcaagtcgatgatgcagaaaactccggtggaagaaattctgtggatgttggaataagaatggatctctccgatgatttcctgcacatgattttctctttcttggaccagaaggatttatgcagagcaggtgtgacctgtaaacagtggcgatctgctagtgtgcatgatgatttttggaagtgtttgaaatttgagaacactagcgtatcactggagaactttgttaatatttgccgtcattaccagagtgtcacagaactcaatttgcatggtgtcataaatgcagaaacactagttctggaagcaataatgtttttaaggcatctgaagacattaacaatgggcaagggacaactgggagaatcattttttcaagctttggctgagtgcccattattgactgctttaacagtaaacgatgcttctcttgggagtggcattcaagaagtaactgttaatcatgatggactgcgtgagcttcatattttgaagtgccgtgcacttagaatatctgtcagatgttcccaacttcaaatactgtctttgaggcgaacaggcatggctcatgtatcactgaactgtcctcagttgcttgagttggacttccaatcctgccataagctttctgacaatgcgattcgccaagctgctacagcttgcccattgttggcaaaactagacatgtcatcttgttcttgtgttactgatgagacattgcgtgacatagctagctcatgtccgagtctttctgttcttgatgcatcaaactgccccaacatttcatttgagtccgtgaggcttccaatgttaatagacttgagacttctaagttgtgaaggaatcacatctgcttcgatggctgcaatagcttatagccgtctgcttgaggcactacagcttgataattgcagcctgttgacatcagtgtctttggacttaccacatcttaagaatataagtctcgtgcacttacgcaaatttgctgatttgaatttgcgaagccctgtgctttcttacatcaaagtttccagatgttcggcactccatcgagttagcataacatcgactacacttcagaaattggttcttcaaaaacaagagagcttatccagtttgtcattgcaatgccacaacttgattgatgtggatcttactgagtgcgagtcattaacaaatgcggtttgtgaagtatttagtgatggaggtggttgccctatgctaagatcattgatccttgacaattgcgagaatttgagcattgtagaactgaacagcagttctttgtcctgcctctctcttgctggttgccgctcgatgacattgttaagactctcatgcccaaatctgcaacatgtcaatcttgatggctgtgatcaccttcaaagtgcagcattctgtccagagaaggacaagctggtggcggacgtgatgcactacgtgctcttcaggacgcaccagaactttgactgccccatcaagcaagaggagctcaccgggatcgtcaccaagaattaccgccagcgtgtgctacccacacttgtcatcaaggaggccaaggacatgctcgccgccaccttcggctatgagatgagggagctacagaggagtcgtgcactctggtcggggttttggacgagctggtcagaggcggctgcgccaacaaaggaggtgggtctcgaatccctaaatctgggaatttgtccaaaactgagtgttcttcacattgaggctccaaatatgtctatattggagctgaagggttgtggtgtgctttccaaggcttccatcaattgccctcgcttgacttcgttggatgcctctttctgcaggcagcttgtggatgattctctgacttgtatgtcagaggcatgtcctatgattgaacatcttattctgtcatcatgcctatccattggcatcgatggattgtcctcattgcattgccttcataagctgaccttgcttgacctgtcttatacctttttggacaacttgaagcctgttttcaacagttgtctgcagttgaaggtgttaaaactttcagcttgcaagtacctcagtgactcatcattagatgccctctacagagagggtgctcttccattgcttgttgagctagatctgtcctactcgtccattggacagaatgcgatagaagatcttcttgcttgttgtactaatttggttaatgtgaacttgaatggatgtacaaactttcaagaattggtgtgtgggtcagatgatagcagttgtgtcgatatgccagttgacttttgtgcacctagttcagcaatcaagagtgaagagatcagaagtggatttgacatgtcccaatcttttaacgttaaacttgagctcactggaggtgctgaaagcttgattgccccaagattgtccaatctccagcttctgcggcaggaggccgctccccgctcacttaactggactccggttctgcaagagtggaaccccgacgccgctgggagctcgcagggtgtggaaagggccttgggcgggcaatccatctcttctcttgggttccatgacatgtttggtggtatcctagacgatccccaagcgggtggcagtatggaggttgggtggggcaagctgaacgaagaggatgaagacagagacctgcagaatacaaacatcaagtcaggacaagctctctccttagagctcttgtacatagtacccaagcattgccggtatattgcaaggcatggtatattaggagccaggggcaatgatatcttatttttccagtccattcatgttgctgaataagtatttttgtgaatctgttttgttgccggaggtaacaaaatatctgttcatgtttttttttctgtattccttggaagtgtaccgatggagctatatgctggtttatatgcatcaataatcttgtttggatatagaa

SEQ ID NO: 89867 - DNA, 1898 bp, Zea Mays
tatgtccatttctttactttgtatgctatgatatcagattgtaccatgataagaaaaaatggatcaacttattaggaatagaagagaagaggaggacgaggagttaattctctttcttttctctgctctctatcctattagtaaaggaaggagagagaaaagagcaagacatgcttctattctagatggcaaggagagacttaaagagattctcgaaggacatgagaataattgttttgtcacattccgtatggagcctagtatattcaaagatataacaacatttcttagagaataacacatcctacgtggtacaaggggtgttacggtggaagaaaaatggaaatgttccttttcatgttgtcccataatgctagttatgaggatttacaacatgaattcaaacatagtggtgaaactatccaccgacacatccagtcagttttcgaaataatcccatctctcatgtatagatttgtgaagcctgccactagaatttcatttcattggaagattagcatggatgaacggttctttccttacttccaaaatttcattggagctattgatggaacacatgttccaattaccatatcagcagaaaagcaagctccctataggaatagaaaaggcacactaagtcaaaatgtaatgttggtttgtgattttgacttcaactttacttttatcatctggtttggagggatcagctacagatgctagggttctaaggtctgcactacttggaggattccatgctcccgagggaaagtattatcttgtcgacgggggatatgctaacacaccatcattcattgcaccatacagtggtgttcgataccacttgaaagaatttggccatggttaccaacgaccaagaaactataaggaattatttaatcatcgacatgctttattgaggaaacacatagagagagcaataggagttttgaagaagcatttccacattctaaaagttggaacacaccagctaattaggaaccaagtgaaaataccagccgcgacagtgttgttccataatattatatggatgcacaacggggatgaaggttggttaaatagccaaacaagtaacatatcaccagaaacttttgttgatcttcctggaggagacaattactatagcaatgatgtcgtgtcgcttaatagccaagtggataatgggaactctattagagatatgattgcattgaatatgtggaatgattatagtcaacatcgttcatgatatatgtaagtctcacttgtttggatgtttaaactcatatatttctatatatgtaagtctcaatcttttgtatgtttatatatgtagcaagaatgtttagaagaggatctcctaggatgaacctgatccaagctgcatctatgcaaagaatatcccctagatctactactaacaagcgcaagaggagaacatcgccaaaaattggtcgtcttagagaaaactgaaatactggactagaaaagggtttagttgaaattcttcaagaccacaacaatgactgttataagggccaaaatgggtggtcatcggaagcatggaatagaattgtcaagttattccatgagaaattcccttatgtcacatttacaaaatgccaaatccaagataaagagaaagagttaaagagagactacaaggctcttaaagaagacaacaaagcgggcatcatgggatgagcggttgtgtagtatagaggcagaagaacctatttggaataacctcaccattagtaacgagaaacttaagaagtttcagactaaatctttccactatttgaggctttaggagagctacatgatgggaataacgctgagggaaccctaaattttgcttctaatgagccttctcgacctcctgtcacacaaccttg

SEQ ID NO: 89868 - DNA, 1560 bp, Zea Mays
atggccgttcttgcgctcaggcttggtttcgtggctccgcctcatcctaggaccagcagcggcaggttcgccttctcccccccgtcctcccgcgccgtcgccaacgcgggggtagctgcaggaccctcgcgcccgatcaccgtcgacggggacccgcccaccgtcgtctccgcgcccggccgccgcattgtcgccattggcgatgcccacggtgacctctcccagacgagagccgcgctggtgctcgccggcgtcctgagcacggaatcagagggccacgtgtggacaggcggacgcacgatacttgttcaagttggtgacatccttgatcgtggtgaagatgaaattgccatactctcactgttgagctcactcaacatgcaagccaaatctcaaggcggtgctgtattccagcaaagggaggtggaggccacaagcggcaggaagaaggccgcggcggcgaacaggcacaccacatctcaacaaagtgaggtggaggccacgagcaacaagaaggccgcagctcatgggaagaccgcgacgacgcaaaggagtgggggcgggggcactggtgtttgtctaggcagatgtgggcatggggctagggcggtggtggcattgatcacgggggctggggagagttgtgggagtgattctaccgttattcctacaaactcggacgccacgaactatattcgccacggtctccatggcacacaactggtcaccatgcactccgtggactcaggcatgcacctgaccaactcaaaacgtgacagtaaagttaacggaaaccacgaaactatgaatgtggaaggtgatttccggtactgtgatccgggaggctttgatgagtgcatgcgcttccttgactacttggatgaatgtgatggcaactgggataacgcatttctcaactgggtaaatgtctgtgaaagacggaagaaagagtatgtagctttgcctaatggtgactggggtccttggaatttcgtcaagaagcagaaaggctttgctgcaagatcatctcttctcaagcgaggtggtccgctagctcatgaattggctcggcatcctgttgtcctcaagatcaatgactggattttttgtcatggtggccttcttcctcaccatgttgaatatgggattgagcgtatgaacagggaggtatcaatgtggatgaaatgttcaggcgaagacagtggtgacgagacagacatccccttcatagctactagaggttatgacagcgtcgtgtggagtcgaatgtactcgcaagaccctgccgaaagaacacgacgcgctttgatgctatcttctattgctgctgaacaaacgctagaagctgtaggagccaaagggatggttgtagggcacacaccacagacgcatggggtgacctgtaaatgtgatggcaaagtctggtgcgtggatgtgggcatgtcctgtggtgttctttgctcaaggccagaggtcctagaaatagtcaatgacagaccaagggttttgaaggagcggagagaattatatgatgagatggaagtgttggactatttgtaa

SEQ ID NO: 89869 - DNA, 838 bp, Zea Mays
agtactatacaaacaaacagtcctacaagtgaagggaagcggtcaacatgccttgtcagacgcagcacgagatgccaaaagccattggacggcagacgataaagcacggcgcgccaccacggataagaatccagaagcttgcgctccgctgtcccgtctccgctccggcctccacccatggctcatccactcctctcgtccgcgcttgtttgttcgcgtcttctccctgtagggaactccgttacccggccccggctgtgcgtggcgtcagcacgccccgcgggcaggagggtgaggctgctgagcgtgaggtgcgagcagggagccaagggcggtggcgggctggacgtgtggctgagccgcggggcgatgctgggcttcgtcggagcggtggccgtggagctgaccaccgggaaaggcgtgcttcagaatgtgggattgaccgcgccggtgccgacgctggcgctggcgctcaccggcgcggtcggcgtcctcacggccttcctcatcttccagtccgggacgcgggactgatgggtgaattgtcaaagctcccaaaaggacatgcataaagtctgtcagagtcttgtgctgtgtatgtctatgctgttgtagttgccttgccttcacaggaagctgaggagtaacacagtgcgaaaaggataattattattttttacaaaatgtgtttacagtactcttccttgaaggactaaactgcatttatgttgaagttgtcaataatcctattctcactacaccaaattccattccaattcgaagaggttcttggcaaccaaggtctgttcattttaatccaagcgtgagaagttccgat

SEQ ID NO: 89870 - DNA, 1464 bp, Zea Mays
ccacgcatcgaggacctaattctaaattcgtaaaatcatcacgcgccgtcttcagtcctctgcctcctcgtcggaaagccctaatcccactcaatcctctcgctgccgatccgacctcaattccgaatccctcccccatctcccggcgtccccaacgccctccgccatgccggacgtgcagccgctcgtcagcgacttcgtcctcaagcttaagcgccggaaggtggaggggtcgcacgcggtggcccggcagacggcggaactgctacggtcggttgtgtcgcagcatcggatgggtagcagcgccaaccaggcagccgcgcttgccgatgctgtacgcgctgtgggggagcagctcatctccgccaatcccattgtgtcagaattctatcagggtgacctgaaaactgtgttggtatccaactgtgaggtaatcctaactctaggtcgttcgagaactgtcaaggagtttctgtatgctgcgaaagagaagaagcgatctttccgtgtatttgttgctgaaggtgctccaagatatcagggccatgttcttgcaaaagagttggttgagaaaggtgtacaaactacagttataacagattcagcagtttttgcaatgatctctcgagttaacatggtcataattggagcgcatgctatcatggcaaatggtggagtcattgcaccagtagggatgaacatggttgcacttgctgctcaaaggcatgctgtgccttttgttgtggttgctggtagtcacaagctgtgtcctctgtatccacacaacccacaagtgttgctgaatgaactcaaatcgccatctgatttgctcgattttggcgagttctcagattgcatgaatttcagtactcaggatggcagccccttgctaaatgttgccaacccaacatttgactatgtgccaccgaagcttgtgagcctattcatcactgacaccggggggcacagtccgtcttatatgtatcggcttattgctgagtattactcagctgatgatctggtagtgagacggaaggcaacatcttgaaagaagacgaaagcactgcaaagtctccttggtggtctgatgtgcagtcatggaattgttggtgggtccagtcactgtcaaacagcaggagatcgatggaagcattctcgcgtttgggcgtaaactgtcgagggaatgggatgtgacgtcatggaattgttgtcgtactacaggagaggttcatatacatgaatatatgattgactggttgtgtagagggtcgctgtttctgatctgggccttggctggcccaaattttgtcttataaattccagcaagctgttcggtgtcacgtattcgctgagccccttttctatttctatatactgtatatggtattacgcctgtcatgcttcttttttggcgattcaactgcgtagatgctggaaaagtaaaaaaagaagaattcgacagaa

SEQ ID NO: 89871 - DNA, 1459 bp, Zea Mays
ccacgcatcgaggacctaattctaaattcgtaaaatcatcacgcgccgtcttcagtcctctgcctcctcgtcggaaagccctaatcccactcaatcctctcgctgccgatccgacctcaattccgaatccctcccccatctcccggcgtccccaacgccctccgccatgccggacgtgcagccgctcgtcagcgacttcgtcctcaagcttaagcgccggaaggtggaggggtcgcacgcggtggcccggcagacggcggaactgctacggtcggttgtgtcgcagcatcggatgggtagcagcgccaaccaggcagccgcgcttgccgatgctgtacgcgctgtgggggagcagctcatctccgccaatcccattgtgtcagaattctatcagggtgacctgaaaactgtgttggtatccaactgtgaggtaatcctaactctaggtcgttcgagaactgtcaaggagtttctgtatgctgcgaaagagaagaagcgatctttccgtgtatttgttgctgaaggtgctccaagatatcagggccatgttcttgcaaaagagttggttgagaaaggtgtacaaactacagttataacagattcagcagtttttgcaatgatctctcgagttaacatggtcataattggagcgcatgctatcatggcaaatggtggagtcattgcaccagtagggatgaacatggttgcacttgctgctcaaaggcatgctgtgccttttgttgtggttgctggtagtcacaagctgtgtcctctgtatccacacaacccacaagtgttgctgaatgaactcaaatcgccatctgatttgctcgattttggcgagttctcagattgcatgaatttcagtactcaggatggcagccccttgctaaatgttgccaacccaacatttgactatgtgccaccgaagcttgtgagcctattcatcactgacaccggggggcacagtccgtcttatatgtatcggcttattgctgagtattactcagctgatgatctggtagtgagacggaaggcaacatcttgaaagaagacgaaagcactgcaaagtctccttggtggtctgatgtcatggaattgttggtgggtccagtcactgtcaaacagcaggagatcgatggaagcattctcgcgtttgggcgtaaactgtcgagggaatgggatgtgacgtcatggaattgttgtcgtactacaggagaggttcatatacatgaatatatgattgactggttgtgtagagggtcgctgtttctgatctgggccttggctggcccaaattttgtcttataaattccagcaagctgttcggtgtcacgtattcgctgagccccttttctatttctatatactgtatatggtattacgcctgtcatgcttcttttttggcgattcaactgcgtagatgctggaaaagtaaaaaaagaagaattcgacagaa

SEQ ID NO: 89872 - DNA, 1501 bp, Zea Mays
ccacgcatcgaggacctaattctaaattcgtaaaatcatcacgcgccgtcttcagtcctctgcctcctcgtcggaaagccctaatcccactcaatcctctcgctgccgatccgacctcaattccgaatccctcccccatctcccggcgtccccaacgccctccgccatgccggacgtgcagccgctcgtcagcgacttcgtcctcaagcttaagcgccggaaggtggaggggtcgcacgcggtggcccggcagacggcggaactgctacggtcggttgtgtcgcagcatcggatgggtagcagcgccaaccaggcagccgcgcttgccgatgctgtacgcgctgtgggggagcagctcatctccgccaatcccattgtgtcagaattctatcagggtgacctgaaaactgtgttggtatccaactgtgaggtaatcctaactctaggtcgttcgagaactgtcaaggagtttctgtatgctgcgaaagagaagaagcgatctttccgtgtatttgttgctgaaggtgctccaagatatcagggccatgttcttgcaaaagagttggttgagaaaggtgtacaaactacagttataacagattcagcagtttttgcaatgatctctcgagttaacatggtcataattggagcgcatgctatcatggcaaatggtggagtcattgcaccagtagggatgaacatggttgcacttgctgctcaaaggcatgctgtgccttttgttgtggttgctggtagtcacaaggtgtcatgcttaactagacgcttgatatacagagtagcatagctgtgtcctctgtatccacacaacccacaagtgttgctgaatgaactcaaatcgccatctgatttgctcgattttggcgagttctcagattgcatgaatttcagtactcaggatggcagccccttgctaaatgttgccaacccaacatttgactatgtgccaccgaagcttgtgagcctattcatcactgacaccggggggcacagtccgtcttatatgtatcggcttattgctgagtattactcagctgatgatctggtagtgagacggaaggcaacatcttgaaagaagacgaaagcactgcaaagtctccttggtggtctgatgtcatggaattgttggtgggtccagtcactgtcaaacagcaggagatcgatggaagcattctcgcgtttgggcgtaaactgtcgagggaatgggatgtgacgtcatggaattgttgtcgtactacaggagaggttcatatacatgaatatatgattgactggttgtgtagagggtcgctgtttctgatctgggccttggctggcccaaattttgtcttataaattccagcaagctgttcggtgtcacgtattcgctgagccccttttctatttctatatactgtatatggtattacgcctgtcatgcttcttttttggcgattcaactgcgtagatgctggaaaagtaaaaaaagaagaattcgacagaa

SEQ ID NO: 89873 - DNA, 1079 bp, Zea Mays
atggccgcctccgggaacaacagattctcccttacgtgcgctcgcttgcgcaagttcatgatggagcagaacaggaaggtgcggatggatgacctcgtcggctcctcctcgttccagcggccgctccaactgacaccggtccctgtagccacggggccggcggcggcggcggcctgggagaccggcacgagcaggacgaccttgccgctgttccccgtccgcactgctggcaccgccgagatcaccaggccagaggagggcaaggccaccctgaccatcttctaccaggggcaggtgtccacgttccaccacttcccagcagacagagccaaggtcctgatgcaaatggcaagttctgtgaccgggaacacgccggagaaaggggtggcggtggcgaccgccgtgccaaagaaggcgcagaccagcgatgaccagccatcgcctgcaggggcaggcatgccgcccatcgcaaggaagctgacgctgcagaactttctcaggaaaaggaagaacaggatcgcaggcaccgacgacgctgaccgcaacgaggatgcttcgccgtggaagaagagagactccgccgccggcgccggcggcacccccgcgggagacgtgcccgacgatgcctcgtggctcgcgctcaggctctgaaacagtgaaacccttcaccgcttattacatgagaataataatatggaagagaaggatacatcctccgagatgatacaataataataatgccgtgtctgtcccaggattcttaggacctccgaagaattcttaggcactgtgtctgtcgtcgagagccgtagcttatcaaaaaggggaagcatatctttagaaagctctctttcgaaaaacttgagaagctgttctaagtgagcttacctacttgtagtacaaaatgtagtttttatttgtcaatttgaactttgaagaagcagagaccctacctgctggggcggagcttttggcctttcaatagctttttggagaagcagaagcttccccaaatagagcttaattacattactgttggcaggactaataataatgcggcgtcaagcagttataaacta

SEQ ID NO: 89874 - DNA, 120 bp, Zea Mays
gttatttctcagttttggtgagcacttttctatttgatcttgaggaaggcattcaaattttttgcgaatccatcttgaaaaaggttgctgtcacacccggttttggaaggtaaaccgaat

SEQ ID NO: 89875 - DNA, 2037 bp, Zea Mays
atttacgtgatgctagcaagtgacaattcttaatcatctatgcttcatagtgttcctatcgttttcttggtcttgcaactggtccctcttgttatttcatcctgcacaaattagctttctattttttagcccatggacatttttttagctgtgtgtgttttttgttgtgattgatgctttgtaccggccatcctcctgatagtttgtctttggttactgcacccctgggcacttcaggtcctgctgcgaatcttgagaatggagatgtgtttcccttccacctggaagacgccttgaatatctgtgttgttgtaacgcatttcctcactgtagtctctagcgaacgagacagagccagcccccgcgtggtcctccgctcgggcgacacgggaggcccctcccccagccctagcgccgccactctctcctcctctatttccccctcgtcgtcgccggaggagactgccgaaggccggcgcgaccggcggcggagcgtttctccggcatttcttcttcgtttgctctcccggtgttcagatttgagcgggttctatgtcgggcggctcaagttccagccgcggggttactggggcgggtgcagtcccccgcgccgtcgtcttccttgtctccggcgtcgtcgggggctgtgctcggcggttcaacatctggtcctacaggtgcagccaggcgatggattggcggcatctgctggtggtggcggggctgcaccgtttcggcggtagacgcacggcgtggtgggtctagagctggccggcggacgtgctcctcgtggtgttgggtttgtggcgtgtgggccggatctgccctgaacagctggcgctggcggccggtggcggctgcgtcgatggtggtttggggctcgagcaggcgctgtggtgcggcgctctcttctttgccaccctcccctcccctcacggccttgtctactgctgtgggcggggcgtcagccgtgcgacggtgaggagcggaggatctgactcctcagtggtggtgtgtggcgtcgacatatgggcagcaacggctccggcagcatttgcggtggtgtacatgccagcggatctggcgcgtcgcaacggctgctgccagggttggtcgacgggaggtgcggcgcgtggtgctgccgctgctcggccgggaccgtgggctcagccggaggtggtggcggtccgcgctgctttgcgactgttgtggcaaccgacgcgtcattggccctctggatgggtctgtgtgggttggtttgggcggcggcggcggctgtggaggtgtgctttgtcccggggtcctgggccggatgttgtgctgggggttttcttgggcgaaagccttagcgacggcgacgctcctgggcgccgcttcccctgttgagggcgtcgtgttccctagctttgtcttccatgggcgaaagcccggtccacctcggattggcgacgatggcatccccgacgtcactcccttcctgaaggtgtcgctactgaagttcgtctcggccacgtcgtcgccttcggtggttgctttcgtcttttgggtcccggtttgcgtgtggaggtggagacttgcaccgtgaaatcgaagttgctacgtcaggggatgtggcttggcaacgatgacgtggagcgacccccttcttcgtgggcttgtttgcttcgaagatgaggcatttggcagaggcggggcggtggatcaaggttttggaagtctcgctggtgaagaatcggagctgtctcgagtatggtatctcgtggcttggccacagtcttccttccttctcttctgtcggtgtttgtagtcatcgtcgtgtttccttcggccttgtggtgcctgtcttggggagtcgagctgctcgtcacttgtattgaactcggcaacgatgactcacgatggacattgtgtgtgtggggttgttgttgtctggtttgtttgtagtataggttttaggtccggttttttttaaaattaggttaattcctttcttcttaattgagagacagagcttctgctattacgttcaaaaaaaaa

SEQ ID NO: 89876 - DNA, 1456 bp, Zea Mays
ccagccccagcaaatagtgccagccatggccaccaccgtgagccctgaccctgaggcggcgctcgccggcgtgaaggagccgagggcgccaaggtcgctgcttgcgcgcgcgcgcgccaacctggcgttccagtcggtgtgggcggagctgaacggcgccatgggcgacctgggcacctacatccccatcgtgctgtcgctggcgctggcgcgccacctggacctgggcaccaccctcgtgttcaccggcatctacaacgccgtcacggggctcatctacggcgtgccgatgcccgtgcagccgatgaaggcgatcgccgccacggcgctgtccgactcgtcgttcggcgtccccgagatcatggccgccggcatcctgaccgccgccttcgtcctcctcctcggcgtgacgcggctcatgcagctcgtgtactggatcgtgccgctccccgtggtgcgcggcatccagctcgcgcaggggctcaacttcgccatggcggcggtcaagtacatccgctacgagcaggacctcggcaggggcaagtccttgggccgccgcccctggaccggcctcgacgggctcgtactggccatcgcgtgcatctgcttcatcctcctcgtcaacggcgcggggtcagagagcggaagcaggagggggagaaagaggaggagggctatggctatccgagagcaaggcgcacatcccgaacgccaagaagaagaggaggaggaggaggaagagaggcaaggtggtggtgggtggaggtctacggttaggcgcgcggcggcggtggtgccgtcggccgtgatcgtgttcgtgctaggcgtggcgttggcggtggcgcggcacccggcggcggtgcgggagctgcgcgcggggccgtcgcgggtgcgcgtggtgcgcatctcgcgggaggcgtggaagcagggcttcctcaagggcgcggtgccgcaggtcccgctgtccgtgctcaactccgtggtggccgtgtgcaagctgacgcgcgacctgttcccggagaaggaggcgtcggcgacgtcggtgtcggtgacgatgggcggcatgaacctggtggggtgctggttcggcgccatgccgtgctgccacggggccggcgggctggcggggcagtacaggttcggcgggcgcagcggcgggtgcgtggcggcgctgggcgcgctgaagctcgcgctgggcctggtcctcggcggctccatgctgcgggtgctggtggagttccccgtgggcctgctcggcgtgctgctgctcttcgcgggcgtggagctgggcgccgcggctagggacatggcctccaaggcggaggcgctcgtcatgctgctctgcaccgccgtgtcgctcgtgggctccagcgccgcgctgggattcctctgcggcatggtcgcccacggcctgctcatgctcagggcgtgggccatgggggtcaggctcacctag

SEQ ID NO: 89877 - DNA, 1944 bp, Zea Mays
gttcatctgcctggtagaggtagcacgccagatcaccagcgatccgcacgtcgcagcagagcaaagatatcgcggggagcaagagtagtcaacgcacgaatggtgggcacggtgtcgctagcggcgggctacggctccgatggcgtgtaccgctcgccgcgcctggtggctgccatcgcctccgacccgggcctctccgtcacggacctcgtccttcgccgcgccgcggcgtgcccctccgcacccgcgctcgtggacgccgcgacgggccgcgccctcaccttcggggccctccgatccgcggtgctcgtcgcggccgccgcgctctcctcccgcgcgggcgtccgccgcggcgacgccgtgctgctcctcgcgcccaactgcgtgctctacccggtctgctttctcgccgtcaccgcgctcggcgccgtcgcgaccacggctaacccgctctacaccccgcgggagatcgccaagcaggccgccgacgcccgcgccaggctcgtcgtcaccgtctccgatctcctgcccaagatctccggtctccgcctccctatcgtcctcctcgacggcgacggcgcccccgtgccttcgggctgccccagcagtaacgtcactctctactcggacctcgtcgccggggtgcaggaggcggagtaccgccacacgccgatcgggcagggcgacacagcggcgctgttctactcgtcgggcacgactggggagagcaagggcgtcgtgctcacgcaccgcaacttcatcgcggcagcgacgatggtgacgtcggaccaggacgagctgggggaaggccacaacgtgttcctctgcttcctgcccatgttccacatcttcggcatgtccgtgatcaccctcggccagctgcagcgcggcaacgccgtcgtcgtgatggcccggttcgacgtcgacgccgtgctggccgccatcgagcggcaccgcgtcacgtacctcttctgcgccccgccggcgatgatcgcgctcgccaagcacagcaggggcggcaggtacgacctcagctcgctcagatgcatcggctctggcgccgcgccgctcggcaaggacgtcatggtggctatggctgacaggttccccggtgtcgacattatccagggttatggtatgactgaaacctgcgggataatatccctggagtacgtacagaagggttgtgcccgtcagtttggttcgactggagcacttgtcacaggagttgaagcaaagatcgttaatgcaaagacaatgaagcatcttcctccgagccaactaggagaaatctgtgttcgaggaccgaacataatggaaggctatttcaacaatgtgcaagcgactgagtctacaatcaagaatggatggttgcataccggtgatcttggatacttcgatgaaagaggccagcttcatgttgtcgatagacttaaagaactgattaagtacaaaggcttccagattgctcctgctgagcttgaaggactgcttttgtctcatccagaaatccttgatgccgctgttatcccgtatcctgatgctgaagcgggggaagttcctatcgcctacgttgtactatcaccgaagagttcactggccgaagctgatgtccagaaatttatcgagaaacaggtcgcgcactacaagaggctgaggaaggtaacgttcgtgggcagcgtaccgaaatctgctgcggggaagattttgaggagagagctcatcgcccaagtcagactgtccaagctgtagcagatttaatctcgatttcactgcagcccttgtcgtctgggttctgctggacacagaagtgcagaatctctgctgagcactgtacaagatttgtctatcaagtcactgtcaggaaccacacatttcagtctagacatgccagacactgatttcttttttttgttaaggaataaagcattctggcctctagta

SEQ ID NO: 89878 - DNA, 1187 bp, Zea Mays
ctctctcttgcctcttattttggaaatctactttctccaaggtatcctgatgctgaagcgggggaagttcctatcgcctacgttgtactatcaccgaagagttcactggccgaagctgatgtccagaaatttatcgagaaacaggtcgcgcactacaagaggctgaggaaggtaacgttcgtgggcagcgtaccgaaatctgctgcggggaagattttgaggagagagctcatcgcccaagtcagactgtccaagctgtagcagatttaatctcgatttcactgcagcccttgtcgtctgggttctgctggacacagaagtgcagaatctctgctgagcactgtacaagatttgtctatcaagtcactgtcaggaaccacacatttcagtctagacatgccagacactgatttcttttttttgttaaggaataaagcattctggcctctagtatccacggatgaatgatgtatcctatattgcttggattcttcaagaaagttaaagtaatatataatactacatccgtctcaaaacataattcgttttaactaaacaaacatttattaattaaactataaatatagtttatatatatgtttttatttattatcatttatttgaacgtggacagagaaaaaaaagaaagcaagaaaaaactgtattttgataaggagggagtgatttatattttgatgtatcttcctagacacggcaaaacactccttactggaacatcatctattcatcttcagtccattacaacaccgtcgtatgtcactttgctacaaacatccatagtggtacaacacaacaagagcagcaaacgcgccagatcaaaccagtctccagtatacacgcaggcaagcagcacgacgcattaacttttactaggtgttagattatcaagtagcacgcattatatacacagtacatcgcaggcccaagctatactgctaagcatcaaggagacatcaggatcttcctcgactcacggtcacggctgccctcctggatgcaccctgaaccagcaagagagtttatccacacgtcatcggttctcaccggctcttcgtcgtcgtttctgtgccaggtccagtgggcatgggtggagttcacgatctttagctcgccgtgcccaaagctcgcttccctgaagaccgaccacgctggcttcgggttacggt

SEQ ID NO: 89879 - DNA, 1161 bp, Zea Mays
atcaatttctcctccaccaagttcctcctcccttcgacttcctctcccccgtctggccgtgcagccccggaggcgtcactgggcaaggaggctggggtggggacctcaaacgccatggatgtgcagccctaggcaccagatattaggatggatggagtcacacaagctgttgaaaatcttaagaaagaatggggccaagcagtttcacagcttgacgagaacattactgcaatcaaatcatgtggaaaaacagggaaagggacagaggaagcaaattctcttccaaggttgaatggttctgcacaggatgctctgcagttgctgaagtcactgcagttccagcttgatcttctagcacagcagcttcccacttttgatgaggtgcagtctggtcaagcaaccttgaagtcatgggatgaacaatacaagaagcttcgtattagcttgaggaatgctaacttagaagcaaaagacaacattagacaagctgctgaagaggagagggcacttcttctaggcggtggtgaagagtctaccatccgtaggcgtaatctccagacaaaggctggaatgacatctgctgctgaaagtatcactgagagcctccgacggtctcgccagatgatggttcaggaagtggaaagaagtgctagtaccttggcaacatttgacgaatcaacaagtgttctccagaaggctgaaggtgaatatcaaggacatcgctctttgctgatgcgtacccgtggtttgctctccacaatgcaacgacaagatgtttttgataggatcatcctgactattggtttcaccattttctccttggcggttctttacgttgtctcgagacgtattggtctgttggctctgcaaaggaaactggccgatgccatcagatcaggttctttatcagctgaggacattgtcgcgaaagcccaacatggacctgccccggcaaatgttcctgctcctgctcctcgcgtttacaatgaattatgaatcgcttttattttccgttttatgaaatgtttgaccaggagagattgttaaggtaatactttccacaagtaagctattaagatttcttatctgtagtctcaaatgatgatgcaccaacctgtcaacgtttgaaattcccaacaagttttggttacagttggaaga

SEQ ID NO: 89880 - DNA, 1154 bp, Zea Mays
atcaatttctcctccaccaagttcctcctcccttcgacttcctctcccccgtctggccgtgcagccccggaggcgtcactgggcaaggaggctggggtggggacctcaaacgccatggatgtgcagccctaggcaccaggatggatggagtcacacaagctgttgaaaatcttaagaaagaatggggccaagcagtttcacagcttgacgagaacattactgcaatcaaatcatgtggaaaaacagggaaagggacagaggaagcaaattctcttccaaggttgaatggttctgcacaggatgctctgcagttgctgaagtcactgcagttccagcttgatcttctagcacagcagcttcccacttttgatgaggtgcagtctggtcaagcaaccttgaagtcatgggatgaacaatacaagaagcttcgtattagcttgaggaatgctaacttagaagcaaaagacaacattagacaagctgctgaagaggagagggcacttcttctaggcggtggtgaagagtctaccatccgtaggcgtaatctccagacaaaggctggaatgacatctgctgctgaaagtatcactgagagcctccgacggtctcgccagatgatggttcaggaagtggaaagaagtgctagtaccttggcaacatttgacgaatcaacaagtgttctccagaaggctgaaggtgaatatcaaggacatcgctctttgctgatgcgtacccgtggtttgctctccacaatgcaacgacaagatgtttttgataggatcatcctgactattggtttcaccattttctccttggcggttctttacgttgtctcgagacgtattggtctgttggctctgcaaaggaaactggccgatgccatcagatcaggttctttatcagctgaggacattgtcgcgaaagcccaacatggacctgccccggcaaatgttcctgctcctgctcctcgcgtttacaatgaattatgaatcgcttttattttccgttttatgaaatgtttgaccaggagagattgttaaggtaatactttccacaagtaagctattaagatttcttatctgtagtctcaaatgatgatgcaccaacctgtcaacgtttgaaattcccaacaagttttggttacagttggaaga

SEQ ID NO: 89881 - DNA, 2754 bp, Zea Mays
atgaagatagagcatgctgagcatatatatgctgcaatatatttttgttttagttgcttaccgtctccaccgcatctcatctcgccggcgagccagcctaaccaatcgccaatgctcacctcgttgcttccaccgcccacagtcccgatctccaaaccctccgcgtcggcgtcgcccaagaccgccaagcccaggtccgccgtgctctccgcctccgccctcgccctcgcccccgcctcgacatccgattccgacgatgcgcccggcgggggcgagggcggcagcgtccgcctctcctcgctcatccgctccctctgcgccgcggggcgcacagcagaggccgcgcgggcgctgtccgcggcgggcggcggcgcgggcgtcgtcgcctacaacgccatggtggccggctactgccgcgcgggccagctcgaatccgcgcgccgccttgccgctgcggtccccgtcccgcccaacgcctacacctacttccccgtcgtccgcgccctctgcgcgcggggccggatcgctgacgcgctcgcggtgctcgacgagatgccccgccgcggctgcgcccccatcccgcccatgtaccacgtcatcctcgaggccgcctgcaggggtggcggcttccggagcgccgtcagggtgctcgaggatctacacgccaggggctgcgccctcgacgtcggcaactgcaacctcgtcctcaacgccatctgcgaccaagggtcggtggacgaggccctccacctgctgcgggacctgccgtccttcggctgcgagccagacgtggtgagctacaacgcggtgctcaagggcctgtgcatggccaagcgctggggctgtgtccaggaactcatggaggagatggtcaggatggcttgcccgcccaacatcgttaccttcaacaccctcatcagttacttgtgtcggaacggcttgttcgagcgggtgcatgaggtcctcgcgcagatggtggagcatgggtgcacgccggacatcaggatgtatgccactatcatcgatggtatctgcaaggaagggcatctcgaagtcgcgcatgagattttgaataggatgccttcctacgggctcaagcccaatgtggtttgctacaatactctgctgaagggcttgtgcagcgctgagaggtgggaggaaaccgaggagttgctggctgagatgtttgacaaggattgcccacttgatgatgtcacattcaacatacttgttgatttcttctgccaaaatgggctggtggaccgggtgatcgaactactcgagcagatgctggagcatggatgcatgcccgatgtcatcacatacactacagtgatcaatggcttctgcaaagaagggcttattgatgaagctgtcatgttgttgaaaagtatgactgcttgtggctgcaagccaaataccataagctatactattgtgctcaagggtttgtgcagcgcagaacgatgggtggatgctgaggacctgatgtctcagatgattcagcaaggctgtcctctgaatcctatcacattcaacacactcatcaatttcttgtgtaaaaagggattggttgagcaggccattgaacttcttaagcagatgctagtgaatggatgcagtcccgacctgattagctacagcacagtgatcgatggacttggcaaggctggcaagacggacgaagcactggagctgttaaatgtgatggtcaacaaagggatgagcccaaacacaatcatttattcgtcgatagcttctgctctctccagagaaggcagaattaacaaagtaattcaaatgtttgataacatccaagataccacaataaggtccgatgcagtgctctacaatgcagttatttcttcgctttgcaaaagaggggaaactgaacgtgctattgagtttttggcatatatggtgtccagtggatgcgtgcccaatgaatcgacctacactatacttattcgaggtttagcaagtgagggatttgtaaaggaggcacaagagatgttgactgagttgtgctccaaaggtgctctaagaaagcacttgatgaagcattttggtattgtatgaagtataaactgatagttactgtttgcaagtgctggtgttatcaggattagtgtctaattagcctgaaggtgtcgtccacattattttgctcctctatccaacccaaggtggtcagtcctgaaggaaggttggagatgttgatatctttggcaatcctggtggtttcggctactgtgattcaattgccgagcgcagcccagcacaatcaggtttaatctgtttggcatagaagcatgcttggaaatagaatttgctcaagtgtgcaccataagggtaactttggttgttagctttctattcattttttttcaaatccaaaatagtagttagttaagtgagaattaggttgatccacagacctaaagaaagtaaaacctgcgcctccgctgatttatgcataccatgctgcaagctttacagttgtactgaaataatgtcgtacactttggacttcagggcaatttttgtagatacacttcattttatctgtaatgccggtctttaaaaaggaacatccgtagtgcctacatgggaatagacatgatgctcctaccatagtaccatgtcttgggaatagccatgatactgacacatgaattttgaaaaatgcagctttgtttgctgttgtagtgaaaaacatgctcgttctatcagttaaacaaaatttcatttgtc

SEQ ID NO: 89882 - DNA, 615 bp, Zea Mays
atggaaccacgtaccatggttggtctgcctcgttcaggtgccgtaacatcaccaactgctgagtcaatgtctgcgggttccgacggaggatccatcaccacgacgacggcgcgaaggcttctggcggcggaatgctgtgccgtgcgacgacggcgcggcgggatcctgtgccggtcgcaggacgtgtgttcgtcgaagttgcaggcggagttgcaggcggacggggatttgcagaagccgcccgcgcgtcggacggggatttgcagaagccgcccgcgcgtcgcaggacgtgtgttcgtcgaagtcgcagaagccgcccgcgcgtcggagttgcaggcggacggggatttgcaggcggacggcttctgcgcccgtgcgatggacggcttcggcggcgcgggacggggatttgcaggcgacgtgtgcgctgcacggcttcggcagcgacggcgcggcgcgctggacggcttctgcgcccgcgcgtcggagttgcaggcggacggggatttgcaggcggacggcttctgcgcccgtgcgatggacggcttcggcggcgcgggacggggatttgcaggcgacgtgtgcgcgcggtacggggagttgcaggcggcgtga

SEQ ID NO: 89883 - DNA, 322 bp, Zea Mays
atttatagaagggatacgcttcggagagaagccatactcttgtcgtgcagccgaagctagtcgatggcttgttgaagaagtgtcgtggcttacggtggaagcatggcaatgtgtaaacattttttcatacgattcaaatactgtgacacgttttttcgacaacaattacacaaaacataaaatggaatgttatttttttacaattcgaaattatgaatgaaccattgtttttagattattatttgtaaaattattgaatacattatttttatcatccttacaatttgatgaaatgggtacaaatcaaagaaaacaaaaaaag

SEQ ID NO: 89884 - DNA, 336 bp, Zea Mays
atgggggatccggaactaggctaccgggggcgctgccgcgccaagccagcgccggagagcccccgaggtggtgagcagcagagcaggagatccggacgccggtggccagtgcctaggcagctggccgagtctgcgaatcaccgagtctggagagcgcaaggggcgaacactaggctaccggggggcgctgccgcgtcgagtcaacgccagagagcccccaaggtggcgagcagcagagcaggagatccggacgccggtggccggtgcctaggcagctggccgagtctgcgaatcaccgagtctggagagggcgaggggcgaacagatctaggttag

SEQ ID NO: 89885 - DNA, 963 bp, Zea Mays
atgggtgagaaacctgtgactatgatatcggatgaggaggcaaaggagccaactactctgaacgaggaggaggatatggaggcggcattggtggagccgccggattggctacccgatggatggatcatggaggtctaccgcgctgaagatggcaccattattcgacagtactatacttctcccatatcgaactacacgttcaccatgaagtcggaggtattggagtaccttttctccgggacagatgagcgtatgctggaatcgaaggaacggggtgcagaaaacactcttcagagacaacatgaatggcttccaaagggctgggtgatggaggtaagagctggtggggagaaggcggacaagatgtacaagttttatgtccactcaatcactggtctacgattgctgtcaaagcaagatgtactactctatatcaatgaggcaaaggtctctgggtgcgacaccaatgaacaatgtgacacaacttctgaagataacatactttcaaaagtggactttcggccaagtggattgcctgaaggttgggtgaaagaactagtgtacagaaaaaccaaggaagggttgatcaggagagatccgtattacacggatcctgctagttcctacacattccgcacactgaaatccgcattatccttcctagaaactggaaagcatgaaagtttacgtaatagattaggaataaatgagaagccttatcaggagcctacaaagtcatctcggtctaggcgagcaccaaaaatagatcaggaacaaaatatagaccactcgaaagatggtgatacctcgagtggctctgtttcaccaaatgagtctgaagaagcagagaacatcagaagcaaggctgccggagaaaaagcaagtagcccgaataacactgtcagtcctccatcaggaagacctcctaaggaggggacggacagtcaggatgcagacgactaa

SEQ ID NO: 89886 - DNA, 1365 bp, Zea Mays
atggagaggagtcgtccgggcgccgcgccgacaccatcgccagaggaggaggtggcggcggagggccatgcgcatggtgacgatgtgacggggcaggaggaggaggcgacgccagtggtgctcaagaagggcccgtggacggcctcggaggatgccatgctcatggaccacgtccggcaccacggcgaggggaactggaacgcagtgcagaggatgaccggcctgctgcgctgcggcaagagctgccgcctgcgctggaccaaccacctccgccccaacctcaagaagggctccttctcccccgacgaggagctcctcatagcccagctccacgcgcagctcggcaacaagtgggcgcgcatggccgcgcacctgcccgggaggacggacaacgagatcaagaactactggaacacgaggaccaagcgccgccagcgcgccggcctgcccgtgtacccgccggaggtgcagctccaccttgccctctccaagcgctgccactacgacgactacgacttcccgccgctcgcgtcgtccccgcagctgtcggcgacgacgacgaccgatgtccaggcgctgggcgccgggcccgggtacgccagctcgcgcccggcgccgctcgacctggctcgcagccagctcgccgcgacgacgacccagcagacggcgcagttcctctcgccgccgcccttctcggcgccgtcgtccccgtgggccaagccgttcgcgcggaacgcgcagtacttccagctcgcgcactcgtcgcccgtgtccccgtcgacgccgaccgggccggtgcacccggccatgccggacctgtctctcggcggccacggcgcgcgcgccgccgccgctgccgaccagagcaggctcccaccgctctcgccgtcccccggccccagagtggagctcccttcaaaccaatacggccagccggcgccgccgacctcggccgccgccgtcgccgccggacttgcgctgccggatcatcagaacgcggcgagcctcgaacagatgctgcaggagctgcacgacgtcatcaaggtcgaaccgcaggcgctggtcccggccagcggcggcggcgctgcactggagcggcatgattgcggagtttcagtcccagagagcagaatcagcggcctgcagcgtcggggtgacgacatggacacgctgttcggcctggtgcacccagcgctcggcgcgccggagacggcgccggcggccgccgcctccaaccactccggctcgacctcgcggcacagcaccgccgaccagaacccgtccaccgtcggcaacagctcgccggaccaggactggggcctcgacggcgtctgccagtggagcaacgtgtccaggatctgctga

SEQ ID NO: 89887 - DNA, 95 bp, Zea Mays
tatatctatgctatgacttaatatacgtgtggttaattttaaaatactattatctggtctctaccacttatgtatatatctgttgctattgaatt

SEQ ID NO: 89888 - DNA, 90 bp, Zea Mays
gagcttccgcgacgtggcctccgtcggatggacgaggtcccagaacacgtggttcgtccccgcgctcacccgcccgcacacgcacagatg

SEQ ID NO: 89889 - DNA, 2026 bp, Zea Mays
ctctcatcacggggcgacggcgtcgtccgctgtcctgcacggcggaacacgcagctgactcgttctcctctcggacgccggccggcctcgctctggatcgctagcggccggccggccgttgctacgccaaacggccagagtgccgatgcccacgtccaacgcgagagcatcatatatgtcgttgcttatccaaagcacacctggcgtgccgagctctacctggcctgaccatcgcgctggtgccatcatgtcgtcgtcgaagcggtggacgtccgcctccggcacggcggagctgcctgggcggtcgcccctacccgcctccgcgctctcgccagtccgccagagcgcccggcgctcagtctcccgaccggaacccggcgccacaacatcccccgtggccgtctcgatcgctcgcacgctctggccttcctcgtccaccggcaacaagagcggcaagagcaaggccccgcgcccgccgtctcccttgtcctccgcgccacctccgccgccgtcgccgtccgtggccaccctcgcggaccacctcgtcaaagacgactcgccacgttctctctcccggcagcgcagctgcaccgaggtcccgcgcttcgccgacgcggacgcggaggccaggaagatcgggaagcaggcatcagggaagggcgccgggcacgcgttcggccgctccatgcgcttcctcccgtccaccaggcccgcgggcgtgacgctcaccccgggccgcgtcgcgccgtcggacctccgcaggctcggcaacatggccgtttccctggacgccgccgccgacgtcgccagctccgggtcggagtgcagcgacgcctccaggggctccaccaccacgccgaggacggcgtccaagccgcggtctccgttgctcccccgcacgggttccgtccgcttgctcgggtcgagcaacacgcagtgggcgctctcgccgggtcggcgcagcgggtcgccgctcaagcaggcggcgacgacgacgacgctggccacggtgccggagagcaaagggaagaagagcctgatcagcctggggtggggccatatcttccaccggcggaagcacgcggccgaggacgcgtccatcgccgccgctgccacggccaccctgctgtcctcgccggtgccatcgtcatcgcgcagcagcggcggggaggccggccaccacgtgaggatggcgcactgccgcctcctgcagtggcgcttcgcgaacgctaacgcggacgccgtccgcaagaggaagacgggcagcgccgagctggagttgatgggcacgtgggcaagcgtgtcggagatgagagggaaggtggcgcggaagcgagtgcagcttgagaaggagaagcagaagattaaactagacaccgtgctctatttccagataaaagatttggagagctgggggcagcagctgcagaccgcacatgactccgccctggcctcaacagtgggttgcgcccgagcagccgtttgcaggcttcccgtcaccaatggtgccaaggtatccctagcgccattggcgaccattctgcagcaagctcttgagctcacgttgacggccaagacagtgacaagatcatccagtccgatggctgaggacacggcgtcactgatctcaaagctggtgcttgtggcaagggaagagcaagctacgttgcaagagtgcgtcgagctgcttaggttggtctctgcactgcaggtggaggagcacagcttgcgcagccatctggtgcagtcggcatcgcgtagtgctgtggccgtgaaatagtaggccgggcgcttgtgcacaggcgtttcggctgtaggacgaccagctccagatgtgctctagacttttccagtaaaactagctagaatagaatcatatccacagatgcttaattgcttacgtagatgggtaccatcaaacaaaaacaaaaaaaaggaggtgtcatgtgagcacgttactgctgaatggccttcaactcttaggatgcgtttggttgagttaaataaaatagagtagttttatttc

SEQ ID NO: 89890 - DNA, 978 bp, Zea Mays
catagatcttgacacctacctcctatacacgtcgacgtacggtttacaagggtatgcaccaagatctatagcgcctacccctgtcacgtaggcgccacttcaccaggatctaggcgccaatatgattagcgccggcctgttttagctggacgccaatgtcattggcgctgagctagaggtctattttttaagatgaaactgacaaagttatatttgtaaataaaatacagaaaaatagctaaaatgcaaaaaaaaaaaaaaaaaaaattggccgacctgcaccccagaaccaaactaccaaagcgagagacaaccgctgcgccactgcggaaacgatttcgtcgccatgaccatgacgtctcgtttcgttgcggcggcctcttcctcctcgtcctcgtgccccctcgcccgcctaatctctcgccgcggccttgccggtgccgcagacggccatggacctgcgaaggtgcccttgtggaaagatccgttgagcccgagcaagtggaaggaagagcactttgttctagcaagcctctctatgtggggggctcttttttatggtggtttcaagttttttggtggaaagaaggaagacaagattgaggcggcatcaggacagacataggtggctgggatgggagttcttgcctatttctgtggccaggcaacaatgttaaataaaaggaatgtgttatattgtgctttcaagttgataaattgtggcaaccaggttttgattatgtaggcaatattttgacaagctactcttatccagcatgaatgacttcacgtttgtgaatgctgcaaatgttgtacttctttcatgcgattgagtagatgttttacttctgttgccatcaccagttcaacgctgtacttttaattgattcgatcacgtgctttctagtttgcgttgttacagatgaatttgacttaagttttattgataattctatttgtgttgcttgcaattagaaa

SEQ ID NO: 89891 - DNA, 612 bp, Zea Mays
ttgtttctgtggcgttatgtcgttttgattgatagcttaccttgctgaatgctgatggattcgttttgtgtgcttgccagacggccatggacctgcgaaggtgcccttgtggaaagatccgttgagcccgagcaagtggaaggaagagcactttgttctagcaagcctctctatgtggggggctcttttttatggtggtttcaagttttttggtggaaagaaggaagacaagattgaggcggcatcaggacagacataggtggctgggatgggagttcttgcctatttctgtggccaggcaacaatgttaaataaaaggaatgtgttatattgtgctttcaagttgataaattgtggcaaccaggttttgattatgtaggcaatattttgacaagctactcttatccagcatgaatgacttcacgtttgtgaatgctgcaaatgttgtacttctttcatgcgattgagtagatgttttacttctgttgccatcaccagttcaacgctgtacttttaattgattcgatcacgtgctttctagtttgcgttgttacagatgaatttgacttaagttttattgataattctatttgtgttgcttgcaattagaaa

SEQ ID NO: 89892 - DNA, 1859 bp, Zea Mays
agcgccagcggtaggcgagcgagcgagcgcggtgtccacagggccagcaacagtaggccccagtgcccccacccgctccagatccacagccgtcggccgtcgcggcgtggtggataaaaaaccctgcgcgcgcgcatgtggacatgtggtcggggagacggggactcggggtagcgactagcgagccgaggagcgcgcgcgcgcgatggcggccgctgccgtggcgaccgtggcctccccatcccccgctgcctccaggcgtatgctcccctccgccgcaccgtctttcctccggctcccgaggccgaccagccggctccggcgcgccacgcaggtcgccgcggcggggggagaggcggacgtgctgcctggtccgggggccgagggtgaggcggcggttccggggaggctggaggagcagcgggacgagccgctggcgggaagccagctcgacatcggagggctcgccttccagggcgacgtcggcgggggcttcaccggcggcggagcgggctccggggcctccggcggtggcggcgacggcaacaagatgctggaccggggcatcaatacggccatcgttctcgcggccagcacctacgcgctcaccaagctgctcaccgtcgaccaggactactggcacgggtggacgatcttcgagatcctgcgctatatgccggagcacaactggtccgcgtacgaggaggccctcaaagctaacccggttctagccaagatgatgatcagtggtgtcgtctactcccttggtgactggattgcacagtgctacgaaggcaagccaatctttgatttcgaccgtgctcggatgttccggtctggtcttgttgggttcactcttcatgggtcactttcacattactactaccatatctgtgaggcactattcccattcaaggattggtgggttgtccctgcaaaggttgcattcgatcagaccgtttggtctgcaatctggaacagtatctacttcgtggtcttaggtttccttcggttggaatcacctaccactatctacagtgaactcaagtctacattctggcccatgcttaccgctggatggaagttgtggccttttgcacacttaattacatatggtgtggtccctgttgagcaaagacttctatgggtcgactgtgtggagcttgtctgggtcacaatattgtcgacgtactcaaacgaaaagtcagaggcaaggaattctgatagcacctccacaccagatgcttcaaaggacaactccagatagcagccctagagaccttggagagctgattcgcccttccatcgcttcaggggttatgtaaattgtacaattagccgcagcaactctgcaggtgtaaccctttttttggtagatatgtatatattcatgaaacatcaattgtgtagtatgtgccatagaatattacgaagaaagtagcgaacttcattcgtccgttctaaaataagtatatttctagcattcaaaatttatcttgtgttagagtcatttcgaggccatagcccatagctcacttctaacattcaaaatttatctcataatagacatttctaggccatagaccactcgggactaataccttttgctgttttttttttcgtttctagtgtcatgctgctctatttttatatgatatataaataattttataatgctattgatttttggaattgctctattgcgacggagtgaatacaactacagtagctgctggaattagagctagtttagaaatttaaatctcctctaagattgtagagtattaagggacttttagggccagtttgaaagctcgaattctcttcagaattggagagaattcagagaaataaataaa

SEQ ID NO: 89893 - DNA, 1337 bp, Zea Mays
gcaggccgcaaacccaggaaggcgccaggtgccctgtcgcagcagttcgcactccgcagggcaccaccgtccacctccaccgccaccgatcggtagcaacgcgcaccaccgcgtcgtcgtacggcagcacacggaaagagagagagagagagagagagagagagaggaatgggcgaccacgagggtcacggggtcgatttcgagaagaaggccgatcagaagctctccggctggggcctcttcggcaataagtacgaggaagccgccgacctcctcgacagggctggcagcttcttcaaactcgcgaagaactggagcagagcggctgcggtatacaaaaagattgcagattgtcatttgcagggggataacaagcacgatgctgcctctgcttatgttgaggcagcaaactgctacaagaagttctccctgcaagatgctgcacaagcacttaacagtgccgttaatcttttccaggaaatcagtagactgaacatggctgcaagatacagcaaggatatcggtgaaatctatctgcaagaacaagatttagagaatgccgcagtctacctgaatcgcgctgctgatctttttgatagtgagggacaatcctctcaggcaaacagcatgacacagaaaatcgctgaaatatatgctcagctggaaaagtaccagaaagcaaccgagctctttgaagaaattgctcgtaaatcaataaacaataaccttctcaagtacggtgtcagaggcactcttcttaatgcgggcatttgccaactttgtagaggtgatgttgttgctataaataattcattggagcgctatcaggacattgacccaaccttctcagggacacgcgaatacaagcttttggcagaccttgcagcctctacggatgaaggagacgttggcaagtttactgatgcagtaaaggagtttgacagcatgacacgcctggatccttggaaaacaactctccttctgaaggcaaagaacgagttgaagaaaaaggaggaggatgaggatgatctaacctaggctctgttccacaaaaggtttcatgatttcgttgaggatgccgtgaaatcattacacaagattgtttgatataagtatggatatacaaaacctcctggataccgcatttggaatccagtagctgccatttatatatatggcatcctatatgttgcatttgtggattattgttcatggttatatatgctacccatattactccagtctttctagtataaagaggtttaatattccctccattcctttttagttgtcgcgttttagtcgaaaaataatctaacggacgacaaatatttgag

SEQ ID NO: 89894 - DNA, 1625 bp, Zea Mays
caggaaggcgccaggtgccctgtcgcagcagttcgcactccgcagggcaccaccgtccacctccaccgccaccgatcggtagcaacgcgcaccaccgcgtcgtcgtacggcagcacacggaaagagagagagagagagagagagagagagaggaatgggcgaccacgagggtcacggggtcgatttcgagaagaaggccgatcagaagctctccggctggggcctcttcggcaataagtacgaggaagccgccgacctcctcgacagggctggcagcttcttcaaactcgcgaagaactggagcagagcggctgcggtatacaaaaagattgcagattgtcatttgcagggggataacaagcacgatgctgcctctgcttatgttgaggcagcaaactgctacaagaagttctccctgcaagatgctgcacaagcacttaacagtgccgttaatcttttccaggaaatcagtagactgaacatggctgcaagatacagcaaggatatcggtgaaatctatctgcaagaacaagatttagagaatgccgcagtctacctgaatcgcgctgctgatctttttgatagtgagggacaatcctctcaggcaaacagcatgacacagaaaatcgctgaaatatatgctcagctggaaaagtaccagaaagcaaccgagctctttgaagaaattgctcgtaaatcaataaacaataaccttctcaagtacggtgtcagaggcactcttcttaatgcgggcatttgccaactttgtagaggacattgacccaaccttctcagggacacgcgaatacaagcttttggcagtaccatacaatactcacattccttttgttcactgtgttcatcatgatacgtagcccttgattatacattgctagtttttttttgaagaaaaatggcaggagctctgccttgcattatagtagattgaaaagaacataaagttcatctccaaagggcaatgagaaataccacgcacaccagaactaacacagattacaaacgcccatcgccgaaggactaaactgctcccagtacaagtttttaaaagataaacatcgcttgcttgaattccataatttttttaacagtgtagcacagttcaattattgaacatgaactatctaaaataaaacccaaaaaaggctctgtcagtcctagatgttcacgtgttcgagaaaaagaagtcctagatgttttgtttccttagctgacttggctgaactgaaatttgcatggcaggaccttgcagcctctacggatgaaggagacgttggcaagtttactgatgcagtaaaggagtttgacagcatgacacgcctggatccttggaaaacaactctccttctgaaggcaaagaacgagttgaagaaaaaggaggaggatgaggatgatctaacctaggctctgttccacaaaaggtttcatgatttcgttgaggatgccgtgaaatcattacacaagattgtttgatataagtatggatatacaaaacctcctggataccgcatttggaatccagtagctgccatttatatatatggcatcctatatgttgcatttgtggattattgttcatggttatatatgctacccatattactcca

SEQ ID NO: 89895 - DNA, 120 bp, Zea Mays
cgctcacatccagtcgtttttgtggagcgagagtattccaactatttatggtaaattttcatatgaagacttcaatagccattctgctcctctttttttaaactaaacataaaaaaaaga

SEQ ID NO: 89896 - DNA, 1080 bp, Zea Mays
aggcagcatcgcgaacgccgacatgtcgccccacgactggatcgcgctccccggcccgcagttgttgttgttgttcgacgcggcgctgtcgtcgtcgccagcgccagcgccgttgacgacgttgcaggtaccggtggcggctgctacggccgcggccgtgctagcgtgcgcggtcatcgtcggggaagggagcgcgtagcaggagctgtccatgaaccacgacgtcgccagcggcggcggcggcatggtcatggtggactccgccaccgacatctgcatgaaggcgccgcccacatgcgccgcgctgtcggcgtgggcggccgcggccgcggcggcgctcgtcggcgcgcccaggaacatggtggccagccgctgctgctgcagcttccagtggaggtcctggttgatgaagctcagcgactcgatggacgacgcgatgctgctgctgctgctgctcaccgccgcgccaccggtcaccacgtccccggccgtcccggggtgccactccccgaacggcacgtactggccgacgacgccgggcgcgtggagccgcggcagcgcgatcatcccgacggcggcggcgcccgcctgctggtggtggtagtcggccgcggcggggccgcctccgtcgatcgtcgacgacgccaccggatgatgagcgccgaggaagcccagccgcgccgcctgctggtcggcggcggcggcggcctctgggggcaggttgagcgagagccgcgaggaggaggccgccgccgccgcagcagcagcagccgccacggcggccgcggagcgcgagcgcttgttcttgcggcagcccccgccgacgggcacgttgcggagcgcgccgcccttggtccagtacctgcggcaggtcttgcagaagtagcgcggctgcgagaggctgtagttgttgtagtagcagaacttggtgttgggggagtcgcagcgcgggcaccgcagcccctgctcgggcggcgggggcggctgcgtctgcgtctgcgtggtaggaggaggagtgcccccggcgccggtgccgcccttacgtgtaccgaccgcgtcgtcccccgtcgtcgacgccat

SEQ ID NO: 89897 - DNA, 1579 bp, Zea Mays
gccatggagaacaccaagccatgcagtgacttcgggatgatcatggctgatctggagtccgagaacccggttactaatgtggctgccatgaatcgtgcctcggagttgattgctgaaggtaaactcccggaaccccagcttctgcgccgcctaatctcttgtcttgcttccaatctggagaagcctgaccatgaatctgccgtcaagaggaaggttcacttaactctagaggcaatcagggaggccatcaccagcaaccgcgtgaacatagagtccccagctcgcggtgaggctctccatgccatctggtgctgttttatggacgaaggccttcgctgtcttcgtcagcacgaaagtatggtgaggatgtggacagtccaggatcaactggctgccgtcaaaacgctatgtgccaccttccgtcgctcgccggtaaacatcaagaacataaggtgtgtcacaacctttgccgcactgatgctgtcaccctacaccaccgtggcgcgcgcttgtgaagacgccttgctctctttgccctctattccaggatttgcatttgccattgcaagagcctactgccatattatcatagctatgccaccggagtcatcgcctgagataagtagcgcggctgcggttctgggcaggctgaaccagattagcatggccacggtggagggcgaccaccgagggttcggtgatctggccatggatgtgctaggggatgctttagcaaatcgcaatcttcctgttcggaagaaggctctgaacctggtggcgagcctcctcaccccaaggaacgtctgcgatgttctagggctcctcaacagtgagctggtcgtggcagcctccgccaacctccagatcgagtaccgacagatgctggagaaggcgattagagagtgccattctgctcatccggggagtatcctagaattcacgctagatcccaagtatgccgtgttcacggattgtatccgctacaccatggatatcatgaacagcaaccccttgctgcgagtccagcttctgaaaggtcttctaaggatgctccgccatgtcaggtcaccgccggtgtgcgccgctgctgtctggatcatctccgtcttctctgaatcaccggtagaggtcgacgacgccatcgctgcactctcgtgcctcttcaaggacctgctggaccggcgaaaaatcgagaaacagatacttgggagtgaaatggaggacgaatacgtactccctactgaatattatggcgtcactactgcacgaggtgcgcagggagagcgccagcagcggccatggctggtggagatggacgaactgctgtttgtgcgcatagggctcacacggcaggcagatgggagctacgacattgcctcgagttccaagcagagcagtagtagtgctcgtcacgcagataggccgccgtcgttggagcttacagacaatctagcattccttgtgcattctggagattccctcttggcggatttcgtgcaggacatgctgtccgagcttgtagtgaaggcccagagttgcagtgagtccgtttgaactgatggtgatttgaaggtctcaa

SEQ ID NO: 89898 - DNA, 1454 bp, Zea Mays
gtccagactccagagcctccctgtcgttgccacctccccaccacacacgtccaaccccgcacccagtccagatacccatccactggatccttatatacgccggcggcctaagacaccgccagcagccagctcccactcgcaccgcccgtccgcccagaactatctcgctcgtccgcgttcagctcagctactccaatttcgcaacaagttgcaagcaataaccgaccaaggacgacgaacgggtcgatggccacgctctcctcctgcagccgcctgagtagcggcaccggcgccgcggccatccaccggcagccggcccgtgctggagccgtcctcgtcgtcacctgcaggcggagctcctccgcgaccgtccgcgccgcagccgctgccacggcggcggcgccggctgccgtagagctgcagaacaaggggtaagtgtatatatagtggtgtaacaaataagctggctgctgctcttgtagctaattgatcgatgctgctgctgctgctgctggacgcgcgtgcgtgacctccgaccgacttgcaactgcaaagggtgtcgctgccgacgtgggcggagttcgagctcgggcgggcgccggtctactggaagaccagcagcggcctcccgccctcgccgggcgaggggctgaccctgttctacaacccggcggcgacgaagatggccccgaacgaggtgttcggcgtggcgttcaacggcggcttcaaccagcccatcatgtgcggcggagagccgaggcagatgacgctgcaggagcggggcaaagccgacccgcccatctacaccatcaggatacgcgtgccgcagcacggtggagagacagacagcccatccatctctttcatctcatctcactagttacctctcgctgatttctctcggtgcgtgcgtgcagccgtaagcttgatcttctccttcaccaacggggccgagtgggacgggccgtacacgctcaagttcagggtccccaagccatggcagaacaagccgctgagcttcttcaacgagggcctggcggacgaactcaacagggagggcgcctgcgacctggccatctacccggacgagaacatcgccatcaccagctgcgccatggacggctacctcgaggaggggggggatcggtgcaagctggacatcgtgagcggatgcacggaccccagctccgacatgttcgacccgctggccaccgtcgacgacggctcctgccccctcgagtctgattccgaggaatgatgaaggagctccatctcaatccgagggagggaggcagcagcagcaaacgtgatccacacaaatgtctgtcaagtttgtcatcatgtgatacatgaagcatacctgtatttagccagaataccacagtaaaaacgcatcaatgagcaagatgatctggatacatggtatccatctttgcaaactctgatacaaaaca

SEQ ID NO: 89899 - DNA, 1939 bp, Zea Mays
gtccagactccagagcctccctgtcgttgccacctccccaccacacacgtccaaccccgcacccagtccagatacccatccactggatccttatatacgccggcggcctaagacaccgccagcagccagctcccactcgcaccgcccgtccgcccagaactatctcgctcgtccgcgttcagctcagctactccaatttcgcaacaagttgcaagcaataaccgaccaaggacgacgaacgggtcgatggccacgctctcctcctgcagccgcctgagtagcggcaccggcgccgcggccatccaccggcagccggcccgtgctggagccgtcctcgtcgtcacctgcaggcggagctcctccgcgaccgtccgcgccgcagccgctgccacggcggcggcgccggctgccgtagagctgcagaacaagggggtgtcgctgccgacgtgggcggagttcgagctcgggcgggcgccggtctactggaagaccagcagcggcctcccgccctcgccgggcgaggggctgaccctgttctacaacccggcggcgacgaagatggccccgaacgaggtgttcggcgtggcgttcaacggcggcttcaaccagcccatcatgtgcggcggagagccgaggcagatgacgctgcaggagcggggcaaagccgacccgcccatctacaccatcaggatacgcgtgccgcagcacgccgtaagcttgatcttctccttcaccaacggggccgagtgggacgggccgtacacgctcaagttcagggtccccaagccatggcagaacaagccgctgagcttcttcaacgagggcctggcggacgaactcaacagggagggcgcctgcgacctggccatctacccggacgagaacatcgccatcaccagctgcgccatggacggctacctcgaggaggggggggatcggtgcaagctggacatcgtgagcggatgcacggaccccagctccgacatgttcgacccgctggccaccgtcgacgacggctcctgccccctcgagtctgattccgaggaatgatgaaggagctccatctcaatccgagggagggaggcagcagcagcaaacgtgatccacacaaatgtctgtcaagtttgtcatcatgtgatacatgaagcatacctgtatttagccagaataccacagtaaaaacgcatcaatgagcaagatgatctggatacatggtatccatctttgcaaactctgatacaaaacagtcttaaacagagcagtagcatggaacacaccaaatacgccatgctctggtctgcatactttccgctcagctatgctgtgaactacccatctggatttgctcctctcctatggaaaccgttggagtttaatgaaacaagcaacagcaacatggtctcatgccggatgtagcatacaactcattacaaaagatagcaagatacgataaacccttccaaatgaatgaaagacgagtcagtttacgaatcatctgcacagcatgtctgaaactgaaacgaacaagcataactcaaccaccgtccaccagccatcacggttccagagttccaaggcaaccacagacgtcaaggtaacatctagcatagcatcgtttcgtcttggttcattcactgttcagcatccactcagaggcaacgaagacctgtaactacacatcctttccatgccaagtagatcagcatcttcagtctccaccaacctggcgtttccaggagtcctccacaatgagctcgtctactccccagtcttcataactgtttatcaacgaagtaattaacaatgaaaatatagtaaaattgttcataaaaataagtgagggcttttcattagaaaatactcaccttccatcaggtaggtaccgtctgatcgtgaagggtatcttgcgcgctctaagctccttcatcgcaatctagag

SEQ ID NO: 89900 - DNA, 1480 bp, Zea Mays
ccagagcctccctgtcgttgccacctccccaccacacacgtccaaccccgcacccagtccagatacccatccactggatccttatatacgccggcggcctaagacaccgccagcagccagctcccactcgcaccgcccgtccgcccagaactatctcgctcgtccgcgttcagctcagctactccaatttcgcaacaagttgcaagcaataaccgaccaaggacgacgaacgggtcgatggccacgctctcctcctgcagccgcctgagtagcggcaccggcgccgcggccatccaccggcagccggcccgtgctggagccgtcctcgtcgtcacctgcaggcggagctcctccgcgaccgtccgcgccgcagccgctgccacggcggcggcgccggctgccgtagagctgcagaacaaggggtaagtgtatatatagtggtgtaacaaataagctggctgctgctcttgtagctaattgatcgatgctgctgctgctgctgctggacgcgcgtgcgtgacctccgaccgacttgcaactgcaaagggtgtcgctgccgacgtgggcggagttcgagctcgggcgggcgccggtctactggaagaccagcagcggcctcccgccctcgccggtgagtcagtcggtcggtcgaaatgtcgagtccgtgtccatggatgatgcggattggatcggatcctgcttctgctagctagcgctggctgatacgcgcgtgcgtgggatggttggcagggcgaggggctgaccctgttctacaacccggcggcgacgaagatggccccgaacgaggtgttcggcgtggcgttcaacggcggcttcaaccagcccatcatgtgcggcggagagccgaggcagatgacgctgcaggagcggggcaaagccgacccgcccatctacaccatcaggatacgcgtgccgcagcacgccgtaagcttgatcttctccttcaccaacggggccgagtgggacgggccgtacacgctcaagttcagggtccccaagccatggcagaacaagccgctgagcttcttcaacgagggcctggcggacgaactcaacagggagggcgcctgcgacctggccatctacccggacgagaacatcgccatcaccagctgcgccatggacggctacctcgaggaggggggggatcggtgcaagctggacatcgtgagcggatgcacggaccccagctccgacatgttcgacccgctggccaccgtcgacgacggctcctgccccctcgagtctgattccgaggaatgatgaaggagctccatctcaatccgagggagggaggcagcagcagcaaacgtgatccacacaaatgtctgtcaagtttgtcatcatgtgatacatgaagcatacctgtatttagccagaataccacagtaaaaacgcatcaatgagcaagatgatctggatacatggtatccatctttgcaaactctgatacaaaaca

SEQ ID NO: 89901 - DNA, 1285 bp, Zea Mays
agcagccagctcccactcgcaccgcccgtccgcccagaactatctcgctcgtccgcgttcagctcagctactccaatttcgcaacaagttgcaagcaataaccgaccaaggacgacgaacgggtcgatggccacgctctcctcctgcagccgcctgagtagcggcaccggcgccgcggccatccaccggcagccggcccgtgctggagccgtcctcgtcgtcacctgcaggcggagctcctccgcgaccgtccgcgccgcagccgctgccacggcggcggcgccggctgccgtagagctgcagaacaagggggtgtcgctgccgacgtgggcggagttcgagctcgggcgggcgccggtctactggaagaccagcagcggcctcccgccctcgccgggcgaggggctgaccctgttctacaacccggcggcgacgaagatggccccgaacgaggtgttcggcgtggcgttcaacggcggcttcaaccagcccatcatgtgcggcggagagccgaggcagatgacgctgcaggagcggggcaaagccgacccgcccatctacaccatcaggatacgcgtgccgcagcacgccgtaagcttgatcttctccttcaccaacggggccgagtgggacgggccgtacacgctcaagttcagggtccccaagccatggcagaacaagccgctgagcttcttcaacgaggtgagtgtctaccgtcttgggtgatgatggtgaccactgaccggtggtgcaggcgtgcagcgagctgagtactggtctgttgcagggcctggcggacgaactcaacagggagggcgcctgcgacctggccatctacccggacgagaacatcgccatcaccagctgcgccatggacggctacctcgaggagggggtgggttcttctcaccgctgctctgctctatagtcgtcattcatatgccatccattcgtgtttcagtttcacaacacaactgacccttgcagggggatcggtgcaagctggacatcgtgagcggatgcacggaccccagctccgacatgttcgacccgctggccaccgtcgacgacggctcctgccccctcgagtctgattccgaggaatgatgaaggagctccatctcaatccgagggagggaggcagcagcagcaaacgtgatccacacaaatgtctgtcaagtttgtcatcatgtgatacatgaagcatacctgtatttagccagaataccacagtaaaaacgcatcaatgagcaagatgatctggatacatggtatccatctttgc

SEQ ID NO: 89902 - DNA, 497 bp, Zea Mays
ctcaagagggtcagtttctccctcaagctcaaccatgactggagcattcatgctgcaaaagactaaagattagtattaggttgcaagatagcttttacatgctcaacactagtattaactattaaccttatctgcaaggctcgtgtaccaagaatgcgcgcacgttcatacttcgtcatatattttgttgttttgcgctcacgcttggtcttttcctgttccttatcttcaccctctccacctatgacatcatcaggggcatcttcgttgttctcaagctcttcttcggccccttcctgttcaacagaaagaggggggaaggatgagggagagtcgaaccccatgtcgatttcgttgtaatcgtcgtccgccatggctccgcccgcgcgagcgccgctgctccggtggtttgcttgctagggttttggcttgcggctgctgggacgagaggaaggtaggaaactggaggaaacggggtcacggggaagtgccttttt

SEQ ID NO: 89903 - DNA, 901 bp, Zea Mays
ccaactcaacgcattgcgagaacaggcccgccgccacgccgcccaggtaggttttgtttgggatctcaccatttcttccttgtctctgtctcaacacggcgccgccgcttctgccgccgggagccgagcccaagcctaagcgaaagccatggcgattggttctctgatcgcctctactttcgccagatctagccatgccctccccgctgccgccgcttcggccatctctcaggctcccagatcccagcacaccgcatctcctctactctccggccttggagcagcggctcgtgctttcagctcaagggctctatggaagggagcattcgttgacgctttcctgtctagaattaagaagaacagagaaaatatgaatggcaagaagatttggtctcgtagatcctctattttgccggaatttgttggttcctctgtgctcatttacaatgggaaaactcatgtccggtgcaagatcactgaagggaaggttggccataaatttggagagtttgcttttacacggagacgaaggccccatcgaacaatgacaggaaagggaaatcaaggaaaggcaagaaagtaaaaggagaaatgtgcatgaaaggtgaggttataatatcacaagaaattaatttagatatcagccgatactgcgaaaagttaacctgccttttttttagtgtttttgggtaatatctgaaatttcaattagttgcgtgtaggaaaaacattccgctagcactaaactgtgaagtgaatgatatgtaactataggagcatatcttttatttatgtgtttgaaaagtgtattaggagctgtgcttcatgtcagggctaatctttgccgtcaaatctttgtaacatggttaagagatggtagacccgatttttgctgctttta

SEQ ID NO: 89904 - DNA, 602 bp, Zea Mays
ccaactcaacgcattgcgagaacaggcccgccgccacgccgcccaggtaggttttgtttgggatctcaccatttcttccttgtctctgtctcaacacggcgccgccgcttctgccgccgggagccgagcccaagcctaagcgaaagccatggcgattggttctctgatcgcctctactttcgccagatctagccatgccctccccgctgccgccgcttcggccatctctcaggtggttttaaggatagcatgatgaggcagtagttgacgaacaagaacatgaataaccagaaattatgatctggactgctttactgctttttcttagaccaataattgcaggagaatgttagttcatcttacttaaagattcgtccgtgtactttgttcctatctacttcctgcttacttttggtgtcatgagtgaacattaaactgatcgtaagttatgctttagagtgattgtttcttgccacagttagctgttcacctcgtggccactcaaatagcagaagttcccgacaaactgaagacaatcaataatactaatttatgcaaacagctatgatagacgccgtatgtttgaaggaattgataagttc

SEQ ID NO: 89905 - DNA, 967 bp, Zea Mays
aacgcattgcgagaacaggcccgccgccacgccgcccaggtaggttttgtttgggatctcaccatttcttccttgtctctgtctcaacacggcgccgccgcttctgccgccgggagccgagcccaagcctaagcgaaagccatggcgattggttctctgatcgcctctactttcgccagatctagccatgccctccccgctgccgccgcttcggccatctctcaggctcccagatcccagcacaccgcatctcctctactctccggccttggagcagcggctcgtgctttcagctcaagggctctatggaagggagcattcgttgacgctttcctgtctagaattaagaagaacagagaaaatatgaatggcaagaagatttggtctcgtagatcctctattttgccggaatttgttggttcctctgtgctcatttacaatgggaaaactcatgtccggtgcaagatcactgaagggaaggttggccataaatttggagagtttgcttttacacggagacgaaggccccatcgaacaatgacaggaaagggaaatcaaggaaaggcaagaaagtaaaaggagaaatgtgcatgaaaggtggttttaaggatagcatgatgaggcagtagttgacgaacaagaacatgaataaccagaaattatgatctggactgctttactgctttttcttagaccaataattgcaggagaatgttagttcatcttacttaaagattcgtccgtgtactttgttcctatctacttcctgcttacttttggtgtcatgagtgaacattaaactgatcgtaagttatgctttagagtgattgtttcttgccacagttagctgttcacctcgtggccactcaaatagcagaagttcccgacaaactgaagacaatcaataatactaatttatgcaaacagctatgatagacgccgtatgtttgaaggaattgataagttc

SEQ ID NO: 89906 - DNA, 2222 bp, Zea Mays
gatagggaagtattcgtgttcgtgtccgactccagtggacaaggcatggcggggagaggcggcggcggcaaaggcgccgcagggaggatgatgtcgctgcaggaattcgtgtcctgcatgcagccgctcatcgatctcgagaaggcggcggagatatcggcggagtccgagacgagcgctaagagcctggagaggagggggtgcgtcattgccaacctcaagtgcactgatgcccagacgggactgatggggaagacgctcctggagttccaacccaacaaaggcgacgttctcccgtctcacaagtttggaacacatgatgtggttgccctgaagccaaataaggcagatgctggatctgcttcacttggtcaaggtgtagtttatcgcttaaaggattcttccattactgttgcttttgatgatattcctgaagatggcttaaacagccctctgcgtcttgagaagcttgcaaatgaggtcacttatcgcaggatgaaggatgcactaattgaacttagcaaggctgtccaaacaggaccttgtgcaaaccttgttcctgttttatttggagagaaggcacccatgcgctccaaggatgctatgaaattcagtccattcaacaagaacttggatgattcacagaaagaggctatttcgaaggctcttggatcaagggatgttttcttgcttcacggacctcctggaactgggaaaacaacaactattattgagataatattgcaggaggtcaagcgtggatcaaagattcttgcctgtgctgcttccaatattgctgtggataatattgttgagcgacttgcacgatacagaacaaaattggtgaggttagggcaccctgctcgtttactgcctcaagtgctcgacagcgctcttgatgcacaggttttacgagctgataatagtagcttggcaggagacattcgcaaggaaatgaaggtgctcaatagcaaattgctgaaggctaaagataggaacactaaacgggacatcaggaaagagctcaaaacgcttgcaaaagaggagagaaaacgacagcagcttgcagtcactgatgtactgaaaaatgcagatgttgtgctgaccactctgactggtgcatcttcgaaaaagttaaacggaattacatttgatttggttgttattgatgaagctgcccaggcacttgaggtggcatgctggatagccttgttgaaagggccgagatgtattcttgctggagaccatcttcaacttcctccaacaattcaaagtgttgaggctgaaaagaaggggatgggaaagacactctttgaacgccttactgaagcttatggagaggaaatcacatccatgctcactgtgcagtacagaatgcacgagcacattatgagctggtcatctaaagaactttacaataataagatcaaagcacattctagtgttgctgggcatatgctctatgatctagaagaagtcactagatcttcttcaacagaaccaactattgtactcattgacactacagggtgtgatatggaagaagtaaaagatgaagaggagagcaccatgaatgagggcgaggcagcagtatccattgctcatgccaagttgcttgttgagagtggcgttaatgcttctgatattggaataattacgccttacgctgcacaggtaacctgcttgaagatgatgagaaacaaagatgccaagttgaaagatttagagatatctacagttgatgggtttcaaggccgggagaaagaagccatcatcatttctatggtccggtctaactcaaagaaagaggtggggttcttgagcgatcacaggcggatgaacgtggcggtgacgcgagccaggaggcagtgctgcctggtgtgcgacgtggagaccgtgagcagcgacaggttcctgaaacgcttggtcgaatacttcgaggagaacggggagtacttgagtgcttcagaataccagagcagctgactggcgtcgatcagatccattcagctcttcttctagtggctcgtggtggcatctggctggcatgtccgtggagcaagtggataggatccgcatggagtcttggagaacacaatatcaagctttggttcctagatatctcagcttttcttttcttttctcttggtgaacgcataaatgatgtattgttgtgacgttgccaatgccatgggaatgagatctttaacaaaacaaaaaac

SEQ ID NO: 89907 - DNA, 1313 bp, Zea Mays
gaagtattcgtgttcgtgtccgactccagtggacaaggcatggcggggagaggcggcggcggcaaaggcgccgcagggaggatgatgtcgctgcaggaattcgtgtcctgcatgcagccgctcatcgatctcgagaaggcggcggagatatcggcggagtccgagacgagcgctaagagcctggagaggagggggtgcgtcattgccaacctcaagtgcactgatgcccagacgggactgatggggaagacgctcctggagttccaacccaacaaaggcgacgttctcccgtctcacaagtttggaacacatgatgtggttgccctgaagccaaataaggcagatgctggatctgcttcacttggtcaaggtgtagtttatcgcttaaaggattcttccattactgaagcttatggagaggaaatcacatccatgctcactgtgcagtacagaatgcacgagcacattatgagctggtcatctaaagaactttacaataataagatcaaagcacattctagtgttgctgggcatatgctctatgatctagaagaagtcactagatcttcttcaacagaaccaactattgtactcattgacactacagggtgtgatatggaagaagtaaaagatgaagaggagagcaccatgaatgagggcgaggcagcagtatccattgctcatgccaagttgcttgttgagagtggcgttaatgcttctgatattggaataattacgccttacgctgcacaggtaacctgcttgaagatgatgagaaacaaagatgccaagttgaaagatttagagatatctacagttgatgggtttcaaggccgggagaaagaagccatcatcatttctatggtccggtctaactcaaagaaagaggtggggttcttgagcgatcacaggcggatgaacgtggcggtgacgcgagccaggaggcagtgctgcctggtgtgcgacgtggagaccgtgagcagcgacaggttcctgaaacgcttggtcgaatacttcgaggagaacggggagtacttgagtgcttcagaataccagagcagctgactggcgtcgatcagatccattcagctcttcttctagtggctcgtggtggcatctggctggcatgtccgtggagcaagtggataggatccgcatggagtcttggagaacacaatatcaagctttggttcctagatatctcagcttttcttttcttttctcttggtgaacgcataaatgatgtattgttgtgacgttgccaatgccatgggaatgagatctttaacaaaacaaaaaacaaaaaaacaaga

SEQ ID NO: 89908 - DNA, 741 bp, Zea Mays
atgcatatgtctacattcatttgaatgtagacggaagaaaatagggctagaaaatatgtctacattttcttgcaattgagcttttaattcatctggttgttttgcatttatttatggttggcttcttgagggcttcacctagttctgaaggcctgaattattgaatggctcaataccataggtaacctgcttgaagatgatgagaaacaaagatgccaagttgaaagatttagagatatctacagttgatgggtttcaaggccgggagaaagaagccatcatcatttctatggtccggtctaactcaaagaaagaggtggggttcttgagcgatcacaggcggatgaacgtggcggtgacgcgagccaggaggcagtgctgcctggtgtgcgacgtggagaccgtgagcagcgacaggttcctgaaacgcttggtcgaatacttcgaggagaacggggagtacttgagtgcttcagaataccagagcagctgactggcgtcgatcagatccattcagctcttcttctagtggctcgtggtggcatctggctggcatgtccgtggagcaagtggataggatccgcatggagtcttggagaacacaatatcaagctttggttcctagatatctcagcttttcttttcttttctcttggtgaacgcataaatgatgtattgttgtgacgttgccaatgccatgggaatgagatctttaacaaaacaaaaaacaaaaaaacaaga

SEQ ID NO: 89909 - DNA, 1036 bp, Zea Mays
cttgccttaggggtcgcctaggcgtctaggtagtggtccagcgcgttatctcgtcttaagaaccatggttacatggataagacatgcatcattgaagaaagttaattcttgtgtgctcttttatttcatcacctggcctactttttgtctatccatatcttcacctggcgtgctttattttgatagctgcaacttgattttgtcttgaaaggcactgctcccatgtaactgcatgtaatgcatcttctaaattgtggatgacaatgtacatcctagaacctcttgcatgctccttttgttttgtctcctggcattcttggtactttgatagctgtgacttgatttttggcttgaatggcaaatgctcttttgtaactgcatgctggaaccaatagagacaagaccactgtggatgatacaaccaacagaatcaacaggctactatacaagattcgatccatacggatgtgtggatcattggctttaaacatgtgtggagttgcctgtggtagactagatttgtgttatgagataggatttggtggtccatgggatgttgctgctggtgctgtaattcttcaggaagccggtggccttgtttttgacccaagcggcggagagtttgatttgatgtcgcgaagaatggcaggatcaaacagcttgctgaaggataagttcgtcaaggaactgggggatactaattgaaacaaatgttagtattattcgtggaacagattaagacaataaggttgccccgccgcatggtgattaacttattgtttgggcaacaaaattccatgtaattctgcacctgtacaactatgttggacgcagaacattttattgagttttgtgattacatgggaatacataggttgaggcaacggtccctactttatggcaatatgtttgggttggaatggcttgagtccaatttcaagtgtgctgcaaggaggaaagtaaattgctggatctttacgcatttgctgataataatatatggttgctacgctgcaaacaatttgcggtggcatat

SEQ ID NO: 89910 - DNA, 715 bp, Zea Mays
cctcttaagaaaatctgctggggatactaaactgataattatactgattgatcaggctggaaccaatagagacaagaccactgtggatgatacaaccaacagaatcaacaggctactatacaagattcgatccatacggatgtgtggatcattggctttaaacatgtgtggagttgcctgtggtagactagatttgtgttatgagataggatttggtggtccatgggatgttgctgctggtgctgtaattcttcaggaagccggtggccttgtttttgacccaagcggcggagagtttgatttgatgtcgcgaagaatggcaggatcaaacagcttgctgaaggataagttcgtcaaggaactgggggatactaattgaaacaaatgttagtattattcgtggaacagattaagacaataaggttgccccgccgcatggtgattaacttattgtttgggcaacaaaattccatgtaattctgcacctgtacaactatgttggacgcagaacattttattgagttttgtgattacatgggaatacataggttgaggcaacggtccctactttatggcaatatgtttgggttggaatggcttgagtccaatttcaagtgtgctgcaaggaggaaagtaaattgctggatctttacgcatttgctgataataatatatggttgctacgctgcaaacaatttgcggtggcatatttaag

SEQ ID NO: 89911 - DNA, 737 bp, Zea Mays
ggatttgtgatattcttgggatacggatacgaatatagcatcggatattgaacgtcctcgatttggttagcagactgcagacctagcaggctagcaaccattctagctccgaattcggagcaggcgagggcgaactgaccgaggcgaggacgatcactgtccatgtccatggaggcggcggttggggcggagttcggacctcatctgcatcccgctctcgggttcagacacagccagcgccgtgtctttttttgctgttggcgcctgcatccgccccggccggcctcgcttggcctctgcggtggcgggggagcccgtccccgcggcgctatccccgtcgcggatggcgaccagcggcggcggctgcgagagctcgaggcggaggcggaggcggaagctggatcgatcttgggtcctccgaggagcagcccccgcgaggtgagggaggagatggccccggtgcttcgacctcgtccgccgcctcggtaggggcgccgtctacctcggctcctccagggtcccgcccacgcacccgcacttcctccaaaccaccgagctcgccagagaggcaatcagtactactatagcaatctactagcattgacatgttgctagtttcagcagcagattcttgactgaagtgttagagaacgccgtaaacaaaatctattcagacatgagccaatacattgaattcgactgcaagtagctgtagacatgagtcattggcattgtgc

SEQ ID NO: 89912 - DNA, 1382 bp, Zea Mays
ggatttgtgatattcttgggatacggatacgaatatagcatcggatattgaacgtcctcgatttggttagcagactgcagacctagcaggctagcaaccattctagctccgaattcggagcaggcgagggcgaactgaccgaggcgaggacgatcactgtccatgtccatggaggcggcggttggggcggagttcggacctcatctgcatcccgctctcgggttcagacacagccagcgccgtgtctttttttgctgttggcgcctgcatccgccccggccggcctcgcttggcctctgcggtggcgggggagcccgtccccgcggcgctatccccgtcgcggatggcgaccagcggcggcggctgcgagagctcgaggcggaggcggaggcggaagctggatcgatcttgggtcctccgaggagcagcccccgcgaggtgagggaggagatggccccggtgcttcgacctcgtccgccgcctcggtaggggcgccgtctacctcggctcctccagggtcccgcccacgcacccgcacttcctccaaaccaccgagctcgccagagagatagctcggctgctcggctgcaccacatggacgggagccggccctgggctcatggatgctgccatccaaggcgcctttgaggcagacaagcctgtcggtggcttgaagattgcaaaggaagcgggtgaatggacaagctcaggcttccatccttacctgccaccggagacctacctcacatgcaggttcttctctgcgaggaagcatggcctggtggatgctgcggtgcggagcagctctactgacagaaccgctgtggttgcgctgccaggaggggttgggacgctggacgagctgtttgagatcttggcgctgattcaactagagaggatcgggtcagcgctcccggtcccggtcttgcttctcaactacgattcttattactccaagcttttggaatttctgaatgactgccaggagtggggcacggttgctccgggcgaagttgcatcactttggaaggtttgtgatgggaatcatgaagctttggagtacctggcagagttctacggtgttccccataacgagagagaatattaaataacaccacagttgaagaaccaaagagtttcatatgccacgagctgaggacaaaatatttgcaagagttttcttgcttctttttactcctgtgcaggaggacaaataattgttgagctgttgagttttccatgtggagatgctctcaaggcatattagcaacagaagcaacatttagaacagacaacaatttccagaccagtcgcatgttgtacactttctgttgactgattgacagagatgatgaatgcagacgatttacgtttaaaccttg

SEQ ID NO: 89913 - DNA, 3834 bp, Zea Mays
ggatttgtgatattcttgggatacggatacgaatatagcatcggatattgaacgtcctcgatttggttagcagactgcagacctagcaggctagcaaccattctagctccgaattcggagcaggcgagggcgaactgaccgaggcgaggacgatcactgtccatgtccatggaggcggcggttggggcggagttcggacctcatctgcatcccgctctcgggttcagacacagccagcgccgtgtctttttttgctgttggcgcctgcatccgccccggccggcctcgcttggcctctgcggtggcgggggagcccgtccccgcggcgctatccccgtcgcggatggcgaccagcggcggcggctgcgagagctcgaggcggaggcggaggcggaagctggatcgatcttgggtcctccgaggagcagcccccgcgaggtgagggaggagatggccccggtgcttcgacctcgtccgccgcctcggtaggggcgccgtctacctcggctcctccagggtcccgcccacgcacccgcacttcctccaaaccaccgagctcgccagagaggcaatcagtactactatagcaatctactagcattgacatgttgctagtttcagcagcagattcttgactgaagtgttagagaacgccgtaaacaaaatctattcagacatgagccaatacattgaattcgactgcaagtagctgtagacatgagtcattggcattgtgcaccatatctttctgcatttatgggttgtttggtttctagagactaatttttaatccttttattttattccattttagtccttaaattactaaatacggaatctaaatagagttttagtttccgtatttagcaatttagggactaaaataaaataaaatggagagactaaaaattagtccctagataccaaacacccccttactcagccacctgtctttgcatcgacagatagctcggctgctcggctgcaccacatggacgggagccggccctgggctcatggatgctgccatccaaggcgcctttgaggcagacaagcctgtcggtggcttgaagattgcaaaggaagcgggtgaatggacaagctcaggcttccatccttacctgccaccggagacctacctcacatgcaggtacctgaattttctgaggatgcaaaataagattcaccacagcttatgagacatggtgatcgctatgcgctaagctgaatttcaggttcttctctgcgaggaagcatggcctggtggatgctgcggtgcggagcagctctactgacagaaccgctgtggttgcgctgccaggaggggttgggacgctggacgagctgtttgagatcttggcgctgattcaactagagaggatcgggtcagcgctcccggtcccggtcttgcttctcaactacgattcttattactccaagcttttggaatttctgaatgactgccaggagtggggcacggttgctccgggcgaagttgcatcactttggaaggtttgtgatgggaatcatgaagctttggagtacctggcagagttctacggtgttccccataacgagagagaatattaaataacaccacagttgaagaaccaaagagtttcatatgccacgagctgaggacaaaatatttgcaagagttttcttgcttctttttactcctgtgcaggaggacaaataattgttgagctgttgagttttccatgtggagatgctctcaaggcatattagcaacagaagcaacatttagaacagacaacaatttccagaccagtcgcatgttgtacactttctgttgactgattgacagagatgatgaatgcagacgatttacgtttaaaccttgcatgccattttttctttagttaatgacagttaactaaataggagcattagtatttagtagaaggaactatgctatgcagattctcttcagatttggtctgctgcagctggtttttctctgtagaagtttgttttgttggtataattattgggctcatggaagatgaacggggtgattgtgagttgtgactcatcatcggctctataacgccattctttgctccaaggatgaagcaacatgcgttgtaaaattacttctttcacctgaagtttacctttcggccattctgttcaagatgtttactggaaacaaacatggaagagtaaccggacggtatacatgcctccagacttttggcctgtgacctggacagctggtgatgtttcaacagagatctggcacaacaactcgatagctgcatactgactgctgagctgtacagattacaaggagtgcagaatagacttgtttattgtacaacaaagtataacaagctcgaactgaaagttggttttgttgaaggccagagcaatgttgtcgtcgttattccagaaggcagtggtgatatttagcctagcaagcctacattttttgggttttgcaagtcattgcagaaaatttcggcttcaaacatgcagcagaatacatggaaatgttcaatgggtaatggcataaaatctgctccttgtgctagctctaaagaagagcaggaaactaaattaagatctgatagagagtagagacgcagcagctttcaagccccctagtgatcagacaccagcaacttcttatggacaagagttcaagaattgtcctctgccgaaagatctcttctgacggaagagcagttaaagtcataatttgttctagtgttaaaactcagtgaattgaggccacgaaggcaaacaacaatttatagaccaaatccattggtaagactgtattacgaaagatgaaaggcatgtttggttcgttacctcaattgccacactttgcctaacttttctgtctaagattaattattcaatttggacgactaacattagacaaagtgtggcacatttagccacaaaccaaacatgcccgaagttcattaaagtcctggtggtggaaccaacagttgcccaatgctcttttcatgaatgagccttgtcatctgctcttggcaacaaagccatgccttgattacattttctttcacacacacacttcatctcttctaaatcgcttccaatggtttgaagatgttttcatatgccatgattcatctgtggcattagttgatgaatgctccacatgtagcgccttatgtgacattgagtctacctcccagatcaaaggaaatcgtgatgccaccaagtgctctatcttcatcaggttttccctctgataatgctgttccagctcgtcgctgggaataaacataagcagagggcacttgatcgctgatagatgtgtaaggccttctgaaagacaaggtaaaatcttcagattggtatcaagcaacaatttagaacaatcctgattgagcttggtatcaagtggtaggccttctaacacacatcaattaacgagcccaaaagattgcaaattctcaaaacaggagctctcaagtctcgagtaactatggtggcggtctagcgacaaggcggcgactataggaagtcattctcaatagagggttttatcacattatcaacatttgtatagaaaacagcgtatatagagtttcagccccatgaaactctctcttcattaacatgcatatcatatcatcatttttgctactccctacgctctaaaatagtattcattttagctcttgatttttatatttatattcaactagatcataataaatgtaaacatatatatagaaaatatacaccaaaatgcatgaatgcagtaaaaaaggcaaaacaattttataaggttagatattagattatcatcttgtttctctcttaaat

SEQ ID NO: 89914 - DNA, 3352 bp, Zea Mays
ggatttgtgatattcttgggatacggatacgaatatagcatcggatattgaacgtcctcgatttggttagcagactgcagacctagcaggctagcaaccattctagctccgaattcggagcaggcgagggcgaactgaccgaggcgaggacgatcactgtccatgtccatggaggcggcggttggggcggagttcggacctcatctgcatcccgctctcgggttcagacacagccagcgccgtgtctttttttgctgttggcgcctgcatccgccccggccggcctcgcttggcctctgcggtggcgggggagcccgtccccgcggcgctatccccgtcgcggatggcgaccagcggcggcggctgcgagagctcgaggcggaggcggaggcggaagctggatcgatcttgggtcctccgaggagcagcccccgcgaggtgagggaggagatggccccggtgcttcgacctcgtccgccgcctcggtaggggcgccgtctacctcggctcctccagggtcccgcccacgcacccgcacttcctccaaaccaccgagctcgccagagagatagctcggctgctcggctgcaccacatggacgggagccggccctgggctcatggatgctgccatccaaggcgcctttgaggcagacaagcctgtcggtggcttgaagattgcaaaggaagcgggtgaatggacaagctcaggcttccatccttacctgccaccggagacctacctcacatgcaggttcttctctgcgaggaagcatggcctggtggatgctgcggtgcggagcagctctactgacagaaccgctgtggttgcgctgccaggaggggttgggacgctggacgagctgtttgagatcttggcgctgattcaactagagaggatcgggtcagcgctcccggtcccggtcttgcttctcaactacgattcttattactccaagcttttggaatttctgaatgactgccaggagtggggcacggttgctccgggcgaagttgcatcactttggaaggtttgtgatgggaatcatgaagctttggagtacctggcagagttctacggtgttccccataacgagagagaatattaaataacaccacagttgaagaaccaaagagtttcatatgccacgagctgaggacaaaatatttgcaagagttttcttgcttctttttactcctgtgcaggaggacaaataattgttgagctgttgagttttccatgtggagatgctctcaaggcatattagcaacagaagcaacatttagaacagacaacaatttccagaccagtcgcatgttgtacactttctgttgactgattgacagagatgatgaatgcagacgatttacgtttaaaccttgcatgccattttttctttagttaatgacagttaactaaataggagcattagtatttagtagaaggaactatgctatgcagattctcttcagatttggtctgctgcagctggtttttctctgtagaagtttgttttgttggtataattattgggctcatggaagatgaacggggtgattgtgagttgtgactcatcatcggctctataacgccattctttgctccaaggatgaagcaacatgcgttgtaaaattacttctttcacctgaagtttacctttcggccattctgttcaagatgtttactggaaacaaacatggaagagtaaccggacggtatacatgcctccagacttttggcctgtgacctggacagctggtgatgtttcaacagagatctggcacaacaactcgatagctgcatactgactgctgagctgtacagattacaaggagtgcagaatagacttgtttattgtacaacaaagtataacaagctcgaactgaaagttggttttgttgaaggccagagcaatgttgtcgtcgttattccagaaggcagtggtgatatttagcctagcaagcctacattttttgggttttgcaagtcattgcagaaaatttcggcttcaaacatgcagcagaatacatggaaatgttcaatgggtaatggcataaaatctgctccttgtgctagctctaaagaagagcaggaaactaaattaagatctgatagagagtagagacgcagcagctttcaagccccctagtgatcagacaccagcaacttcttatggacaagagttcaagaattgtcctctgccgaaagatctcttctgacggaagagcagttaaagtcataatttgttctagtgttaaaactcagtgaattgaggccacgaaggcaaacaacaatttatagaccaaatccattggtaagactgtattacgaaagatgaaaggcatgtttggttcgttacctcaattgccacactttgcctaacttttctgtctaagattaattattcaatttggacgactaacattagacaaagtgtggcacatttagccacaaaccaaacatgcccgaagttcattaaagtcctggtggtggaaccaacagttgcccaatgctcttttcatgaatgagccttgtcatctgctcttggcaacaaagccatgccttgattacattttctttcacacacacacttcatctcttctaaatcgcttccaatggtttgaagatgttttcatatgccatgattcatctgtggcattagttgatgaatgctccacatgtagcgccttatgtgacattgagtctacctcccagatcaaaggaaatcgtgatgccaccaagtgctctatcttcatcaggttttccctctgataatgctgttccagctcgtcgctgggaataaacataagcagagggcacttgatcgctgatagatgtgtaaggccttctgaaagacaaggtaaaatcttcagattggtatcaagcaacaatttagaacaatcctgattgagcttggtatcaagtggtaggccttctaacacacatcaattaacgagcccaaaagattgcaaattctcaaaacaggagctctcaagtctcgagtaactatggtggcggtctagcgacaaggcggcgactataggaagtcattctcaatagagggttttatcacattatcaacatttgtatagaaaacagcgtatatagagtttcagccccatgaaactctctcttcattaacatgcatatcatatcatcatttttgctactccctacgctctaaaatagtattcattttagctcttgatttttatatttatattcaactagatcataataaatgtaaacatatatatagaaaatatacaccaaaatgcatgaatgcagtaaaaaaggcaaaacaattttataaggttagatattagattatcatcttgtttctctcttaaat

SEQ ID NO: 89915 - DNA, 435 bp, Zea Mays
atgggagcagatgaaattcgtgcgcgcggcaaacaaggaaagagcgagctatacgtgagcagagaggtcgacgagcggcgcgcgcgcacggacaacagcgaagagctcggcgcgcagcgagttggaactggagcgccgcgatgggcgaagtggagcacggccagcgcgcgtctaccaaagaactcgcgcggtacacagggagaacaggcagccaccagggagatcgtccaggcgcgcgcgacgagcagagagcctgccatggaaacagagggagcaggtcacggcgagctggagtaccgaggccatggaaccgagcagacagagcgccgtgagatggagctgggcagtggagagctcggctgggcgagcagggacgccgcgagcagaggcaaacagccatggacggagcaggagagaaagagccgcgagcgctga

SEQ ID NO: 89916 - DNA, 413 bp, Zea Mays
caacgacgcacaggcgaattgatcatgtggaggtctggaagtgtaatggtggtttatcgagggagcatttacaaaaggcctctaaaatctcaagctctaaatggtgcctcatcatcggttaaaggcgaatatggtgcattgttcatcccaaatgcctcgaacgctgttgagaatgatattcatgggatatatttgtctgcaaaacatgcaactgtgtccctattgaatgtgtagaatattgagcacatgaatgaggaagggctggagttcaattagataattgatgagctaggtcctcattttgtggattggtgggaacaggtattttaccaatggatgtcgacttgctgcctcaaataatccctggttataatataccatacagagttcttccgactagaatgtgttcgacc

SEQ ID NO: 89917 - DNA, 393 bp, Zea Mays
atgaatatggacatcgagcgtgtgctcaaggagaagttcggcgacgctttcaaggaaatccatcgggtgttcgacggggaccagctggcggccgagacaacgtccgaggtttgcacctctttcttagccttcaaggacaacatccctttttggccaaaaaaagataacgacctgcagcaccagagcccttgctctcagcctcaccacgcatctggctcaggcctaggcaccgcgagcaccctctccgacttagcccctcaagtggaggttctcgcagaactctctctgcgactccgtctggtgcaagaccgatatattaattttgataaagatgttcctccagtgagaattatagttgctgatggagaagaggatgttactatcaaggtataa

SEQ ID NO: 89918 - DNA, 556 bp, Zea Mays
atatatagaagtatgtatagtactaatggttgtaatatagtgttcccgttgcaacgcacggacacacacctatgattatactaggtgagtgcccatgcgttgcgacggtgtacaaattattcgataaatgttagtgcacaataattacatggaaacgaacaacatatatatcaacaccaatatttgacatatgaggagtggacatgtcagtcagtaatagcaagtgattgttccccagaagccgtgaaaggtgagattagaaagaagggatattggggaagtaatcttttatttcttaattgccaaatgttcgaatacaagagaaaaataggcattatgccttctaacaaacatagatggaaaatctcctcaaattgagacagtggtttctagctgcggtgactcggtctccatcgatgatttgttgcaactcaatgttcagcaccttgagacagtggtttctggctgcgatgactcaatctccatcgatgatttgttgcaacccaatgttcagcaccagattaaattgactttcgctaacatcgttcctataaat

SEQ ID NO: 89919 - DNA, 1170 bp, Zea Mays
atgcctaaaacctcactggcagttgaaaagaacagacctaatatagtgatctatgcagtttccatcacaatccatatagtgcttggatttatgctcattgcattgatctggcaatacgatttctctcccttcacggttcttatcattgccattctcaatgacggtactatcatgaccatctctaaggacagagttaagccatctccgttgcccgacagttggaagctgaaggagatctttgttacgggcatcgacaaattcggtgtgaggtcgatcagggacagcgagcataagatgatgtccgccctgtacctccaagtgagtatcgtgagccaggctctgatcttcgtcacccgttcccgtagctggtccttcgtggagcgccctggtctgctcctggtcaccgcgttcctgctcgctcaacttgttgcgaccttcctcgctgtctacgccaactggggcttcgccaggatcaagggtatcggctgggctggtgttgtctggctctacagcatcgtcttctacttccccctggacctgatcaagttcttcatccgcttcgtgctcagcggcagggcatgggacaacctcctcgagaacaaggagcgtttgctaacatgttctcatgtgcacagaccggccgccttcaccaccaagaaggactacgggcggggagagagggaggcgcagtgggccaccgcgcaaaggacgctgcacgggctccagccgccggaggcttcctccaacacgctgttcaacgacaagagcagctaccgcgagctgtccgagatcgccgagcaggccaagagacgagctgagatcgcgaggctgagggagctcaacaccctcaagggccacgtggagtcggtggtcaagctcaagggcctggacatcgacaccatccagcataactacacgtcaaataactgggtacctcgacgtgaggagattaaggccaagataatcagtgaaattcactctgaggcagaaaagaatcttggattacgccctggagcagcatctgtcattaggaatggccgtagctcaccaggagggcccctttcacctggagggggatttccaatgaatcggtcaggaactggaggcatgatgtctgggatgcctggttcaaggaagatgcctggaatgcctgggttggacagtagatag

SEQ ID NO: 89920 - DNA, 441 bp, Zea Mays
cctccacctccgggcgccccggccgccacgaccctgagcctgatgcctggcgcggacgtcggcgcggacgagcagcaggagccggccgccgcgagggccgaggagatgcccgagcctgcccccgcccccgccgcgccgccgccgctcaccatcttctacggcggcacggtggtggtgttcgaggacttcccggcggagaagacggccgaggtcatgcgcctcgcggccggcgacgacctgcccatcgcccggaaggcgtcgctgccgtggttcctggccaagcgcaaggaccgcctcgtcgagcgcgcgccctacgcccgcccgttgtcccccgcgaaggagccggagaagaagacgtttactttttgtttgagaattcacatgacagggatggcctatgaccctttaagaactcatctagagcgaagagcagctgagcag

SEQ ID NO: 89921 - DNA, 99 bp, Zea Mays
ttctgttttgtgacacagttggatatattcaaggaaatggtatctttgcgtgtatttgagaggtacatgataagtgtaatggtttcacgttgtctgcag

SEQ ID NO: 89922 - DNA, 1449 bp, Zea Mays
ctccagtcttggtgtttccaaaggatcccatgatcctcctcatgcaaacaaacacagttctcaattgtctccacaccaccagtgaagtttgtgaaatgtgcatcaaaatattttatgtagcccaagcaccctcttgtagaaatccttgcattataaagaaatatagcttttcaatgaccatttcaccttttttgtatccaccatttctacatttcacaagttccagtgaataggtgatagttgtgattttaaggtggttgaaaatgaaggataggcttcaagagaggctaagaaaatctaagtgtttaggacttgaagaggctgcaaagaacaaaggttttgaccttggtaacgtcgatgccatgcagacggacatggaggttgtgttcgaggtgctgaagagcctagaggacgttgaggagctggaccccgagtggctgcatgatcctcacaagctgcacacgtgcgtggagaaggacacctccttgtcggactcgtgcggcgtcgacccattcgggctggtggtgatggcgcccgaaggcatgcagagcaggagcagatcaccgtattcttcagggagtgaccaggatctcagcttctcgatctatgcttctttgtgatttctcttctaatttgtctacctcctttttctgcccgcagattggagcaagagcaaggtggtcagatctagatcgaaagtcagtgagacgaaagccgtttttacctcactggtcaagcaacactattcactctttgatgcaacatgggaagctttatttcctgaagcactagctgggaagtcagtgagacgaaagctcatgagggcaggtccaagggcactgatcttcccagcacctgcaaacgctacctcagcaaccatgcgcctcttgaagatcacctgggcagagctggcactgtttgcaacatctgccttcacttcattgacatgaccgtattggctaaagatcttgataaggtcacactttgtaggataaatgcatggtctgctgaagtgcagcaccagattttctctctgctgaagaccacatgctgctacagagagctgccatagcatttctccacagatgcaagcccaaccattctgttcttccaataaaatactggtatggtgagagtgatggttatccttctcagaaagggagagatcaagaaagatgagatataaattcatatgctaccagaacaagaaagatgagagcggttggtggccgagactcctaaaaaaggacctgtgttcttgaaggttgactggacaaatggtatgacgaggatgtcgaagatgttggatgttagaatttcacttttggttgattatgttttttcttatgcacctgacaaatctagatatgcaaccagacatgctttattcttgttcctgttttgttttccttatgtattaattccttaacttgtaatgcacatgatgtt

SEQ ID NO: 89923 - DNA, 218 bp, Zea Mays
agtggtgtcattggatttttgctatgtgcaaaagaaggtcatgcagtgaacttcttaactcctgtgaatccaattgagaaaatagaaggagcaacaaaagctggaagggaactcagattttacaattccgagatccatagggctgattttgttcgccaacatttgtaagaagagaactggaagcatataccactcctagtacttctgctgaaaacgtg

SEQ ID NO: 89924 - DNA, 96 bp, Zea Mays
tccctgccgcctggagcgatgaaaccgcaccctccgccaccgcaccctcgcgcccaagcccagactcaaaactcagccaaacccctcgcatcttcc

SEQ ID NO: 89925 - DNA, 493 bp, Zea Mays
accattggttatagctgatgcgacatcattaacgcaagcaagttcattactgacttactaacattgttttctttagaatgtcttggaaaggagtgcagatgttactagacatgtatctggagaaggtgttcaacaagcattgttgaaaatcctagaaggaactgtaagttactaaagttgcctttggttttgtgcctgtggaattaggagtttagaagctatcttcgattcacttttttttataaggatctttgattgactttaaacctcagtaatgattctttgtatgttgcctacttattcctaacgcatgttgttaatattcatgagaaagtatcacacaagaattctcgcaatgatagtatacaggttacataccctatatggtccttaatgaatacgtgcactatatatcatatgggttaaatttggattcaattgaatgaaaaaggatctttaaaatgttcttttttatgtcataaggaccctgtac

SEQ ID NO: 89926 - DNA, 893 bp, Zea Mays
tttgataatatatcaaacttgttttatttgaatgtaaatgatttggactgatatcttgcttcaagatcatctatgttttgttgtcttggatattgttactttatcttcataatttaccgctatcatttgtccttctcatattgatgttaggtagttccagttgacgatgtgtgaatcaggcaatcgtcgcccttgtgcagctttgctccatggtgaatttaaattattttattttgccaaactgattctgagttgtggaaaataccaacatacgagaactcagtttggtcaattatggcaatttcatttatatcactgcttgttatgtctgctatcctaggtgcttgtttctttgtgaggagacaccggataggatgggacattgctcgccctccccaagctcggtagttccatggaatgaacaaccaattagttaaagcaatgtcaagtcttattttcacacaaaagtgcaagatgttgattgtacatcatcaacatgtgccatttgcttggaagactacatcagaaacgtcatatattttggaacagaggtagtagtcaataattagcttattcgttttttatatggttgtatatatcctagcaagagaccactctgtagtcatttccttagtttcttgagagctgggaccacacttatagtgaagaaaactatgttcaactaacagaattaacttggatgcacctttgcacaatcatatctgtacaagttttggcggcatatgcttatttcaaattaggcttgtggtgttagattaatatattcattggatatggtgtgaatttctgagggataccggatgatgtgtacacctgtttgtctttgtcaaaatgttatcatgcattctttttgtctttgtcaaaatgttatc

SEQ ID NO: 89927 - DNA, 343 bp, Zea Mays
gtgcaggcatctgccaactccaatgctctcttcttaacagcgggtgcacagaacctattgtgtttgaagttaggagaggagattggtgttaatatcggaaacccatggattacttggtttgaggttggtagcgtgccatcactatttggtcttttagtgactccttatttaatttactcctgaagccccaacattagctgctgagaagctaaagaacatgggtccagtaacaagaaatgaatgcatcatgattggaacgatgttttttgcactctcactacaaatttttgggtaagatttttctttttaaagaggggttttaaccatgatttgacttgcaatc

SEQ ID NO: 89928 - DNA, 747 bp, Zea Mays
gttctctcccaatggcggatccaggatccatggagggggtagaagctaattatcttcttttttcatattcttcctcttttttcctcttcaccttcttcttatttcctctccctttcccctattcttcctctcccttcaacgcttccccctcctcttcccccttcctccgctacaaccatcccctatcacctgcaacgccttcctctaccttgccctctatccaaggggaaccgtttctctccccctcgatctggagctccccaacatcaattcccatgactggtgttggtcagccagcgtccacgccttcgtttcccactcccatggccaccaccacggtgctccccttcccggcgtcgaccaggcacaagtccggtgatggagccctcacggggaacatcacgacgacgctaatcacgaactgtgcatccgcaagacgagcctatgagctccatggcacgacagagtgcgtcctacccagtctaccggtcctgaggtggaggtccagtcgggcagatctactctatgctcgtcatcgagatgcaacacctccgcctcacacacgcagaagtcgatgcgctcgcggtcatggccagctcggagcctgtctaggccctagctagcctaccagccatcctcgtcctcccctccctcatccctctcaagatgaacatccagattactgaatcaaccttgtcagttctatttgcaaagtttctcaaataaagctgaagatcttttattgta

SEQ ID NO: 89929 - DNA, 2089 bp, Zea Mays
cggactctatctctatctccaaaagtccgttctaatctaatctcttcgtgcgtcgtcctaatcagcgcgagccgcagcccccgctgacgcgaatcgcgacctccgcgcgaccctccgccaccgcaccctccgctgacccggtctccctgccgcctggagcgatgaaaccgcaccctcgcgcccaagcccagactcaaaactcagccaaacccctcgcatcttcctgtggtggcgtcctcctccaacgttggtccgtgtttgtctctatggcgctctcgaatgcctaagccaaggccgaccgcctcgagctggtgctcgacgaaacgccccgcaggaccgagttctcgtagaccatgctcgtcgattcgctggcgagggccggccgacagcacgacgcattctgcctctctgcggagatgcgggcctccagcgtggcctgcgactcccacgtctgcgtatgtcactatgggaagagctacatcttcatcgtaaattatgtgcaaaggttagtctgttaatcatcttgcagatatctgcaaggattctatatgattccaaagtagatgtaataggtattcaggtaaatacaaatgaagttatattgcattgtttttgtcaattgtgtgtatagatttatattggtaagacatttatgtacgttgcaaatacatgctttctgttccctatatcataatataaacaattatgtaccttcctctctgcaagtctgtacagcagtacagacaagctgaagactcagaggtgtagagacgacatggtgtttgctgagggttgcaagacccactgttgcataggctgatctatgcgtcacaccatgaggagtagactgatccagcacgcacaaggtctggtacctctagattagcaaagccacagaacattgaacggcacggcaggtcctgcggtgacttctccatcaaattcggatcaaatagagtgatgaacttggatgcttcaaatcgtggcttatccatcagcttcgaatcggatagagtactactgaacatggacaatataaatcacagtttctccatcatcttcatatcaaacaggatactactgaacttggatactataaatcgaaaaccatctagggtatacatccttaatactcagatcagaccttgagcgattgtaatctaacctatttgattgtgaggggcaggcaacaggttcgattgtgctgctcggtttcgcagaacgcgaagaaaaggtacaagaagggcctggcctggtatgtgcgctgagttggtaatttatggggcgtcgaggagcgcatcccgtttatttgtattctattaagatattctaaaccgaacggcacggtcagacctgttccaacccgaggggccagcactgctccaactcgggatcacacgtctgtattctatatcttttgtagaaaaacttattaaacttttggtcttcacttttcttcttgtcaggctgaactgatttatctcatagtcggaggtgatttttttcttatgattatgatcctaaaggggattcagttggaccgtgctgttttgctataactgtaaagttagggtgccaaatagttgatgcacctgcttcatcatctagaaaaaagaaataaaggagatttctgatgagtttcattttttctttttatggaaccttcgttggtggctcgagcaacatataaaggtgatcatcacttccgacgattaaagtaccagtgtgcagaggaggcatgtaggtgatgcttttcaaaataacaagtacttaatgagaaatggaaaggtccaaccgatacaattgaatagttacccaaaaggtgctgccgacaccaccatcttgctctttatcttcagtatctgcaacttttttggctgactgggggaggtgttcttattcctgagtcccttagctgagggtgaaagggctataaagccaagaagaggaagaaggggtgaagaattcaggttttcggaagcaatactgaagactattttttggtttctctttgcaatatgctctattgggattggattttcaatcactgttattaataatctaacacaaatatgagttgttgcatgtc

SEQ ID NO: 89930 - DNA, 279 bp, Zea Mays
atggccgacctccagcccacctctccggtcattgttgatcctgacaccgacgtctctgctgattctgagcgtgcggccctggctgcccgtgaggcggctttggctcgcatcgctgctgcagagcaggacgccgccctcgcccaacgcgagcgtgacgccgccgacacccggatccgcgtggctctcgcccgtgtagcccacgagcgcacaacggtggccctctctcctctagtcaacgacgtcatcctcgacggcactggtgctgactccactgcttag

SEQ ID NO: 89931 - DNA, 1055 bp, Zea Mays
ctagccgcatcccttctttcattcgccgccgccgcctgctctctgctgccgtcgccatggggagaaggcctgcgagatgctatcgccagatcaagaacaagccataccccaagtccaggtactgccgtggtgtccctgaccccaagatcaggatctacgatgttggcatgaagagaaagggtgttgatgagttcccctactgtgtgcaccttgtctcttgggagaaggagaatgtctccagtgaggctcttgaggctgcccgtattgcctgcaacaagtacatgaccaagtctgcaggaaaggatgccttccaccttcgggtccgggttcaccccttccatgtccttcgtatcaacaagatgctttcgtgtgctggggctgataggctccagactggaatgaggggtgcctttggcaagcctcagggcacctgtgctagggtggacattggtcaggtcctcctttctgttcgatgcaaggacaacaatgctgcacatgccagtgaagctctgcgtcgcgccaagttcaagttccctggccgccaaaagattattgagagcagaaagtggggcttcaccaagttcagccgtgccgactacctgaagtacaagagtgagggtagaattgttcctgatggtgtcaacgcaaaggtacagctatcacatatcttgctacatttagatatatctctgaattagttttgggatagtaatgtaatttccattgatacgcatattttgaaatggagctattcttacaatgtttgctccgtcttctcttcggcagtatattaaccagttcataatctaattttaacttctcctgacttattacagctgctcggtaaccatggaagacttgagaagcgtgctcctgggaaggctttcctcgaggccgttgcttaagtccaatctacagttggaatgcgaatccagacgttttggtttagcctatcttattttgctttgtgcaacatgaattttaagtgtatggggtattacagtgccttgtgtgaacctgcttatctcgtgctgaacatcgttatgcatggaagt

SEQ ID NO: 89932 - DNA, 962 bp, Zea Mays
ctagccgcatcccttctttcattcgccgccgccgcctgctctctgctgccgtcgccatggggagaaggcctgcgagatgctatcgccagatcaagaacaagccataccccaagtccaggtactgccgtggtgtccctgaccccaagatcaggatctacgatgttggcatgaagagaaagggtgttgatgagttcccctactgtgtgcaccttgtctcttgggagaaggagaatgtctccagtgaggctcttgaggctgcccgtattgcctgcaacaagtacatgaccaagtctgcaggaaaggatgccttccaccttcgggtccgggttcaccccttccatgtccttcgtatcaacaagatgctttcgtgtgctggggctgataggctccagactggaatgaggggtgcctttggcaagcctcagggcacctgtgctagggtggacattggtcaggtcctcctttctgttcgatgcaaggacaacaatgctgcacatgccagtgaagctctgcgtcgcgccaagttcaagttccctggccgccaaaagattattgagagcagaaagtggggcttcaccaagttcagccgtgccgactacctgaagtacaagagtgagggtagaattgttcctgatggtgtcaacgcaaagctgctcggtaaccatggaagacttgagaagcgtgctcctgggaaggctttcctcgaggccgttgcttaagtccaatctacagttggaatgcgaatccagacgttttggtttagcctatcttattttgctttgtgcaacatgaattttaagtgtatggggtattacagtgccttgtgtgaacctgcttatctcgtgctgaacatcgttatgcatggaagtacttatcttttgttctgctaaaaattaaagtgttctgcgactaaatatatcttctcaatctggattgtctctttaattttattggagatggtt

SEQ ID NO: 89933 - DNA, 2035 bp, Zea Mays
ctagccgcatcccttctttcattcgccgccgccgcctgctctctgctgccgtcgccatggggagaagtaagttcgcgttttcgatccagctccttcgtacgcttctactgcgatgtttgttgcaaccgcttgtctgaagagggctcccactttgcgtccggtgcaaatctcgactagatccccacgaaatcgggttaatacctttgatggctacttgttgcttactgcgcggtattagtatttgagttgatttgtggaactcacgaagctgtgtttgcttagtatcgtataaatacgagaagcgctggggccttggtactatatactcacccaaattttcatgtgtgcttgacgcgtgataagttcggagataacacgctcatagtttaagacctgtctgactactggcagaacatgacatcatttgattttctgttcatagttgggaaatcttgttttgtttcggactaatgcttgttccatggatttttaacgaatacatttagggtctgttcttctaatgttaattcatgtggattggaagaggttgaggccttccgtttctccagcattagatccagaattgttccagctgatcaaatcttatatattttagataagcaatccggctggtaatcgtttttcgggcggtcctgactgtgtttaattcccaagcaactcctaatttcctccaatgcacatggaatgggaataactgaacaaacccttagtattctattgtatgccatggaaaaacactactggtagaacatggcatcaattgatttgctgtttatagtcggaaaatcttgtttttgttaagactaatgcttgtagaccttgtacagttagctgccaagatggggttagtagttgtgtttcatggatttttaatgaatacatttagtattctattatatgccatgaaaaacactgtagaagtaatctgactatgctgtgcatatgctcattctgcgtgcttatgtaattactcttctatataaatgtgaaaatcaatgttctgtctttcatctagtcaattgtttgtacttgtatgcagtggacatttttactactgtggtgcattggtattatgttaattgatactcaagcttttatgtttctgaaacattggttagggcctgcgagatgctatcgccagatcaagaacaagccataccccaagtccaggtactgccgtggtgtccctgaccccaagatcaggatctacgatgttggcatgaagagaaagggtgttgatgagttcccctactgtgtgcaccttgtctcttgggagaaggagaatgtctccagtgaggctcttgaggctgcccgtattgcctgcaacaagtacatgaccaagtctgcaggaaaggatgccttccaccttcgggtccgggttcaccccttccatgtccttcgtatcaacaagatgctttcgtgtgctggggctgataggctccagactggaatgaggggtgcctttggcaagcctcagggcacctgtgctagggtggacattggtcaggtcctcctttctgttcgatgcaaggacaacaatgctgcacatgccagtgaagctctgcgtcgcgccaagttcaagttccctggccgccaaaagattattgagagcagaaagtggggcttcaccaagttcagccgtgccgactacctgaagtacaagagtgagggtagaattgttcctgatggtgtcaacgcaaagctgctcggtaaccatggaagacttgagaagcgtgctcctgggaaggctttcctcgaggccgttgcttaagtccaatctacagttggaatgcgaatccagacgttttggtttagcctatcttattttgctttgtgcaacatgaattttaagtgtatggggtattacagtgccttgtgtgaacctgcttatctcgtgctgaacatcgttatgcatggaagtacttatcttttgttctgctaaaaattaaagtgttctgcgactaaatatatcttctcaatctggattgtctctttaattttattggagatggtt

SEQ ID NO: 89934 - DNA, 576 bp, Zea Mays
aggagaatgtctccagtgaggctcttgaggctgcccgtattgcctgcaacaagtacatgaccaagtctgcaggaaaggatgccttccaccttcgggtccgggttcaccccttccatgtccttcgtatcaacaagatgctttcgtgtgctggggctgataggctccagactggaatgaggggtgcctttggcaagcctcagggcacctgtgctagggtggacattggtcaggtcctcctttctgttcgatgcaaggacaacaaagctgctcggtaaccatggaagacttgagaagcgtgctcctgggaaggctttcctcgaggccgttgcttaagtccaatctacagttggaatgcgaatccagacgttttggtttagcctatcttattttgctttgtgcaacatgaattttaagtgtatggggtattacagtgccttgtgtgaacctgcttatctcgtgctgaacatcgttatgcatggaagtacttatcttttgttctgctaaaaattaaagtgttctgcgactaaatatatcttctcaatctggattgtctctttaattttattggagatggtt

SEQ ID NO: 89935 - DNA, 2687 bp, Zea Mays
atggctcagtccacccctgatcccccggctttagtggcgatgacgttggcggagctagaggcagccatcgccgccctgcccggcaagtggggtgccctgcgggaggcgttcgatcgcctcgccgcctgctcaccctcgccgctccccttcgcctgggaggacctcgacggctacatctcctcgctccagtcgtcagtcgcgctgcggtttcgccaggtccgcgcactcgaggccgccggcgctgtacctgctgctgccgcgtcgttggtaactcgcggagatggaaagggagaaaaccaggagttggaggaggatgatgaattagatgaggatgtcgcggtggaagtggaggagaaggtcgcggtggaagtggaggaggaggccgatgaggagatacaggaagccgacagcgataagatttgcaatgatgaaaaggatgggaaggaggcgagagaggtggaagtggagaaggaggtggcggagttggagaaggccgatgaggatatgcaggaagccaacagcgacaagttttgcaatgatgaaaaggacgggaacgagacaagagaggtggaagtggaggacgaggtggcagaactggagaagaaggccgatttggagatgcaagaagttgactacgataaaatttgcaatgatgaaaaggacgagaaggggggcaaagaagaggtggtggaggaagagggagttgaggaggcatccaacatcaagattggcaatgagattaagtatgagaaggagtcaagggaggaggagcaggccagtaaggtgaatgagcaagatcctgacaaggagatgcaggtggttgataaggacaagctgaataccaaaggtgcttttaaggcttctcaggacaaggagaaggatcaggataccaacatggatgagacagtgaccaagatggcgtcttcagtgcagcacaaggagggggaggaggcttgcgacaggaagcagaaggaagcacagaaacaggaccttcatgagaaggtggaaggtaccaaaaatgctaaggaccagggtaatcgagctcttccacgcagatctgatgattgcactgtagcatgtgcatacatggatgccaagaggttggtcaagctcgtatgcaccaacactgacctcaaatcagagcttcatgctgcatttcgctgtgctccagatgctgcagcagtcgctctccacgtagttgagttattcctacacaacaagacatttgttaggaccaacaaggtctgggcaaactgtgttgagctagttcaaatggtacctgtatttgttaccaagccttctgcagacacgactgagcaggccaagcggatggctaaggattggaaggagatgattgacagtccagagagttgctatgttcttggcagcctagcctcgtggggcctcctttactttcttatctcctataacattgtaactgagtttgacatgaaggagatcttccgtctctttggtaacatccctttcaaacagaagaagaaatctgccatgctcttaaaaggtcttgggctcagcaatagaatcccagagttaatggactatttgatcggaaacggacaacaaatggatgttttatgtttggcacgtgttcttaacatggtggacaagtatcctccactttctcttctgaagggatatgtcgaaaaggcaaaacaaactgctatggaaatatctcaaaagaatatgacacgccaattgagggtagttataataaaggagcttgatgatctaagaagggctcattttttggttaagaaggaaatcacgaacaccaacctctgcaccagtatcagggaagaaatcaacattttgttaggtgagcttgaaaaaaagaagcggggtttagcaaatcccttgacagcctcaacttcaaattcacagcagcgacaaacaaagattaacaagaagcgcaaggtaatgcagaagcaggagcatcacaaaggacaagaagaccggatgcaagggcaactgagtgggctggcagagaagcccgagaagaaacaaaggaagccccaacaggagcagcaacaggaacaagaaaataagccggaagagaagaaacagaaacaagaagatgggccagaagagaagaaaccgaaacacgaatataagccagaagagaagaaacggaaacaagaagataagtcagaagagaagcagcaacagaaaaagcagaaacatcataaatggctgaggcaacgcactcccatgctacctgcacagggttaccctgcaatgtggaacgcagcaatgaggagcgacttggagcctccaccatatgccgcgacgcatggagtccatcatggttaccaccaccctgtccagccaggctggcctggggttcattgcgcatcgccgttcataggaccctctacaccctggtaccctcctcctcagttctatcccaggtagcagtacctgctgtgttgaggggtgttgctccatcgcccagtataacatggattacgcgcaggagttcagttaggactttggagaaatagagtggtatgttttcttcagtgatctgagagactggagttgtttttcttctagcctgacagactggcatgtatatatatatttttctgcgagacaatcttcttagataagttcagggatctgagaggtcctgttatatgcagtaatcactccgttcagattttaat

SEQ ID NO: 89936 - DNA, 1204 bp, Zea Mays
atgacgatacatgcgtctgtgcttagtttacatcgaccgcttacagcaggcagccattgacattgattgatgagcacacatcgatcatgagcatacgccggctggtgcaactactacacgcctacgatctgaacaagtagattagttgccggggacgaagttcgtggcgtatgcccaggcgttgttggcgacggggtcggcgacgtggtcgaagaggttctcgatggggcccttgccggtgacgatggcctgcacgaagaagccgaacatggagaacatggcaaggcggccgttcttgagctccttcaccttgagctcggcggcggtgtccgggtcgtcggcgaggcccagcgggtcgaaggcgccgccggggtacaccttgtcgagcccttccccgagcgggccgccgccgacgcggtagccctcgacgaagcccatgagcaccacctggcacgcccagatggccaggatgctctgtgcgtgcaccaggttggggttccccaggtagtccagcccgccctccgagaagatctgcgcgccggccttgaaccacaccgcctcgccgaacttgacgccgttcttggccaggatctccgggaacacgcagcccagcgcgcccagcatcgcccaccgggagtggatcacctccagctcccggttgcgcgcgaatgtctccgggtcggccgagaggcccgcggtgtcccacccgtagtcgccggggaactcgccggtcaggtacgacggcgtctgctcggagaacgggccaagatacttggggcgatcagggccgtacctgcagcaggcagccagcacgcacgtcagttctcacttcccgagcgagctgattgacacaagggaagcatgcggagagcagaaggcacgtaccatatgctctggggaacgctcttgacggtgcggcgcatggtgatgcggccgccggcatcgacgccggcggcgcgggagaccagggcctgcccgaggaagctggtggtctggtgcagcgccgacgcggccatcgtcgttctgtgtgtccgtccggtgaccacggcgcggcacagtggtcagtcagaagtgggtttgttggtcttgctggtgggaatggcctggtgcggcggggagatctttatacgacggctcaagggctcaacggtgcggggcgcgactagtggacgcccggcgcgccacgtccgcgcccaggccattg

SEQ ID NO: 89937 - DNA, 1299 bp, Zea Mays
atgagcagcgacgccagagaagagggagttccaaatggcgattacaacgaagaccagacgacaaaagacatgagcgaggtgaaaattgtgcagggcggcaacgtccctgacggtgacggcgcaacgctcaacatgggagcggcgtcacgtggcggtggaagcaacagctggggaccttcaactacgactaccggagctatgcgcttaactttaaccagagcactgacgaatagcagcagcgtgctgagtttgcttgggacggcgccggtggtggagaagacgatgtcgcaagatcaagagcgttgtcgcaagacaagtctgagctgtttcgccacttcgagcgactggttcagatccatcatgagctactatcagactgacactgtgagccgtgatacagaggattttgatggagctaagccatcaggtgcagttaccgtcgacgctacgcatgatactgaaagcgctaaacaagcagcgactttagcttttcagacatatgcagatgaagaaccagttcagtcaattgaaagccagactacaacggctaatcatttgcagaagcctgatatagaactcatacatgccctacaacaccaggatggtagtagtatcctttcaaggagaaaatcgggggcatactttgagatgcaaagtgtggaacgtcaggcagtgcaagaggaaagtcatttagcaacaagctcagagatcctcgcatcgactgacaagctcgccgagtgccaggagacgatcacgatcctgagcaagcagctacaggctctaaagatgccaacagcttcaggtcctccagacacccctccatttgcattcccaggacgagctcggcgaagtccgactacaagccacagtcgctcacgagcatcctcgccgaggcctccacgtctcccagtcccactcccaccacgcccacgtacgccacaggtgctgtccaagaaagatgaaggcgaggttcgtgctactgctacgccgacgacgaggagcgcaacacgtgagcaagcgatctttttgggcgacatatgttccgatcttccagagccttgtgatatagtcaagaaattagactatttcaagttcagcgagagggactatatggcactggaggtgtctttcttagaggttgcaatctcaacattcgaaacaacgcccagaacggcatggttggaacatgctcaggctgacacgaacctggcagatcgtcgtgtccatcggcatgactatatccatcttagggctatgcctatgccatcatgtgacagtggcacaatacggtatggctaa

SEQ ID NO: 89938 - DNA, 386 bp, Zea Mays
tttgccgagtgcctactagggctctcggcacagggactggctgtggggtccactggaccagtctttgccgagtgtcgccgtaggcactcagcaaaggatctgtcaccgtcacttggcgccgtgacggtgacttttctttgccgagtgccaaatggcactcggcaaagtctttgccgagtgcccgacaaaaagtactcggcaaagaagctgttgccgatgtacagtttcgccgagcgttctttgccgagtgttacactcggcataagccttttgccgagtgtaaaaatagcctttgccgtgtgtttagaacacacgacaaaaggagctgattcccggtagtgtgtggattttgggaactctattttctcaaagaaaaatgaactaat

SEQ ID NO: 89939 - DNA, 1616 bp, Zea Mays
gatgcttcggttgtggagttgcaaggctgaaggcgcaatctcaccacaatccctcccggcgccgcccgccggtcgctcccgacgctatgttccgccttcgaaattgcattcttccacatctactcttctcgtcccgccgctcctcttcctgcatcacccccctccatcgcctcctctccggttccgccgccaccaccgcgagcaaccctttcacggtcgccgactacctcgtcgccagatgcggtctctccagggagcaggtcctcaaggcatccaaaatcaaaaggatcctcgacctcaggtctccctcgaagcccgacgtcgtcctcgccttcctggcgggcctcgacatctccggcaccgacctcacaaccgtcatcgccaatgatcccagactcctttgcaccgacgtggggaagaccctgtctctccgcgtcgccgagctccgcagcctcggcctgtcaagccaccaggtcggccaggtagtcatcgccgcccagatccggttccgcagcccctcgttcctccgcaattttgaattctggcttgggctcttcggctccttcgacgagctcttgcggttcgtcaagatgaacggcaacctcctcagcgtcaacctcgagaaggttgccatgcccaacctggccctccttcagcgatgcgggatggagatttccgatattcccaacactttcctgtcccggatacttgtcaggagcactgagcacctccaggaaactctggcacgcgtttcagagtttggaatccagcagggatcgtgggttttccctttcgcgttcatgaggtttgcgatcttgaaccgtgagaagctcgacagtaatatacagctgtttgagaagcttgggtggtcgagggatgatatagcatcagcagtgaggaaggcgccgaatatcctgagcttaactccggaaagggttcataaaaagttggattttctaatgggtgttgttgggttgcagatggcagtcattgtgtatcggccagtgctgctattgcatagtgtggagcgtcggttgttgccgcggtattacttgatgaaatttctcaagaacaggggattgatgagttctagtttaagcttcctaactattgcatcgatgggcaatgataatcttctggataaacttgtgcaccctcacgagatgagtgtcccaggtcttgctgctgcttatgcttctagctgcgctggaaaacaccagtgggagctccttgacgacatgacaaagggaaagagaaagagaaagtgctaagacatgttctggtaactagtgctgtgaaggatctcttctaaggagacctatactgtcaatcaccaaaaagagcattgggtttgatctgaagggcagtgctacgtctatgtgactttgagcaatttctggtacttagggcttcgctttcaccaggttctcggggcattgtgtttttggaataccttctaggactgctgtctgacggccttgctggctaaggaaaaaggttctaaattctgtcctttgtatccttcggtggaaagcttggatgcgcgtgtggatttattttttatttttgcagaaacgctgtgacgctgctttgttttagtggggattgcggtctct

SEQ ID NO: 89940 - DNA, 1632 bp, Zea Mays
gttgcaaggctgaaggcgcaatctcaccacaatccctcccggcgccgcccgccggtcgctcccgacgctatgttccgccttcgaaattgcattcttccacatctactcttctcgtcccgccgctcctcttcctgcatcacccccctccatcgcctcctctccggttccgccgccaccaccgcgagcaaccctttcacggtcgccgactacctcgtcgccagatgcggtctctccagggagcaggtcctcaaggcatccaaaatcaaaaggatcctcgacctcaggtctccctcgaagcccgacgtcgtcctcgccttcctggcgggcctcgacatctccggcaccgacctcacaaccgtcatcgccaatgatcccagactcctttgcaccgacgtggggaagaccctgtctctccgcgtcgccgagctccgcagcctcggcctgtcaagccaccaggtcggccaggtagtcatcgccgcccagatccggttccgcagcccctcgttcctccgcaattttgaattctggcttgggctcttcggctccttcgacgagctcttgcggttcgtcaagatgaacggcaacctcctcagcgtcaacctcgagaaggttgccatgcccaacctggccctccttcagcgatgcgggatggagatttccgatattcccaacactttcctgtcccggatacttgtcaggagcactgagcacctccaggaaactctggcacgcgtttcagagtttggaatccagcagggatcgtgggttttccctttcgcgttcatgaggtttgcgatcttgaaccgtgagaagctcgacagtaatatacagctgtttgagaagcttgggtggtcgagggatgatatagcatcagcagtgaggaaggcgccgaatatcctgagcttaactccggaaagggttcataaaaagttggattttctaatgggtgttgttgggttgcagatggcagtcattgtgtatcggccagtgctgctattgcatagtgtggagcgtcggttgttgccgcggtattacttgatgaaatttctcaagaacaggggattgatgagttctagtttaagcttcctaactattgcatcgatgggcaatgataatcttctggataaacttgtgcaccctcacgagatgagtgtcccaggtcttgctgctgcttatgcttctagctgcgctggaaaacaccagtgggagctccttgacgacatgacaaagggaaagagaaagagaaagtgctaagacatgttctggtaactagtgctgtgaaggatctcttctaaggtttgccatcttcataattcattcttgcaacttctttacattttggtatgaacatctttatcattacttcattagcatctatgaagggcggtgttctagttctgaaatcccatctagctagataagtagaaatgtatagtggactaaaaagggtggtaatatatttgagttgtttcctttggttcttaacaatacatgtttatgtggtctttctactgtaattttatggactttgtactgtgatttcctagtattttttttagttttgaaggagccaaattcgttagcaagttttgtttttatttggcttaatataaaaccaaaatgaagttagtc

SEQ ID NO: 89941 - DNA, 85 bp, Zea Mays
cctatatctccacgctctacagcggttccccctataacaatcctctataccccaccacaccaatattatatactttcctcatcaa

SEQ ID NO: 89942 - DNA, 80 bp, Zea Mays
ctcaacccatccaccgcctcctctccaacagcaagcgccgccgccgcctcgctttgcgagagcaggagcagaacccggcg

SEQ ID NO: 89943 - DNA, 878 bp, Zea Mays
atggcaccgtcgccgctgtgctccgcttccccatggccgcttcgagccccaggccagcctccccaagacgtccgctcaccgcagacagtcgtcgtggccgtgggcacccgtgtgagcggagcggaggcccgcgcgtcgctggtgctggccttggcctcgcatgcgctctccacctcgcagcgccgcttcgccgagctcaccgatgaggccgccaagtacgccttcccgtccggccgcttcgagccccgcaccctcgaggaggccctcatgtccgtgcctgatctcgagacagttccgttttgcgtactaaagcgcgaggcagagtacgagatcagagaagtggagtcatacttcgttgctgaaacgacgatgcccgaaagatctgggttcgatttcaacgggtcatctcagtcgttcaacgtgctggcatcatatttattcggtaagaatactgcctctcagcaaatggatatgacaacacctgtttttactcgaaagggtgagttaaacagccaatcaatggacatgacgaccccagtgataacaaaaaggtcagctggtacaaataaatggaaaatgtcatttgtgatgctagtgaagtatggttccaatttgcctcgcccaaaagatccttctgtgtgactatcaaggaggtgccccacaaaatagttgccgttgcagccttttcaggtttggttactgatgatgatataaaccagagggaatctaaattgctcgaatctctccataaagataccacatttagagtgaaagatgatttggtggtggaagtcgcacattacaatccacctttcacacttccattcataaggagaaatgaaatagcattggaggttgataggaacgatatagcctta

SEQ ID NO: 89944 - DNA, 1405 bp, Zea Mays
atgagctactataaatggccaaaccctagcggagccacaaaacactctcctccttcctccaccgccgccaacgtcgcctggcggccgtctgcagctccgcgcctctgctcggaaggtttcttgaagctgagaagatggtgctgaagacagaactctgccgcttcagcggccagaagatttatcctgggaaaggcatccgatttatccgtgctgattctcaggttttcctttttgccaactcaaaatgcaagcgctacttccacaaccgcctgaagcctgcaaagcttacctggacagcaatgtacaggaagcagcacaagaaggtatgtgatatttcccagtcaactttaagaatgtcatccattcacttctcttgtgattccatgcttttttggttatatattagctacagcttttcttgtatgagctaaatatttcaaccatctgggtagagatgagatgatatactcaaagtttgatagttgttgaatttaatgttttcttgaatgaaatgattttaatgatttttcaagtcatattaagctaagaccaggattacagtaaaccttcgctttgtataatttatcaccattctggattgtgattaatatgttaacttctgtatttatatgcagatgcagatgtataacattaactagcttacctagcagtgttaatgtacatttgatgttagccaatatagttagctgtcttctgaatcatgtgatttttgcatgctttgttatataatccttcatcattgcctctgtatccatctatctgatgcatgacatctgaataaatctttgcaacaacaattactctcgccacacttattatggcgctaaaagtctagaaccttttacatgtattagccatttctgtctgtaggatatccatgctgaggctgtcaagaagaggcgccgcgccaccaagaagccatactcgaggtccattgtgggtgcttccctagaggtgatccagaagaagagggctgagaagcccgaggtccgcgatgctgctagagaagctgctcttcgtgagatcaaggagcgcatcaagaagaccaaggatgagaagaaggcgaaaaaggctgaggtgaccaagtcccagaaggcacagacgaagggagcggtccagaagggttccaagggccccaagttgggtggtggcggtggcaagcgctgaaagaacctaagtgtcgttccttgaccttgcaattgctcctccatagcccaccttgttgcaccaacgccacttttgtagtacctcggttaattttgcattttctttcagagttgtttgtgggttttgagttccatctcaagagagttgagtttatttatctttatattgggtgaaatgttcatatgctttcctcagcttggatgatggtttgctttgt

SEQ ID NO: 89945 - DNA, 938 bp, Zea Mays
atgagctactataaatggccaaaccctagcggagccacaaaacactctcctccttcctccaccgccgccaacgtcgcctggcggccgtctgcagctccgcgcctctgctcggaagttggtgaaggtttcttgaagctgagaagatggtgctgaagacagaactctgccgcttcagcggccagaagatttatcctgggaaaggcatccgatttatccgtgctgattctcaggttttcctttttgccaactcaaaatgcaagcgctacttccacaaccgcctgaagcctgcaaagcttacctggacagcaatgtacaggaagcagcacaagaaggatatccatgctgaggctgtcaagaagaggcgccgcgccaccaagaagccatactcgaggtccattgtgggtgcttccctagaggtgatccagaagaagagggctgagaagcccgaggtccgcgatgctgctagagaagctgctcttcgtgagatcaaggagcgcatcaagaagaccaaggatgagaagaaggcgaaaaaggctgaggtgaccaagtcccagaaggcacagacgaagggagcggtccagaagggttccaagggccccaagttgggtggtggcggtggcaagcgctgaaagaacctaagtgtcgttccttgaccttgcaattgctcctccatagcccaccttgttgcaccaacgccacttttgtagtacctcggttaattttgcattttctttcagagttgtttgtgggttttgagttccatctcaagagagttgagtttatttatctttatattgggtgaaatgttcatatgctttcctcagcttggatgatggtttgctttgtttctcagctgtgtttggttagacaaggctgatatgcccgcgccatcctggctcggtgctggtgcctcagtgaaaccgaatgatctgctatag

SEQ ID NO: 89946 - DNA, 851 bp, Zea Mays
aaaccctagcggagccacaaaacactctcctccttcctccaccgccgccaacgtcgcctggcggccgtctgcagctccgcgcctctgctcggaaggtttggtgaaggtttcttgaagctgagaagatggtgctgaagacagaactctgccgcttcagcggccagaagatttatcctgggaaaggcatccgatttatccgtgctgattctcaggttttcctttttgccaactcaaaatgcaagcgctacttccacaaccgcctgaagcctgcaaagcttacctggacagcaatgtacaggaagcagcacaagaaggatatccatgctgaggctgtcaagaagaggcgccgcgccaccaagaagccatactcgaggtccattgtgggtgcttccctagaggtgatccagaagaagagggctgagaagcccgaggtccgcgatgctgctagagaagctgctcttcgtgagatcaaggagcgcatcaagaagaccaaggatgagaagaaggcgaaaaaggctgaggtgaccaagtcccagaaggcacagacgaagggagcggtccagaagggttccaagggccccaagttgggtggtggcggtggcaagcgctgaaagaacctaagtgtcgttccttgaccttgcaattgctcctccatagcccaccttgttgcaccaacgccacttttgtagtacctcggttaattttgcattttctttcagagttgtttgtgggttttgagttccatctcaagagagttgagtttatttatctttatattgggtgaaatgttcatatgctttcctcagcttggatgatggtttgctttgtttctcagctgtgtttggttagac

SEQ ID NO: 89947 - DNA, 878 bp, Zea Mays
aaaccctagcggagccacaaaacactctcctccttcctccaccgccgccaacgtcgcctggcggccgtctgcagctccgcgcctctgctcggaaggtttcttgaagctgagaagatggtgctgaagacagaactctgccgcttcagcggccagaagatttatcctgggaaaggcatccgatttatccgtgctgattctcaggttttcctttttgccaactcaaaatgcaagcgctacttccacaaccgcctgaagcctgcaaagcttacctggacagcaatgtacaggaagcagcacaagaaggatatccatgctgaggctgtcaagaagaggcgccgcgccaccaagaagccatactcgaggtccattgtgggtgcttccctagaggtgatccagaagaagagggctgagaagcccgaggtccgcgatgctgctagagaagctgctcttcgtgagatcaaggagcgcatcaagaagaccaaggatgagaagaaggcgaaaaaggctgaggtgaccaagtcccagaaggcacagacgaagggagcggtccagaagggttccaagggccccaagttgggtggtggcggtggcaagcgctgaaagaacctaagtgtcgttccttgaccttgcaattgctcctccatagcccaccttgttgcaccaacgccacttttgtagtacctcggttaattttgcattttctttcagagttgtttgtgggttttgagttccatctcaagagagttgagtttatttatctttatattgggtgaaatgttcatatgctttcctcagcttggatgatggtttgctttgtttctcagctgtgtttggttagacaaggctgatatgcccgcgccatcctggctcggtgctgg

SEQ ID NO: 89948 - DNA, 2327 bp, Zea Mays
atgggactagtgtgcatccggaatcgaaaatgggatgggaccaagtctcttgtagaaatacggtttatgaataagtctccaaatcactcgttgtacatagattctgctgtcatccttcaaactgaactgatatttttagcgctagacagcgcggattcaccatttgatgagtgggagatacgttcagtaggtaatgccgcccgcttttccatgtgttcacccataggattttgtcccatttctccagttccaatggaacatagctctgcagaagattcagacattagcgattcagatattgctgagcacaaggaggagatttgtgcccaactccgagcagggaaattgaacgtgaagcgtggtgaggccttccgctgccctttctgccctggcaagaagaggcaggactacaacctaaaggatctactgcagcatgccacaggaataggggctgcttctaagcgcagcgccaaggtgaaggcatcacacctggggcttgctatgttcttggagaaggatatagccagcacgttggagcaaccattgcaaattgttccctacaagccaaaaactccaaaggatgaagagatctttgtgtggccatggatgggcattgtggttaatttgcagtgtgagttcaaaggcaaagaatgttccagggaaagtgaagaaaggctaacagcacagttctcgcggttcagacccctccaagccacaacccttagggatggaaagaaccaacagttttgcgctatcgtcaagtttgctaaggattggagtggatttaaggatgcaatggcttttgaaaatcattttgtactcgagcagtacagtaagcctgattggaaaaaaagaaattgcagaaaggacgacctttatggatggcttgcaaaaacagatgattacaactcacctgagccaattggggagtatctaaggaaaaatggaaatcttagaagtgttggtgacctggaacgagagggtctgaaagaaactggcgagcgtgtagctcattatgctcgccaaattgacgcaacaaataaacatatgagtgaactggagctgaagaacaatcagaatgcaatgaaacttgataggatgttggaggagaatgatcgattggttgaagagcacaatgaaaattgcataaagaactggaaaccaagaaaaaaagaaattggcaggagacacgaggaacttgagaagttggttatgaacagtactaacagagaaaagcttgaagcggcaaaagaagagattgcaaaggagaacaggcttctcgatttagcaaccctaaagaagaaggaagaagatgagaagttcttaaaacttgtaaaggaacaagagcaagagaaagaaaatgtcaggaagatgctatatgatttagaaatgcagttggcttccaaacaaaaacttgaactggaaagagaacagttgagggggaatcttgaggtatggaagcatatgggaaaggaagatgcaaaatcgaaggaaatgctcgataagttgcatgaagcactgaaagagaaagatgaagaaatggatcatattgattctataaaccagacccttattattaagcaacgaagaaccaatgatgagctggaagaagccaagaaagaactgactactgacctacttaatatgtcatcagctcgatccattgttggtgtcaaaaaaatgggtgagcttgacaagaaagctttcattgtctcttgcaaagagaaaacagcagacgagttgtcattgtcaattctgtgctcgaaatgggaagatgagatcaggcaaccagaatggcatcctttcaaagttatagatgttggtggacaggcaaaggaaataattcgggaggatgatgagaagctgcaagctttgaaggctgaactgggtgtgcaggcgcacgatgtggtcgtcaaggcccttcttgagatgaacgagtacaatccaagcggcaggtaccccataccggagctgtggaacttcaaggaggaccggagagcaccgatgggcgaggcagtagcctacatagtgaagcagtggaaggcgaacaagaggaagcattaggcgggcctgatgcctgatggcccttgtgccattggttcctgggtcgatgtccctgacagtgagagctgagaccctgatcccctgactttttctgctgatggaagacctagtaccagtagcactactaaaaaaattgtccgatctcttggacggttagattggctatggcacctagtgcaatgatctatatgtataaaaaatatctgtagtgtttaatgattttaccagaactagataaagattatagaatatttattattata

SEQ ID NO: 89949 - DNA, 909 bp, Zea Mays
aaatattccctaccgcaacgccagccgcacgggagagaacccgggagccgccgccctgccctgccttccgctgccgcgcccgcagtttccaaattcgtcttgctccgctcaatcacgcgaatacctgacctcctccgttccttcgtcgtcgctcccggtcgcagtcggcctagcgaaggagcagcgcaacatgcaaacagtacggagtgcggtgctgcagcacctccggctccgcgcggcggctcctattgctgcacgtggaggcggcggcgggttcgctcggaggatgagcgcgccggcgggccaggagggcagtagcggcagcagctccgaactggagagggacatcaggacgcgcgtcgttaacctggtcaagaagttcgacaagatcgacgccgacaaggtgaccgagactgcagacttccaaaaggacctgagcttggacagcttagaccgggtggaacttgttatggcctttgaacaagagttctccgttgagatccctgatgacaaggctgacaagctgacctgttgtgcggatgttgccaagtacatcatatccgaatctgaagcgagtgatacaaatgccggtggatcctgagggacagatgaaaccgagtgcaatgtttctttttctttttgtgtgtgtgtttatcataacgagtctgggttacaaaggacgatctatgcgcatgatttccttttaatttttttttccagtatggaaggaaatgctgttccaatgcgtttatattgtctgtcaatactgtgaaactatctctatctcggttgtttgtcacaaagtgaagttttttctatgtcgatcatggttcatgttcaagacttgtacattgtactggattctattagcatagccaatgctatacgttttctgtacactggtatttc

SEQ ID NO: 89950 - DNA, 1753 bp, Zea Mays
acacacgggtactagtagtactaccatatcatgtgacgtgcatgcggctgtgatgcacaccaacccagccatggccaaggcagctcctcctctcctcgccgccggcagccgcactgccatcacagcgcagcagccatcgtcgaggaaaggcgccgctggcaccggtttgttctgcagtcgcgccatcgtcagcaagcgcaccagggtaacagcgaagctcggagacggagagctgaagcctgcaggcaagcggaagttcatcaccaaggaagaggagccagaacagtactggcagaccgcgggggagagggagggggagaaccccatgatgacacccctgccctacatcatcatcttcggcatgtccacccccttcgtcatcctcgccatcgccttcgccaatggctggatcaaggtccctgtgcgatgaccgtaacgcgatcagccagcctggatcatagatgctgactcgtcagcctgcatctcatccagcgtgtgtcctgcgactttgtaccttcatatatagagacaagagttcttgcgtgtgagcataattgcatgatcgcgtggtgtatgtaacccgaaactgtttaccttttcgcaacaacttcaatcttcactcttcaggctgtgttccgattcagtgccctggtatcaatcttcagttattcgcacaagagaagatttgtaccatctgcagttgtagaatcataacagccagaaccacaacttggttttttggtagacctcacaataggtcctgctacaatcacccccccccccccccccacccccaaaaaaaagggtcttgtataacaatggcatattcgtacattaattaatgtgtagccaatgctgtcaatgaatcgatcaatctgcggctagcgtaacaaaaggttcagacggtaacatgacatgggtgcaaaggcgaaaaccacatgtttatgaatcgattcaaaacatatgagcagaaattttcgcatgtgctcaggatcgcatatcatcagacattacatactagttacgcaacagcaacttgtttccatatatttttccaatgtaaatagcaaatgcaacgacacacgcgcacaaccgagaattaagagtatttacgcgacatggagaacagtagagctccgataaattacaccacaagaaacccttttgctttgcttcatctattagtcaaccataagtatctgttattggcgaataacacctcgcaccagtgctacagcgtaatcaaccttcaggtaaacgcacgctgcatcgtttgccggtcatctagttggttttctgtcgaattcagattcatggcagtgcggatcgagccaatcacgaggagagctcttaggcaggctggtaccacctctagcacccatcagctcccttaggttctccaccttgttctcctgagcattgccggggaatttcctatctgcttccttcagcttgttccggaaccgctgcttgcggccaacggtgttcagctcctgctgctttgcttgagatggtggagctccatgaggtcccagatatattttctcatcgtttgcctgctcaagcatgaatatcatctccatgaagcaatggacaccaatggaccagtagtccataaaggtctttttttttaaaaaaaaaagggggagggggcatatgacagacaagtaaatctgcggagaaagagttcagaaaagaattccgaaatgtacctgtagaggctcaggatctttttctttggggacactaggct

SEQ ID NO: 89951 - DNA, 337 bp, Zea Mays
caacaggcgttctttaaagacgatgtcctggcacaagtcgaagcggagaacctactcgtgggctgatcaacgtagggtttgctgggtccaggcgtgttatctgttatagattcccactcacctccatgaacgtcatgagcattggatcattgatcatgtttttcttgaaacaagtatttgttttccaggttctcagccaatgactgcaaaactgtgtttctatttctagaattgtttgcagacaccagcgagcagcgagcaccgattgccaacaagatggcaagcctgtgatataattccaactgtctctaatcaatatatataataaacattatca

SEQ ID NO: 89952 - DNA, 1903 bp, Zea Mays
gctacatccgcaaatggattgagctcgatccaaacagccggttgtggccaaatgggtatcgaaatattgtgcctaatcttcatcttcctcctcctcatccgcgtgctcaccaggagctacgccgcctccccatcgccgcccaccatgtccgcggaggcggcactccggctgccaccggggccatggcagctgccgctgatcggcagcctgcaccacctcctgctgtcacggttcagcgacctgccccaccgggcgctgcgcgagatgtccggaacatacggtccgctcatgctgctccgcctcggctccgtgcccacgctggtggcctcctccgccgaggccgcgagggaggtgatgcggagccacgacgtggccttctgcagccgctacctgagcgccagcctggacatcatcagctgtggcgggaggggcgtgctcttctccccctacaacgaccgctggcgcgagctccgcaaggtgtgcatgctggagctcttcaacccgcggcgcgtgctctcgttccggagcgtccgggaggaggaggtggcgcgcctcctgcgctccatctcggaccagtgtggcggtggcggcaggcacgccgccgccgtcgtcaacctcagcgaggccatctgccgcatggtgaacgacgtcgtcgtgcggaccgccatcggcgaccggtgcaagcaccgcgacgagttcctgcgcgagctcgacgaggcggtgcggctcaccggcgggttcagcctcgctgacctgtacccgtcgtcgcgcctcgtgcgctggttcagcgcttccgccagagacatgggaaggtgccagaagaacgtgtacggcatcatcgggagcatcatccgtgagcgagacggcgcgcgcgtgcctgggcggcgggaggacgacctcctcggcgtcctgctgaggctgcagagggaaggtggcctgcagttcgcgctcaccgacgagatagtcatcgccgtcatcttcgatattttcgctgccgggagtgagacttcatcgacggtgctagcgtgggccatgtcagagctcgtcatgaacccacgggtgctgcacaaggcgcagtcagaggtgagagagacgttcaagggccaggaaaggctaaccgaagacgacatgcccaggctgagctacctgcacctggtgatcaaggaggcgctacggctgcacgcgccggtgccactgctgctgccccgggagtgccgggagccgtgccgggtcatgggctacgacgtgccggagggcaccagggtgttcgtgaacgtctgggccatcgggagggacgacgggttctggggcgacggtgaggtgttcaggccagagaggttcgacggcggcggcggcggcgtcgacttcaggggcaacgacttcgagttcaccccgttcggggccggcaggaggatctgccctggcatcgcgctcgggctggccaacatggagctcgcgctcgctagccttctctaccatttcgactgggagcagcccgcggacggccctggaactggaagcagcggcagcctcgacatggcagaggccttcggtataacgctgaggaggaagtccaagctcttgctcaaggccacacctcgtgtcgaaaccaagtagttgttctatgctagtactatgatgcatcggcagggcaatcatccgatccgtttgccgcttctacagttctacttgtagagccaatggatcaaaggcactgcctggttgagtgcaatgcaactgtagtttccaccagtttgggaccacctcgtgtgtatcgtttgatatttaagtctcgcgatcgagtacttattagagcaaggataataagctagccggctgccggtttgtatagtcttgacacgttgcttgaaacaaatgcttatataagagcatctctaaaaga

SEQ ID NO: 89953 - DNA, 195 bp, Zea Mays
atgttgtgctatacaccttctgcttctttatgccatgtttttgcgcttaatttagttgtacccaacctactatatatcagttgtccatctatgatctgtctcgctatatatatttcagtttttccttgctcattttaccggcatgcatgcagcagtacaaatgagaacccctatcacttgcagaaattgaacctc

SEQ ID NO: 89954 - DNA, 274 bp, Zea Mays
aaagcagcaaaccgcctcagcgttactcgaatggtaagtacacagcgtgcggccagcgctcccattcagatcgaccgacgcaaagcaccagtcaaagacccgaacaagtaaagttcaacgcagactttctgctcccagactctccaacacgttcacacagccaaacgaagacaacggctcatggagcgcacggttccacacctgaaagcgctgccgtgcatgcacaccatcgtccacagcccacgccccacagtgtactgctatgctacagatc

SEQ ID NO: 89955 - DNA, 1536 bp, Zea Mays
ttggtttccaatcagcccataacatcctgtgccatagcattagcatcacataatggaagatggaagaattggcgcaacttgcaagacgaccacaagacgacgccctgcgccgtgacaaaactttgcagcttataagtaggcgcatgcccaagaccaccaccacctcaagcagcaaaaccccacacagcgagcgagcgaagtagacagacgctggctgagatacacacacacacacacatcaactgaaaacgaggagtttttgttcatcatgggggtacagagcagcgagggccagatgatgttctcctccatcgccctgctgcagcagaggttcagggagctggagaggatcagggagaagcgggaggagaggctactccacgtgctcgccccgcgccctgtggccaccacctccccgagggagatgcccgtgaagtggttcttccatccggagctgctctacccgtgcaggccactgcgggacaccgctgccgcctccttattcccggcctgtgaatgcaaaagcttccagctccacggcgataacgaccccatcacggtggagctgtggcccagtaagacttacaactacaaacatgtctctggtgaagtcgacgtcgacacctcgctgcacctctagactgctactgctactaaaaaaatgttccaatgccctataaacttctgttaaccacttggtgttgctctcgcagttttttttttggtagcctactactatgttctcttcttctgttgtaacaaggggtattaggaggggtgacggtgtgctgtaattattaccagtagtacgatggtcttgcagttcctttcttgtcatcttttggcactagaactgcttgcatcttccaacaaggcactgttatcatccgagtatgagagtaactctgcagggcaaccattctctgttacgtctggacactcgtcatcattggaggaatcatcagagcctttcttcttccgcttgatgatcttcttggaaatgaggcggttcacacccttgttgtcgacatcaacacattcactgcttattggcttgaatagaactttgcccaccttccttgcattagcttccactatctattagcaagcgacgccagttaaaggtagtaaaaacaattacagaaactaatggcatatttctttctacaagaaagaacgaaaattttggtgaattgcgaaacagaaactatggattcctagggatgcagcaatccaactacatgggaaattgggagttgcacttgttcgttttgctctcaattcacgtggattaggtgggatcgagtgggttttaatcccgaacaagtcaaaaaaattcataaattttaccgatctcatccaatccacatgggatagaaataaccgaataatgcctaataaaggacgtgtaccagtaccaacataattcagtattgagttctggattgacaattgactagtaccttttcttatctattagatttttgtatactttctttttctagcttcaaataaaaaaacaagtctaaaagaaga

SEQ ID NO: 89956 - DNA, 1931 bp, Zea Mays
atggccatcccggaggacctagaggggacctcgggcgatggcggggtgacgaatcgcgggagtagagggcggcgaaaaggcgcggcgaaggggcgcgggaggggcaggccgcggagcgccgacagatcctttccgccgccggcgatggctggggtggcggtcggggacagggtgctcagggagaggaggcacacgaccaacgttttctgcgagcgcgacacggatgttgacgatgagtgggctaatttctatgcggaaaggttttgttctcaaatttggccctgtataaatcaaaacctcaatgcccttagtaaatttgtttttgaccttgtttacttgcaactaccacttgtgcagcgattatccattcgtgtaatttactcctctcttgatgatgttgagacagttaggtccaaggactcaaggagtggcgatgttttacagactgcaaaaaagaggaagaagggaggtgcagggaaggtttctgtcacaaaaaggtcgaaaagagagggtgaagaacaaaagaaggcatcaccctccaaggataaagattgtgctgaaactaatgggaaaaggaagatgttgactggggataatgccctgatgtgccaccagtgccagaggaatgataaagggagggtggtctggtgtaattcatgcagaaataagcgcttctgtgtgccatgcattgaaagatggtatcctaacttgtcagaagacgaatttgctgcaaaatgcccatattgtcgcaagaactgtaattgcaaaggatgccttagaatgagaggggttgaagagcctccaaagaaggaaatttctgaagaaaatcaaatctcttatgcttgcaatgttgtgcgcttgttgcttccctggttgagaaaactgcgacaggagcagatggaggagaagaaattggaggctaaaataaaaggtgttttggtgaatgagatgaagttggaacaagctgaatataatctagatgagcgtgtctactgcaataattgcaaaacttctatagttgattttcacagaagctgcaagtactgcttttatgatctgtgccttgactgctgtgtggagatccgcagaggtgagattcctggaggagaagagataatgagagtaaagcctgaagatagaggccgagcatatctttttggtactactaactcaaaggatgggagtaaaaggttctccatgaggaggcacagctcatccctggagaatgagccttccaatgtagtaggttctagtgagggggcaaataactctctggagctgtggaaagcagaaagtgatggtagcataccttgcccaccaaaggagctaggaggctgtggcggttcgattttggatctcaagtgtttttttccagaaaagatgctttcaaatttagaagaacgagctgacagaattatgaggagcgaagtatttgcaaaagcagtagccaaaagaagtgaccagtgcccttgttatgaccattcaggaaacataagaactcaggacgtgcgagagactgcaaatacgaaaggctcaagtgataaccatctctactgcccagttgccactgctatcaaggaggatgacttggcgcactttcagatgcactggacaaaaggcgaaccagttattgtttctgatgttctgcatttgacttctggtctaagttgggaaccattagttatgtggcgggcattgcgagagaaaaagactaatggtgacgtagaagatgagcactttgctgtcagggcattagattgccttgattggtgtgaggtcaggagttatatttcattgaatgtttgagtgcatcctgtgaccttttatatttatgtatatatttaaatgtttccgtttgtattcctcttagatgtgctgttacttatttttgtagacttccctaggtgcatttagagagatgttcatttccc

SEQ ID NO: 89957 - DNA, 962 bp, Zea Mays
atggcctgtgagatatgtttcaaaaattttagggatcacttattagcatactgatgtgggtttatatttttttagcaacatttttttccctaacgtccccaataacaggttttggggaacattttcttagtggtctcttggagttgctcttagcggtacaattctttcaagtagaaagcaagaaggcaaaaatggaggggggaaacaccacatcatggtcctagctggaataaacagaatactagcctccaacaagtcggttccccccacaaagacgacggcggaagagaccaaattgcaagcaccacccaaagggctaactgacaggtaagcccaattcggtgcaagaaccccaaatttcagtgaagccagcacgcaactgcacagggaaccgcaatcacaggacacgaaccaaggaaccgcagctacgtggcgtgagcactacgccaaggaccccctggcttctgcatccaaaccctaagcagttcagaccggaattgacggatttgggcagcacccagctccaccgcagcccagaggcgctcccctgaactcagagaaccgcgccgcgcagatgtgctgcacccgagcagaggagcgacgcctcccatgcgctcatcccaaaaccctagaaaccccaagctgagcttcctctgccgctgtgcaaccagctcgacgacgacagcaacccgacccggagcagaagtgcgaagaatctagagcgggtgagacaggaggaagaggagggtttttcggacctcgcgcgtacctggagctgggcggtgagcagcagggggccgcctgagaagggagtggagccgcgtcgcttgtctggctcctcgccttctcaacttcctcccacagacagagagagtgagagagacaaggagaattttcgggtgttttttttttcttccggggttaatttagctctgctgactcgctgggtcgggatccaaata

SEQ ID NO: 89958 - DNA, 426 bp, Zea Mays
atggcggcgacggcgtatgatgtctactccaagagggcgagggaggtcttgctggaagcctctgagaagatgaagatacaggcagacaaagcacagaaggacctcagtgtgatcgccaccgaggttagtcaggagggacaggaatatctggtgatggcagctcggaactccccagactcgatcaaggatattacaacaacgttcagggctcttggaagattgaattggccatcagagtatgaggattatcatgtgggcattccgtttgggggtttcctcaacttcatgttgactggaagtacctatgctcttcgttttggtattgttcttggccttgcattgttgactctgggaatctcaagtttgaggtcacacagagaaagcgaccgtcggcctcgtcttctggtgaaagggcaagctggttag

SEQ ID NO: 89959 - DNA, 2120 bp, Zea Mays
caacaactccctcctccacctcccctttttcccctcacccccaccctacccgggcacccggttgctgccaggaaaggagggccgggtccggaccaccacccctctcttccccagccacctactgttcttctccctgtcctttctctctctactagtactaggtctagggtcgcctggccgccagccaacccacgcgcgcacacgccccgtccggccgtacccgctcttcattccccactgcacacaaatactactgtgactccgtgagggagcaacaggaggaagaagcaggggggagaggggaggggaggggaggcattcgtgctccttttttccttcctactgtacgagtacaggactgcgctgcctgtctctcctcgcctgctgccgacttcgcggcctcgtcgccctgccatgtccaccatggacgaaggctacgggcctacttgggacagcgacgacgaatacgacaacttcatacgcaagatgaacccgccaaggatcgtcatcgacaacgagtcctcggcggaggccacaattgtaagggtagatagcgcgaatgaatacgggatattgctggaagtgatccaggtcatgattgatctcaaccttgtcataggcaaggcatatataacctcggatggtggatggttcatggatgtcttcaatgtgaccgataaggaagggaagaagatcaaagatgaggcaaccctcacacagatcgaagactacatcagaaagtccttgggcgcagattcaagatacattccttcccgccggagatcggtagacgtcgccgccgcagctgaccacaacatcatcgaactgacagggacagacaggccaggactgctctctgaggtcagcgctgtgctcaccagcctcaagtgcaacgtggtcagcgccgagatctggacccacaacacccgagccgcggccgtgatgcgggtcactgacgaggacactgggctggcggtcacggacgccgagaggctggagaggatcagggagaagctgtcgtacctgttccgtggaggcaatctctctcgaggtgccacagtgtcgtcgaggactgccaccacgcacaccgagagaaggctgcaccagatgatgctcgacgatggcgactacgagcagctccagcggcaagctccaggacagtctcagaggcctaacgtcaccgtgaggaactggaacgacaaggactactcggtggtgaccatcagatgcaaggacaggtccaagcttctgttcgacacggtctgcactctgacggacttgcagtacgttgttttccacgcgaacatcgatgccaaggacaatcaggcttaccaggaattctatgtaaggcatgtgaatggatcgccaatgaacactgaaaccgagaggttgcgagtcatccaatgcctggaagcagccatcgaacggagggtatctgagggtgtgaagcttgagctgtgcaccaacgacaaggtcgggctgctatccgaggtcacccgcatcttccgcgagaacagcctgacggttacgagggcggaggtgaccacgcggggcaggatggccgtgaacacgttctacgtgcgcggctccgcgggagaggccgtcgaccagaaggcgatcgactccatcagggaggccataggccacagcctccaggtgaaaggccaggccgagccaccggagccgcagaagaaagagtcccccacgtggttcctcttcgccaacctgtttcgcccgaggtcgctctacagctttgggttcatgcgctgatcgagccgtcgcttccaagaaccgctgcccgtgcagtaagttcaccaccgttcacgaagcaatccaggacatggggggatcttcttcagaaggtggaaaagccttcgttgtgtcctagcagtgcaggtttggcatgtaggtagagcatggcatgggtggtgttcatatatatatctgccgtcgtcgtcatcagcatcatcatctgtgtcatcatcatcagcgtctgtaaatatgacagcatttgaccatttgtacatataacgtgtaaactaaaggacgtaaatataagctgtacagaatatagttaaattccagatttgttgcgacgtcgtaaaagccggcgccttttt

SEQ ID NO: 89960 - DNA, 2275 bp, Zea Mays
caacaactccctcctccacctcccctttttcccctcacccccaccctacccgggcacccggttgctgccaggaaaggagggccgggtccggaccaccacccctctcttccccagccacctactgttcttctccctgtcctttctctctctactagtactaggtctagggtcgcctggccgccagccaacccacgcgcgcacacgccccgtccggccgtacccgctcttcattccccactgcacacaaatactactgtgactccgtgagggagcaacaggaggaagaagcaggggggagaggggaggggaggggaggcattcgtgctccttttttccttcctactgtacgagtacaggactgcgctgcctgtctctcctcgcctgctgccgacttcgcggcctcgtcgccctgccatgtccaccatggacgaaggctacgggcctacttgggacagcgacgacgaatacgacaacttcatacgcaagatgaacccgccaaggtgcgctctcaattatgcatcatcacatcccgctgcctctagtcctccactcgcaataatcaatccccttttacaaccactgcctgttgaaaaaagatggcacgtgcttgttccaagcctaaccctggtcagttttggcgattgattggccgcaggatcgtcatcgacaacgagtcctcggcggaggccacaattgtaagggtagatagcgcgaatgaatacgggatattgctggaagtgatccaggtcatgattgatctcaaccttgtcataggcaaggcatatataacctcggatggtggatggttcatggatgtcttcaatgtgaccgataaggaagggaagaagatcaaagatgaggcaaccctcacacagatcgaagactacatcagaaagtccttgggcgcagattcaagatacattccttcccgccggagatcggtagacgtcgccgccgcagctgaccacaacatcatcgaactgacagggacagacaggccaggactgctctctgaggtcagcgctgtgctcaccagcctcaagtgcaacgtggtcagcgccgagatctggacccacaacacccgagccgcggccgtgatgcgggtcactgacgaggacactgggctggcggtcacggacgccgagaggctggagaggatcagggagaagctgtcgtacctgttccgtggaggcaatctctctcgaggtgccacagtgtcgtcgaggactgccaccacgcacaccgagagaaggctgcaccagatgatgctcgacgatggcgactacgagcagctccagcggcaagctccaggacagtctcagaggcctaacgtcaccgtgaggaactggaacgacaaggactactcggtggtgaccatcagatgcaaggacaggtccaagcttctgttcgacacggtctgcactctgacggacttgcagtacgttgttttccacgcgaacatcgatgccaaggacaatcaggcttaccaggaattctatgtaaggcatgtgaatggatcgccaatgaacactgaaaccgagaggttgcgagtcatccaatgcctggaagcagccatcgaacggagggtatctgagggtgtgaagcttgagctgtgcaccaacgacaaggtcgggctgctatccgaggtcacccgcatcttccgcgagaacagcctgacggttacgagggcggaggtgaccacgcggggcaggatggccgtgaacacgttctacgtgcgcggctccgcgggagaggccgtcgaccagaaggcgatcgactccatcagggaggccataggccacagcctccaggtgaaaggccaggccgagccaccggagccgcagaagaaagagtcccccacgtggttcctcttcgccaacctgtttcgcccgaggtcgctctacagctttgggttcatgcgctgatcgagccgtcgcttccaagaaccgctgcccgtgcagtaagttcaccaccgttcacgaagcaatccaggacatggggggatcttcttcagaaggtggaaaagccttcgttgtgtcctagcagtgcaggtttggcatgtaggtagagcatggcatgggtggtgttcatatatatatctgccgtcgtcgtcatcagcatcatcatctgtgtcatcatcatcagcgtctgtaaatatgacagcatttgaccatttgtacatataacgtgtaaactaaaggacgtaaatataagctgtacagaatatagttaaattccagatttgttgcgacgtcgtaaaagccggcgccttttt

SEQ ID NO: 89961 - DNA, 1108 bp, Zea Mays
gaacaggactccgactcgttcgggctattccatctctgctctctccctatatacgactaggctaccgccgccgccagatgcgcaggtcttcgtcggctccttctacttctcaggcaacgagcacccggcagtaccgatcgggtgttcttcactgggtccgctcctgcgtgctagaactagaagaatcctctgctcggctcgaacttggaaggggggaggcgagggatggggtccctgctttgctgcatggggtgctcggaggacgtctcggcagcgccgcccgtgagctgcttgtgcctactatggcctttccattattaccacaatttgaactcgggctctgctgcttgtcacagatgtgatacacgggtggcacctgatggtggaaggagtcctcctgcaaatcaagtggattcattggatactttgggtctccctccaaggcctttgccttacgatgatcctcaatccagccctcgcatggtgcaacacccacttgtatcaggacacgacaaagcaccaacgcatgtccagaaactaggacagcctgcagaaactaagaatacccatactgggtcaacttgcacagctcataaggtttctgcgtcctcaccaaaacagcactcagaaggttcaagaatggatgatggagtacaattctgtgattcctctgacagtgaggatgactgtccagtatgcctggaagaatatgattatgagaatccgaagattgcactgcaatgcaaacataatttccaccttagctgcatttacgagtggatggaaaggagccaggcttgcccggtctgtgcaaagactatgttgttcaatgaggatgaatgaccccgccgatggaagtcttcccagacggcaagtggaagacccaagctaaatcctgcgtgttgtgtacatagcgctgatcgtttgctgaaacttacagcattgcgaaaatttatttttatagattttttcttgatgttaatgtccgcaggggtgcttacaataggttttcatgctgaaatctcaggttctgaaaaccacagctttcggttgaaatcaaatcaaatatacagactggcctctatttacaggacataacccatgttcc

SEQ ID NO: 89962 - DNA, 1943 bp, Zea Mays
gtggctggctgtgtcctccatcctttcaaggacctcgggaatccagaaaattccggtggtcggtgcccacggacaggcgtgtgcgccacgagcccgacgaacaagggaacgaggccatttccaccggtcaaactaggagaagcaagcaaagctccccgccattagtagaatccgcccgaagtctgccccgctcttcggcctcgtcccttctctccagggccatggatgtagatgatgtgctcagtaacttgcgtgttgttggtgtgccaacaaagagtgcaatttacatatggggttataaccacagtggccagactgcccgaaagggcaaggaatgccacttgaggatccccaagagcctccctcccaaactattcaaattggggaatgggaagagcctcaggtggaccgatattgcatgtggccgtgagcataccgctgcagttgcttccgatggatcactgttcacctggggtgctaatgagtttggccagttgggagatgggacagaggacagcgcgaaagagcccaagaaggtcaagtcattggagactgagtttgtaaaatcagtatcctgtggcgcacattgtacagctgccgtcgctgagcctcgagaaaacgatggcacggtatcgaaaagcaggctttgggtttggggacaaaatcagggttcagattaccctcgtctattttggggagctttcacaccaaacacggtgattaagcaagtttcttgtggagctgttcatgtcatggctctatccgaggatggtctactgcaagcatggggtatacttggggactgggaagcatggggcagcttgggcattgctccctccaatctggagataatgagctgatccctaggcgagttgtggcccttgatggtatagtagttggggacgtttcttgtggaggtgtccactcttgtgctgtaactgaagggggagctctatatgcctggggcggaggacatgtgggtcagctgggagtcgggcctcagggtggcttcttctcttgctcccttaatggatccgacatgctgctccgaaacatcccagtcctggtgataccctcaggtgttcgtcttgctacctgtgggcactcccacacacttgtgtctatgaaagatggccgcatatatgggtggggctataatagttacggtcaagcgacgaacgagaaatctacttatgcttggtttccctctccggtcgattggtgtgttggtgaagtgagacgactcgccgctggaggtggccattctgctgttctgactgatgcatgttcgctgaaagagctgtgcgaattcaagctcgcagagaccgtgaacctttcaaatgctcagctaatagaagatgttgcatcgcggactggtgcggatgccttggcacgcttgtgcgagaaagtaagggagcatttggataaggaaggagaatgtgaattcctggaaaagcaagtggcagaagaggtcaacactataggcagttaggccactagcaaaacagttcaagcagtctgaggctgaagccagtctgggattaaacagggagtcatctacaattgatagcttgacctcccagtaaagttactgattcggacattaattgttgtggtgatcatggaaaatatgtgactcgtcaattgattctgattggtctgtagacctccattggtggtgagcctctcagctgcatcggggaggcgcagaggctctatatgtgtcatgatcttgttccgaactgtcaggttgctgtaatgtagccaaatggaaacctttgtatccctggaacttgaaaggcatgtacctggtatctgcagccagtaagtttggcaatctgaattcgatgccaattcctgggcgtattcgaacgtcctacgtccatgtatttatttcagttcatgtgcatctaaacaatattggtatagcatgaaatttaagt

SEQ ID NO: 89963 - DNA, 2115 bp, Zea Mays
gtggctggctgtgtcctccatcctttcaaggacctcgggaatccagaaaattccggtggtcggtgcccacggacaggcgtgtgcgccacgagcccgacgaacaagggaacgaggccatttccaccggtcaaactaggagaagcaagcaaagctccccgccattagtagaatccgcccgaagtctgccccgctcttcggcctcgtcccttctctccagggccatggatgtagatgatgtgctcagtaacttgcgtgttgttggtgtgccaacaaagagtgcaatttacatatggggttataaccacagtggccagactgcccgaaagggcaaggaatgccacttgaggatccccaagagcctccctcccaaactattcaaattggggaatgggaagagcctcaggtggaccgatattgcatgtggccgtgagcataccgctgcagttgcttccgatggatcactgttcacctggggtgctaatgagtttggccagttgggagatgggacagaggacagcgcgaaagagcccaagaaggtcaagtcattggagactgagtttgtaaaatcagtatcctgtggcgcacattgtacagctgccgtcgctgagcctcgagaaaacgatggcacggtatcgaaaagcaggctttgggtttggggacaaaatcagggttcagattaccctcgtctattttggggagctttcacaccaaacacggtgattaagcaagtttcttgtggagctgttcatgtcatggctctatccgaggatggtctactgcaagcatggggctacaatgagtatggtcagcttggcagaggtcgcacttctcaaggacttcagggagctcgtgtgttaaatgcttatgcaaggttccttgatgacgcccccgagcaagtgaagattgttagagtgtcatgtggagagtaccatacagcagctatatctgaaaatggggaggtgtatacttggggactgggaagcatggggcagcttgggcattgctccctccaatctggagataatgagctgatccctaggcgagttgtggcccttgatggtatagtagttggggacgtttcttgtggaggtgtccactcttgtgctgtaactgaagggggagctctatatgcctggggcggaggacatgtgggtcagctgggagtcgggcctcagggtggcttcttctcttgctcccttaatggatccgacatgctgctccgaaacatcccagtcctggtgataccctcaggtgttcgtcttgctacctgtgggcactcccacacacttgtgtctatgaaagatggccgcatatatgggtggggctataatagttacggtcaagcgacgaacgagaaatctacttatgcttggtttccctctccggtcgattggtgtgttggtgaagtgagacgactcgccgctggaggtggccattctgctgttctgactgatgcatgttcgctgaaagagctgtgcgaattcaagctcgcagagaccgtgaacctttcaaatgctcagctaatagaagatgttgcatcgcggactggtgcggatgccttggcacgcttgtgcgagaaagtaagggagcatttggataaggaaggagaatgtgaattcctggaaaagcaagtggcagaagaggtcaacactataggcagttaggccactagcaaaacagttcaagcagtctgaggctgaagccagtctgggattaaacagggagtcatctacaattgatagcttgacctcccagtaaagttactgattcggacattaattgttgtggtgatcatggaaaatatgtgactcgtcaattgattctgattggtctgtagacctccattggtggtgagcctctcagctgcatcggggaggcgcagaggctctatatgtgtcatgatcttgttccgaactgtcaggttgctgtaatgtagccaaatggaaacctttgtatccctggaacttgaaaggcatgtacctggtatctgcagccagtaagtttggcaatctgaattcgatgccaattcctgggcgtattcgaacgtcctacgtccatgtatttatttcagttcatgtgcatctaaacaatattggtatagcatgaaatttaagt

SEQ ID NO: 89964 - DNA, 3507 bp, Zea Mays
atggcacggccgttctcgtcgctggtggactcctcgtatcgccgcaggatcatcgagtgcaaagcggcggcttactccttgcggctcccttcctgcgctaggccgcccgcacgcccccgtttcgctgccagctccgacaacactccagcgcatggaattgatagtagcatcattaccattcagactatgacgcggtgggagaccctgaatcacatggcttacaaatttgggagccttggtaagtctgatggaaaactggccttgaagatactgagttctattgtggagcgttcaggtttagaccgaattacctacgtttactgtatggctgttccaattctcatccaggctcaaatgcattcacaagcaatgtcagtgttgaagcatcttgctgtgacgggcttctcctgcactgctatttttacctccctcttgcggaccatttcacgttttgatcccaccaaccatgtcgtttttgaactccttgtcaaagcatatgtcaaggaaagaaaagtgctagatgcagctgtggcagttctctttatggatgattgcggctttaaggcttcacctgtttcttgcaataccatcctcaatgctcttgttgaggaaggggaatcaaagcatgtttggttgttcttgagagagagtttggcccgtaagtttcctttgggtgttaccacttgcaatattcttctgaattccctatgcaccaatggagaatttagaaaggctgaagatatgcttcagaagatgaagagctgtcacatatctaattctgtcacatataatacaatcctacattggtatgttaagaagggaagatttaaggctgccctgtgtgttctagaagatatggagagggatagtgtacaggcagatgtatatacatacaacatcatgatagataaattatgtagaataaagaggagtacacgtgctttccttttgctcaaaagaatgaggaaagatgacttaacacctgatgaatgtacctacaatactttgattaatggtttttttcgtgaaggtaagataaatcatgctcgctatgtcttcaatcatatgctgagacaaaatttggttccaagtgtagctacttacactacaatgattgatgggtattgccgaaacaggagaattgataaggccctaagtattctatcggaaatgcaaattactggtgtcatgccaagtgaactaacttatagtgctttgttgaatggttactgcaaagtttccatgctgggacctgctatatatcttatggaagatctgaaatcaagaggtataaccatcaataagacgatgcgtactattctcattgatgggttctgtcaagtgggtgagatttccaaggctaaacaaattttgaagagtatgtttgaggatggaattgatccagatgtcatcacttattcagcattgatcaatggtatgtgcaggatggctaagatgcatgaaacaaaagaaattttgtcaaggatgcagaaaagtggaattttacctaatgatgtcctatatacaactctgatttgttactattgtaaggcagggtatgtcaaggaagcactaaagcattttgtggacatttatcgaagggggctagttgccaatccagttatccataatgcattattacatgctttctatagagagggaatgattacagaggctgaacacttcagacaatacatgtctaggatgaatatatcatttgattctgtctcctttaaccgcataattgatagttattgccacagaggtaacatagttggggcattttcagtttatgatgatatggttagatatggctattctccaaatgtttgcacatatcagaatttgcttagaggattatgtcaaggaggccacttggtacaagcaaggcaatttatgtcctgtcttcttgacataccttttgctattgatgagaaaactttcaatgcactacttcttgggatttgcagatatggaaccctagatgaagctttggatctatgcgagaaaatgataaaaaacaactgtttacctgatatccatacctacaccattcttctcagtggtttttgcaggaaaggtaagattttgcctgcgttagtcatcttgcagatgatgttggagaaaggagtagtccctgatactgttgcgtatacctgcttgctgaatgggttgatcaatgaaggccaagtgaaagctgcttcttacgttttccatgagatcatatgcaaggaaggcctgtatgcagattgtattgcctataattcgttgatgaatgggtacctcaagagtcgaaatgtgaataccataaaaaggatgatgtctgatatgtatcagaatgaggtttatccaaactctgctagctataacatacttatgcatgggtatgtcaagaggggacaattttcaaagtcattatatctgtacaaatatatggtgaggaaaggaatcaggccagacaatgttacatatcgtttgctcattcttgggctttctgagtgtgggttgattgacattgcagttaagtttttggagaagatggtcttagaaggcattttccctgatcggttagttttcgatatattgattacagctttcagtgagaaatccaagatgcataatgcactacaagttttcaattgtatgaagtggttacatatgtcacccagcagtaaaacttttagtgccatgataaatggattgatcagaaaaggttacttggaccatagtcacaaagttttacatgagatgttacaagtagggcttcaaccaaaccatacacactatattgcattggtcaatgcaaaatgtcgggttggtgagattgatagagcgtttaggctaaaagaagaaatgaaagctattggcattgtgcctgctgaagttgcggagagttcaattattcgaggactttgtagatgtggaaaacttgaggaggcagtcatagttttcagtagtatgatgcgttcaggaatggtgccaactgttgctaccttcactactctaatgcacagtctttgcaaagaatccaagattgctgatgctttgcacttgaagaggctgatggagttgtgtagattgagggttgatgttgtcagttataatgttttaattactggtttatgcaaagacaaacatatctctgacgcactagatctttatggagagatgaaatctaagggtctttggccgaatattactacctatatcacactcactggagctatgtattcaacagggagagtgcagaatggagaggaactactggaggatatagaagaaaggggacttattccggcatataagcagcctgaaaatcttgaaagacggatggaggatgcaattattaggctgaacatgataagaaactgcagaaaggaagtgccttttagaggggttgagctactacctctagaccctaaacccgtgtgtagtgctgctagtgattgtaaccccactgaaactcggcaacacaaaggaatttgagcatttgaccaatatggttgg

SEQ ID NO: 89965 - DNA, 148 bp, Zea Mays
gatcctgggggcaggtaaaaagggattatgagtgctgatgcgtgatgttaggtatgatatgcataagttacagcaggcattcgaaggcatcaaaatgcgcaacattctactcaacatttttatgatcacttagtgcccttatgtcatt

SEQ ID NO: 89966 - DNA, 423 bp, Zea Mays
atggccgaaattggcgttgtggatggggaagggatgcaagatttggatgccagttgcacggttgaggtgattggggagttctctcttccagcaggagaaaccctagccgccgcctcttcaatggaccgggttcctccggttgaagctgtagccgacgcgtacaacgccgcacgagcagctgccgttgctgcagtagaagcgcattcggcggccatcattgcggaggaggcaatcgctgctgtgaagtatgctgcaattgctcgcgaaaagtttgaaggagctgttgattcagtgaagaactcaacctttgtctatgctaatgccactgttgaggctttggtaatatttctgcacactgtttattttctagagatcgaccccgtttatgctgccgggtcacccgaaacaagatcgaccccgtaa

SEQ ID NO: 89967 - DNA, 265 bp, Zea Mays
cagcgttttggtcggtagggcagcgaagtatgactacatgacagtgtacgcctgctaccttgccatcattgcagggcttggcgtcactctgctcttgttggcattcttccgcaaggcattgcctgccctaccggtgtccgtagccctcggcgttgtgttttatgtgctcacaagtgcactgtttgaggaatttgtcgtgcagtgccccacaaattttcatgttttaacattaacggaacattgcttattgttgtaccattgtagt

SEQ ID NO: 89968 - DNA, 646 bp, Zea Mays
ttggggtgtgtgtgatgtaatggggttctctccccctttcttattcttctattaattcaaagatgcgcagctctcctgcgtattccagaaaaaagaactgctttggtagtccagttcaatatggggtgcctaactttctgattcctatatgcattctgctactgattccttcatggccttacatagcatcctgcatccctttctctatttgaagcataggaacaaagcaacggctggcattgagtctggcagtggaggcaacaaaggatactggtatcagtgcttgcagctacatcttcagacaactgatgttcttgaagacgaagatttatatgcaaacctgggtgcctccacaaaagtctaaacccttatacatcttgttatatttcctctccaaatgatgctgtggtgttcagacctcacaaaggctgcaggcttggcgtagagatggatttctaagaaaagaaaaaaaatggtgcttcctgcttacaatttattagttatcaaccacaaacactgtgagcttttgcagacagaaattgccttatttatatttacagaaacagatcacactggttgcaacctgcactgcatgatgaaaatgatgtctacgagagaaggggggaaacagaagaagaatctgaag

SEQ ID NO: 89969 - DNA, 177 bp, Zea Mays
ccggaatttatgctctttttttgtgctctctcagcatgtgctagctggttaagtactagcattgctattgggcgctattttgtatgcttgttctgctgtcttttggatgtaaacgaacaagtttgcatgcttgttctgctattggataagaagtattagcattgctatttgcatgct

SEQ ID NO: 89970 - DNA, 1826 bp, Zea Mays
gcaaccaaagcacacccctcctccttgctctgcggtgctcggagttggggagttggagcaccaccaccaccactcttcccctctcctcgctcgtcctgttggaagcagcacacgcacgagagagaaagagagacacaagagatggcgctgctgttgctcctgctggccgtgctcggcgtggtgctggcgagcagcctgctgctgcggtggaacgagctgcggtacagccgccgccggggcctgccgccgggcacaatggggtggccgctcttcggcgagaccaccgagttcctcaagcaggggcctagcttcatgaagcagaggaggctcaggtacgggagcctgttccggacgcacatcctgggctgccccacggtggtgtgcatggagccggagctgaaccggcgggcgctggccagcgagggcgccggcttcgtcccgggctacccgcagtccatgctcgacatcctggggcccaacaacatcgccgccgtgcacggcccgctccaccgcgccatgcggggcgccatgctcgcgctcacgcggccacacatgatccgcgccgcgctcctccccaagatcgacgccttcatgcgcgcccacctccacggctgggccggacgccgcgtcgacatccaggagatgaccaaggagatggctttgctctcggctctcaggcagatcgctggcatctctgcgggcccactctccgacgccctaaaggcagagctgtacacccttgtacttggcaccttctccctgccaatcaacgtcccaggaaccaactacagcaaagggctccaggcaaggaagaagctcgtggcaatgctgcggcagatgatcgctgaccggaggtcctctggctgcgcccgagacgacatgctggacgcgctgctcagcggcaacgagggtaccagggcgaagctcagcgacgaccagatcatcgaccttctcatcaccctcatatactctgggtacgagactgtgtcgaccacctcgatgatggcggtgaagtacctgtcggacaaccccaaagctctcggacagatcaggaaagagcaccttgacatcaggaaggctaagtcaccggaggatccccttgactggaacgactacaagtccatgaccttcaccaaagctgtcatttatgagactctaaggctagctacagtagtcaacgggctgctgaggaaaactacccatgacgtagaaatgaatgggtatgttattccaaaaggctggagaatttatgtctacacaagggagataaactacgacccgttcctgtacccggaacccatggttttcaacccatggagatggatggagacgaacctggaatcacatccgcacttcatgctgttcggaggaggtgcccgcatgtgcccagggaaggaggtaggaacagttgaaatcgcaacgttccttcactatttcgtgacgcgttacagatgggaggaggagggaaacaacacaatatcgaagttccccagagtggcggctcccaatgggctacatatccgagttcaagattactgaacttcgtgaggcgttttgtgaagtttaggtagggattcagacagatagaaataacccatgcgatgctgatgctgctggcctcttcgaaaggactagaacagccattagtgcctgtaaaatgtgtccatgccgatagtaatgttattatagggaggatataggtatcataggtttattagaaatttgatgtagaaagccaacagatgctcctgtattcttttgctccatcaaaacagtggtatcatttggcttctatgcttttgaatcgaacatggtacagaacccaa

SEQ ID NO: 89971 - DNA, 2746 bp, Zea Mays
tttatgatcaaacaaaggctctccatgaaggttcttccacagtttaaagtgcacatttcagcatattgagagaatgccaactttgcattgatccaaggatcaagagatcctagaagatccatcaaaaggagctagaaaaaaaaatgctctctcatatttccgttcgtttgatgcttatcataaaatatcacatccagatcaactggtctgggactatatcttcatcagtttggcataaatcgtaatcatgtcgtccaagcttggttgtccatcttacaacagaatatatgaacagtggttgatcaggtgctgtactgattgtgtatcatccacgttgctccctaaagcaacgacaatctcttgcccttgggagcttgcaaagacataggattccacagatgaatggtgcctcgggaaatgcacgcccgcccttgttaaggacccaacaagctcggtactgccaacatgagaggaaaattagcaaactgttttatatcagaatgagcatttgaagctaaacaatcctttgaaacggaaatctgaagtagagtagcttcatttccacatctgtagcactgtggcagtagacatgaggagaccaagagcaggggggaagataggattccaacagagcaacagtggccggtgctggaaattgaaaagtcggagccggacaagtatggcggaaccactgtgacctcgaggcgagaatacgacaggattcttttcggtaaacaacaacgacaacaataaccgctaaaactagttgggaaaaatggtggcaagcagcataggaatcaagggttctacaacaaatgtcagcatggatgtgagaagatacaactcgatgccattccattatacgggggaagaagaagagatcggtacctcccgagcgaaaaaaattggactggggaagtgcggaggaggcccgatttcatttgatttgaggcggcgcaggcacagaggagagcgctgcgccatgcgccgactggggaggaaaacaacaggttacgcgaacagaataagaaagcgaattaatggaatacgccttttctggggtcaaatacattacaagacaaacaatatggggaagaacatggctaaatctacagtgagtttgcttaaccgcagtgctaattttgcatcaaggacttcacaagatgccgtggatgggttaagcgatgaaagtgacggtgaaacctcaacaaaaaagaagagaaccccaagacgtggaagaaagaaagccaccgttgaaacatcgagagatgtaggagaagaaatcgaagtcatcactgaacaaacggccgctgaagagactaaggaagttaagaggagaggccgcaagaaagctgctacttctgcaagctcagaagaggagaaggataaggccaaggaaccgaagaagaggggacgtagaaaagttaagactgtagaggaacctattgataatgctggagagcatctgagcaaagatttgatgctctataatgaaagagaagatcagactcgtctacagaattctgccagtgttctggaaagtaaaatagcgtcagtgctacatgaggatattggagaggttgacgatttaattccgctcgtgtgctgctttggacctgccaaatactcctttattccttctggaagaccagcaaataggttgatagaccatgagattcatgatagaatgaaggacatgttttggtctccagacaaatttgtgagggcaccaggagggtcttcatccaatgttgctctagctttagcagcgattggtggaagggttgcattcatgggaaaattaggtgatgatgactacggtcaaagtttgctgtatcacttaaacatcaatggagttcaaactcgagcagtttatatggacccttcagcaccaactgctgtgtctttgatgaaggtcagaaccgaaggaagtctgaagacaaactgtgttaaaccttgtgctgaggattgtttcctgccgtctgatatcaacccggcagttctaaaagaggctaagatgttttactataattcttcagctttgcttgagcccactacagagtcatcattgttgaaagctattgatgtttcaaagaaatttggtggtacaatattctttgaccttaatcttccacttccactatggtcatccagcaaggaaaccaagtcactcattaaggaggcatgggaagctgccaatatcattgaagtcacaaaacaagaacttgagttcctttgcagcatcaaaccttctgagaaatttgacacaaatgataatgataaatccaaattcacacactatagttcagaagttattatgaaattgtggcacagtaatctcaaggtcctctttgtgacaaatggtacctccaagattcactattacacagaaacacacaatggctgggtccgtggtacagaagatgcaccgatcactcctttcaccggtgatatgtcacaatctggcgatgccattgttgcagccctcatgaggatgctggtaattaaccctcacctgatcacagacaaggtttacttgcacaaggcagtcaaacatgctattaaatgtggtgtcatcgaccagtgggtgctcgcgcgagaacggggcttccttcccaaagagagagcagatccaaccagcgagcagtacgaagtgaagtccatcacagagagggaataccgcacacttcctgatgccatgcaatcagaaaacacgtcaaccagtgaacttgcttatgtggagtga

SEQ ID NO: 89972 - DNA, 215 bp, Zea Mays
ccaaatttttctatgccccagatcaaatctagtaaatttatttctcttcattttattttaactattttataccgtataaacagagacttatatatagttacatggatcaagtcccgagctacgacccggatggcccggggtgtagatccgcccctgctttcacatgtctctagttgctttcttttgtatttaatcaattctttattttttttttt

SEQ ID NO: 89973 - DNA, 920 bp, Zea Mays
atacccgaactgatatctgatcatagagcccaataatagcccggcccaatcaacacggatgctcgagaagaaaggctgagactgaaacgtaggaacaccccgaagtctgaacatactagaagcgtaaccctaagtctcggaccccaaccctcgaggaaggcgaccggagatggcggcgtcgtcggcggtggagaagctcaaggtcctctgggactcgcaggtcaacgacgaggagcagtgggcgctcaattataagctgctgaaggctgctggtctgtttgcgggatccatcttcctgatgcggaacttcggtgatctgatggccatttagtaggcttatcagcgttgtttacttggatcctatgagtgttgttttgatgttccaataattcctgctatgaatatgaaaggctattttgctccgaagaggactagatctgtgccgatagtgcttgatcttagactttgtagccatagagattagaccctttaatattcggcatgtaccgtggatattttggaacgatggtatcagtctgcacccataataatttttgatgggtcattaatattttaagagaagatgttgcaccgcagggcagggtctaagatgtcttaagatgcacaaaagtgtgctattaaaaatgagggcagtggtttttactggatgagtactgttcatcgtatgtccatggccagcatatattcacatgggattatgtgtcattgagcagagtaccaggatgggaatctgcttgctgaaaccctgttgcagccttgtgatggacacttgcatcagtttgcacaagaccgttaaagaaaagaggacaaaggggtgaagaacgatgataacagactgctgattggaggaagggagagaccgagagagcggatcctcccctgaaaaaactggtagacag

SEQ ID NO: 89974 - DNA, 1610 bp, Zea Mays
aaacgatctccggggaatattttattccgtgggattccgatgcggccagtcctcctcccctctctcctgtttcttctagtagtacaaataaagaagaagaagctgagctgctcgaggcacggcgagggagacacaaggcgagtgtccctactccgagggcagtctcggtgtgcaagcgcatagcatagcaggagccacaagaaaaaaggcccatggcttccttctcaccgagtggccggatgacacggacggcggcatcttctctggcagcgcgcgtggtcctcgcgctcctcctcctcatcggggtatccggttccggagccacccaggcagcgtctccccacacccaccacagtcggcagctggatgtgaaccacaagaagccagtgcagacgtttcggcccatcaacattgcccaccgagggtcaaatggcgaactgcccgaagagacagcggccgcctacctgagggcgatcgaagaaggcgcggacttcatcgagacggacgtactcgcgtccaaggacgggcatctcgtctgcttccacgatgtgacgctggacgcgaccaccgacgtcgcggaccacgcggagttcgctggcaggaagaggacctacgaggtccaaggagaagatgtcaccggatggttcatcgtggacttcactcttgaagagctcagatcactgagggtgaagcagcggttcagtttcagggaccagcggtacaacggcaagtaccagatcattacgttcgaagagtacatcctgatcgcgctctacgctgacaggaccgtcgggatctacccggagatcaagaaccccgtgttcatcaaccagcacgtgaagtggtcggacggaaagcgattcgaggacaagttcgtggagacgctgctcaggtacggctacggaggcgagtacatgtccgatggctggctccggcagccgctgttcatccagtccttcgcgccgacctcgctcatctacgtctccaacatgacggactcccccaagctgctcctgatcgacgacacgacggtcccgacgcaggacaccaaccagtcgtaccacgagataacctcggacgcctacctcgcgttcatcgggagctacgtggtggggatcgggccgtggaaggacacgctggtgcctccggacccgacagacaaccgcctgggacgccccgccgacctcgtcgcgcgagcgcacgctctgcgtctccaggtgcacccgtacaccttcaggaacgagaaccagtacctgcacttcgacttccggcaggacccctacgccgagtacgcgtactggctcgacgaggtcgccgtcgacgggctgttcaccgatttcactggtagtctgcacaagtaccaggagtggactaggccgtaccggaaggagcaggagaagacgagcccggaggcactcttgcgcgagatcgcgggcatgctcaagaacgacggctatgactgatgacttaggttgccttcagttttccccgtctgtcactctctctgtaatggttaactaaataataaagcgacggtttcatggatgcatcatctggacgtgggtgtatcattaccagacactgaattttcagtaacgctctttaaaaca

SEQ ID NO: 89975 - DNA, 443 bp, Zea Mays
cgatggggagcatggcgaggagagagaaggaatggaagaggccgggaaccatcgccacggcgagctgcgagaaaagcactaggccgcatgacgtgagcgcacaccacagcacctcacacggcgacaacaaaaggactgacgaagcgtgcgcaggattggggaagaccttcgctcccggatatttaccggagagcggtgctcggatgcaggacaccggaaaacttctgaggaaggggagcaacagctacctgaaggaggtcgttgatgaccttgcggatttggggctttgcgaagccgtactgggcgaggtggtcaatggcggcgtcgatccgccgttctcctctctcgggcctcggccgccgcatcgtctcgaccttctgcggtcccatcttccagtgatggcggagggagtgaaccttgaatgctccaagctccacgattga

SEQ ID NO: 89976 - DNA, 923 bp, Zea Mays
actcccaaaacttgcttttccctcttgctctctctgtctgtctcatgctgcatgcgtgctggcttcaggcagcttctatgatcactgactgaacaagaatctgatccgcttcactgaacaaggagaaaaaaaagggagagaacaagaggactgagagcaaggacagagggcggtgcagatggagaagccgtttgtgagccactgcgacatggagatggagctcgtgaagatggccatgctcaggcacgaagagaccttcaggcagcaggtccacgagctgcaccggctgtaccgggtgcagaagcagctgatgggcggcctgtccaggccgtcgtcggaactcatcagctgccggcggcgccagaccaggcggcgcaggcagccgcggcgccgcgcgctggacctgcaactgcaccaccacctccccgccgtcgtcatcgcgccaccgccagcggaggacgccgggctggagctgacgctagccatcggcggtggcggccggtgccggaggaggcgccaagacgagattgagactagcacgggcaccgctacgacccccttaggctcgggctcggacatctccggggggagcctgctgacgacggcggcgtcgtccacggacaccggtggtgggtcgccaccgtaccagagggcagtgccggcgtttcgtcgtctccaggaagcggcggcggccaagcagccaccgcggtcgccatggctcgtgcagtgcgtcagcggcggccttgagatggcgtgaggtggtcaatgcgtttggttcttgattaggattccaagtttgcgtagttgttggttgtacttgtacgagaggatgcagccatgcagctgctagtgggtagccttgtaggctgtactagcatgcatgtcaggcagccggtttaacgattagtatctcgcttgaccaa

SEQ ID NO: 89977 - DNA, 2955 bp, Zea Mays
agccccatcatattcattcataatataaggcgcgaatctatccatctatctaatctacttacgcacgaacatgcgtaacatcggcatgctgcgggcgctggtcctggcgctcgcggtggccgccgccgccgccgccgagaagaggaggacgtacatcgtccacatggccaagtcggcgatgccggccgagtacgcggaccacgccgagtggtacggcgcatcgctgcgctccgtgtccgcctcagcctccgccgccaagatgctctacgcgtacgacaccgtcctgcacggtttctccgcgcgcctcacgccgcaggaggccagcgacctggcgtccgccgagggggtgctcgccgtcaacccggaggcgcggtacgagctgcacaccacgcggacgcccgagttcctgggcatcgccggccagggactgtccccgcagtccggcacggcgggcgacgtcgtcgtcggcgtgctcgacacgggcgtctggcccgagagcaagagctacgacgacgccggcctcgccgaggtgcccgcgtggtggaagggccagtgcgaggcgggacccggcttcgacgcctccgccgcctgcaaccgcaagctcgtcggcgccaggttcttcagcaagggctacgaggccgccatgggccccatggacaccgaccgggagtcccggtccccgctcgacgacgacggccacggcacgcacaccagctccacggccgccggcgccgccgtgccgggcgccagcctcttcggcttcgccgcgggcacggcgcgcggcatggcgccccgggcgcgcgtcgccgcctacaaggtgtgttggctcggcggctgcttcagctccgacatcctcgcgggcatggacgccgccgtcgccgacggctgcggcgtgctctcgctctcgctgggcgggggcgccgccgactactcgcgcgacagcgtcgccatcggcgccttcgccgccacggagcagaacgtcctcgtctcctgctcggccgggaacgccggtcccgggagctccacgctgtccaacgtggcgccgtggatcaccaccgtgggcgccggcacgctcgaccgcgacttcccggcgtacgtcgtgctcggcgacgggaagaactacacgggcgtctcgctctacgccgggaagccgctgcccagcgccccgatccccatcgtgtacgcggccaacgcctccaactccaccgcggggaacctgtgcatgcccggcaccctcgtgccggagaaggtggccggcaagatcgtcgtgtgcgaccgcggcgtcagcgcgcgcgtccagaagggcctcgtcgtgcgcgacgcgggcggcgccggcatggtgctgtccaacacggccgccaacggccaggagctcgtcgccgacgcgcacctcctgcccgccgccggcgtcggcgagacggaaggcacggcgatcaagtcgtacgtggcctccgccccgaaccccacggcgacggtcgtggtcgccgggacggaggtgggcgtgcgcccctcgccggtggtggcggcgttctcgtcgcgcgggcccaacatggtgacgccggagatcctgaagccggacatgatcgcgccgggggtgaacatcctggcgtcgtggacgggcaaggccgggccgacgggcctcgccgccgacacccgccgcgtgggcttcaacatcatctccggcacgtccatgtcgtgcccgcacgtgagcgggctggcggcgctgctccggagcgcgcacccggagtggagccccgccgccgtgcgctcggcgctcatgaccacggcctacgccagctactccggcgggtcgtcgctgctggacgcggcgacgggcgggatggccacgccgttcgactacggcgcggggcacgtggaccccgcgcgggcgctggacccggggctcgtctacgatctgggcacccgcgactacgtggacttcctgtgcgcgctcaagtacagctccaccatgatcgccgccgtggcgcggagccgggagtacgcgtgcgccgagaacaagacctactccgtgggcgccctcaactacccgtccttctcggtggcctactcgacggccaacggcgacggcggcggggactcggccaccgtgacacacacgcggacgctgaccaacgtgggcggggcgggcacgtacaaggcgtccacgtcgctcgccgctgccaagggcgtggccgtggacgtggagccggcggagctggagttcacgtcggtgggggagaagaagagctacacggtgaggttcacgtccaagtcgcagccgtcgggcaccgccggtttcgggcggctcgtgtggtcggacgggaagcacagcgtggccagcccgatagcgttcacgtggacctgaacctgatggacggatggattataccatacgacagtggtttttggcgcctcagcctcaaagaaaggcccataatccatcatccatgtgacggcctcgttccctacactacgcagtcaaaaggaccgaagtgtagggtgggaaggtttggagggggtacggtgcaaattggaggtttcttctgtgttgctattattactactaataaggtcattaatcctatcagcgtccgtaggttgtgatttttggatggaaatgggatcggggtggacggttggatggagattgatggtgcttggttgattggaatggaattattagagaggagaaggttttataggttgaggcttgcaagttgggactggaccagagtgtgactgtgcgagggcaggagcagtttcgcagtgactgattggaacctgctgtagtgctgtggggaactgtcgcctcgcctatcagaaatggtctccacaaatgttttccgttctacctttttgaaaagtctcaaattattacatttttgtggctttacctgaaattgtggaaatgtaataacacgcttgttttttttatcctatgatcatcatcagggt

SEQ ID NO: 89978 - DNA, 650 bp, Zea Mays
gcacctcacttcctctccctccctcactcggccaaagctgactacagcctacaagcgaagcgctagaagagctcttcccgatagccatggccaagcccccgcttcaaacggctgcgatcatcctcctcgtactcctcgcggccgcgtcgtgcctccacaccgtcgatgccgccactttagggttctgttggggcaagtgcagcgttcggtgcgcgggggcgaccgcgcggcaggcgcgagccgcgtgcatgagctcctgtggcctctgctgcgaggcatgcaactgcgtgccgcacgacatccatgactgcccctgctaccgcaacatgctcaccgccggccccaagaagaggcccaagtgcccctgagactgagactacgaggtcgactcacacggcggcatcaatgggactgcgactgctgcctgcaactgcgatccaatccatgctgggccagacaacctattatgttatggatccagatacttatatggttgttagattttttttgttattttgttgttagatttttggttttatttgtttggtagtgaataagtagaatgcaggatctactatgcatatttgtattttgtttttagcattgagctagttatgatttttttttcaaaaatatcaaatttgtgatct

SEQ ID NO: 89979 - DNA, 380 bp, Zea Mays
gcacctcacttcctctccctccctcactcggccaaagctgactacagcctacaagcgaagcgctagaagagctcttcccgatagccatggccaagcccccgcttcaaacggctgcgatcatcctcctcgtactcctcgcggccgcgtcgtgcctccacaccgtcgatgccgccactttaggttgcaggcccagtgttgagcggtaccagaacatcctagtacaccaaggcacgacggtggagattggctttctgattcctagcatggactatcgccatgcagatcaaatcgaccatgcacatagtcctggcagtctggcactcaaacatgcagcgacggagtgtgcaatggaaaaagtcgtcatgcatattcaaacctga

SEQ ID NO: 89980 - DNA, 257 bp, Zea Mays
gtttatgaaatggatgaacttgaggctcttgcaagaaatatttcatttgaggatgaagacctagatgatgatgatcatgatgatggacctgaggcatcgttgtaagcttgttgatgaagatctagatgataataatgtaccatgaatgctatgaatgtttcttattgtacttgctccgtaatgttttgtgaccttgcgaacttgggattgtggacttgtggctttgtgaactttatgatgaacttgttatattgtgt

SEQ ID NO: 89981 - DNA, 483 bp, Zea Mays
atgcctgcgaaaaggaaaccgtcgctccccttctacatatataaatgcatatgtcctcgctcctgcttctccatcaccagaccagaccatccatcttcctcacgcacaggcgcacagcccttccccgtgcagtgccacaactccgtcgacgccgtcaagccaagtcgagatccatggtcacgacgtcctacaccgccatcgccggagctctgttgcacgcaggtgagcccctccttcatcctctctcccctgcatccctctctacgatcggccatggccagagttccctccgtaccctccctcgacccgttcctgggcgagcgcgcgcgcccccctggccgcggctccccgtgtccgttgtgccacctcgcccctgcgaccggcgtgcactgccccggcgaatcccctgccgcgcgcgcgcgccagggcacggtctccatggccggtgagccatcacgcgagcctcggtccaagtcccggtga

SEQ ID NO: 89982 - DNA, 354 bp, Zea Mays
atggagaaaaccgagcaggggcgccgcgatggagggacttggccggcgctggggacgacggagcagaggacgcggccaggaagcaggcgctcgcacagggagctaggagatgccgtggctggcgagctggagttgagcgcggcgagatggggcgcgcgcagggagcttgacgacggccgggcagagagaacgctgcgagctgagcgactgggcaccgagctggaggagcgccggagatgcagcttggtcgctgtgaagaagaagggtgcggcctccaggaaatatcgcccgcggcgcctgggaaaaatctgccgcggaagaagattaaggagggagagagagagcggtgaatag

SEQ ID NO: 89983 - DNA, 1378 bp, Zea Mays
aggtctcttaaccccttcttttttctgcccatcagagttatttcccaaggacttgccacaaaatccgatctagtttttcgtaatcgattagttaacatggtggttaaccgtattatgaaagacgggaaaaatcattggcttataaaattctctatcgagccatgaaaaagattcaacaaaagacagaaacaaatccactattggttttacgtcaagcgatacgtagagaactcccaatataggagtaaaacaagacctaataaaaaaggatcgacgcagaaagttccgattgaaataggatctaaacaaggaagagcacttgccattcgttggttattagaagcatcccaaaacccacaaccccttggggttatcctgcgcttagaagaagaactaggaaaaggaaaaaatatagtgatagttttattctttgtcgccgtaagtaaatacgtaactaggaatatggaaaattgcatttttggaatttgcaataatgcgatgggcgaacgacttgaattgaacccgcgcatggtggattcacaatccactgccttgatccacttggctacatccgccccctatccagctaaaggattttctctttttttccattcattattattctatttattctgacctccatacctcgatcgagatagtgcacataggatgccactctttaaaatgaaaaaaggagtaatcaattgtgacacgaaaaaaacgaatccttttatagctctcatttattggcaaaaatcgaaaaggtcaatatgaaggaggagaaagaaataatagtaacgtggtcccgggcatctagcattctacacgcaatggttggccatacaatcgtgattcataatggaaaagaacatatacctatttacataacaaatcctatggtaggtcgcaaattgggggaattcgtgcctattcgacatttcacgagttatgaaagtacaagaaaggatactaaatctcgtcgttaattgaattcagaatagaaagattcagaataaacaaagaaatacccaatatcctgttgatattcctttttatttctcatcaaacgaatggcatattcctctcctagctattcttagcatgatattggggaatctccttgctattactcaaacaagcatgaaatgtatgcttgcatattcgtctatagggcaaatcggatatgtaattattggaataattgttggagactcaaatgatggatatgcaagcatgataacttatatgttgttctatatctccatgaatctaggaacttttgcttgcattgtattatttagtctacgtatcggaactgataacatttgagattatgcaggattatacatgaaagatcctagcagcatcattatccctt

SEQ ID NO: 89984 - DNA, 153 bp, Zea Mays
atgagggtatggatcctcaagaagcagttcatgcagcttaaaacaaacaattatgctcacatgaaaaagcgctacgaactggacctcagacagagggcgggaaggatggggtacaaggtgcaaacatcggtcaagaattttcagataacataa

SEQ ID NO: 89985 - DNA, 714 bp, Zea Mays
ttatattttaacaggtacacaactttattataaaattaatgtgactggaacgatacaaaatggatttttaacgtgaaatatatcgaataaataacaatctcgtggattagacgatgtggtgcatttctattggctcaagatttgccacacaaaaggttataaagaacataatcgcagaagatcccaagggtgggatctcgtgtggccactaccttctcctatctctccctatcgcatgatctggcagttgcacgaaagaaaaaaaaatccaggagcaggggaacggccatcgttggcctccaggggttggggcacgccaccggtgagccgcggtcggccgtggcggggctacaggctgggctcgccatggctgtttgccgtgcccgcgcctaagccgccgttcagcggctccaggcccgtgagccggtactcgcgctagccggtgcagtgcggcagcacctgagccacgccgaccgcagggccacgcccacggccgggctagaggcacccgcacgctggcagggttgccgcgaccgcgcgcacgctggccgcgcctggccacgagcaagggcccgcagtacctacggggaagaaggctggggaagacagagaaggggtttctcacctgcgttgagagagctccggcgacggcgcagtgcaggggtggaagggcgccaggtgtgagggagatggagggctgctacgttctgggaa

SEQ ID NO: 89986 - DNA, 917 bp, Zea Mays
ccgagcccctacgttccaagtccaaccaacccattccccaattcagtatcaggcctttgcgaattgcgacagcgagagcgggaagaggaaactcgaaactcggcgagcgggatggcaaccggcccggagcacgtggcggcggcggtcgaggagacgccggagaagaaggcggccagcacaaccgagctccccgcaccctcaggctggacgaagaaggtttgcctttacttcccgcttggccggccccttccaatttccccgcatgctctccgcccgctgcttgcttcgggcccgggtgttgcggttccgaggactccaggggcctgctagcgctcggatccgtggggttcgggctccgtctctgcgaattccgttgcggttcttcctcaccgagcggtcggagctgggggcgtcgagttctagggtttcgggctcgattgattcatgtcgttcgcgggggcgtttcttgttttgcttagtcttaaggtcatgcgaacacagctataggttaggagcttgatttgagctcactgttcgagtttgtgattggcttgcaacatccgagtcccaacccgtgtgcgggtgcgagtgcgagtgtagtagactggagttttgtagctctccctattgcagcatctgattctgagtccatttctgtagatgtattaggttctccatgccgttgcccgttggattgggagccgatttttagctgtagtccgggatgctacgtttgccctttgtttttggacgaacagaacatggccgtttttgcactgtacaagtaactttagactttatagctcttgatagtgtgttttagttcttatttggtccttacaaagcagtatgggtggatcctaacattgtttgccatcgctgtgcaatctattttatctcatgttatgtctcttaaa

SEQ ID NO: 89987 - DNA, 1673 bp, Zea Mays
ccgagcccctacgttccaagtccaaccaacccattccccaattcagtatcaggcctttgcgaattgcgacagcgagagcgggaagaggaaactcgaaactcggcgagcgggatggcaaccggcccggagcacgtggcggcggcggtcgaggagacgccggagaagaaggcggccagcacaaccgagctccccgcaccctcaggctggacgaagaaggttgctccaactcgaggtggacgatttgaggttatttttgtttccccaactggtgaggaagttaagagcaagagacagctaacccagtacctgaaagctcatcctggaggccctgcatcctcagagttcgattggggaaccagtaggcatctagtttcatcatttttttgtcatctcttcttagttctcgtttggtactagtaggtttcccaatattcaatgtcttgctgctgcctctaaaaagcttgtaagcaggtgatactcccagacgctcagcacgcttgagcgagaaggtcaaggcaactgagagcccagagggtgagaagacccctaaacggggaagatcaagttctaagagaggcaaaaaggaggaaaaagaagacacagaggctgcaaatgaggctggagaagatggtgcttcggaggaaggtaaaggtacagatgtggagatgaaagatgctgaaaacgctgaagacgagaagaaagaggtcccaaatgcagatgctgcagagaagactgaggaaggtgaagataagaaagaggaggcccctgctgtagatgcagcagagaagactgaggaaggtgaagataagagagaggaggaggcccctgctgtagatgcagcagagaagactggtgagaaagaggtggcccctgctgtagatgcaacagaggagacagaaaaaagcaccgaaggccaagcacagcctaattatgttgctgccccagaatctgagtataaaggagacggaaagccaggtgaatccgaagcagctccccttgcatttgttgatgaaacagctccccatgtaattattggtgaagagaagaaagaggaaaatactgagaatgagaacagtcaggcagccgaatctgccgtgccttccctggcatctttagagggagagaagaaagagaatggtggtgcccctgaacaaccagccctgcctgtagctgagacgaaggcagatgctcctccggcagaggcagaaaagggggctgaaaattcaggccagccgaataccggctctcaagaaccgaaggcagcaaactgcgacgaggggcagattcaacctggtgcctctgctgtgaggtgcacataagggagcttgatctcagatgggactctgttgcgttatgtctttaggacgatacctcgcatttgctttgagaattgtaatcgtggttaacctgacagcgctgtgtagcactaggctgcccagcacgtagttatcctttcgtttcttttataacggtggtgttgcagcatgggtaatgggccggcctgtgctgcctcagccaccactgcatacccagtgtaagtgtaactcgttattagcgtggtcgacattgatctgtggagaggactgcaggacagtactgtcctcgacagctgtaacgttacgttttgtgtgttcccttgtgttattgaacttatattatgatccataaataaa

SEQ ID NO: 89988 - DNA, 1618 bp, Zea Mays
ccgagcccctacgttccaagtccaaccaacccattccccaattcagtatcaggcctttgcgaattgcgacagcgagagcgggaagaggaaactcgaaactcggcgagcgggatggcaaccggcccggagcacgtggcggcggcggtcgaggagacgccggagaagaaggcggccagcacaaccgagctccccgcaccctcaggctggacgaagaaggttgctccaactcgaggtggacgatttgaggttatttttgtttccccaactggtgaggaagttaagagcaagagacagctaacccagtacctgaaagctcatcctggaggccctgcatcctcagagttcgattggggaaccagtgatactcccagacgctcagcacgcttgagcgagaaggtcaaggcaactgagagcccagagggtgagaagacccctaaacggggaagatcaagttctaagagaggcaaaaaggaggaaaaagaagacacagaggctgcaaatgaggctggagaagatggtgcttcggaggaaggtaaaggtacagatgtggagatgaaagatgctgaaaacgctgaagacgagaagaaagaggtcccaaatgcagatgctgcagagaagactgaggaaggtgaagataagaaagaggaggcccctgctgtagatgcagcagagaagactgaggaaggtgaagataagagagaggaggaggcccctgctgtagatgcagcagagaagactggtgagaaagaggtggcccctgctgtagatgcaacagaggagacagaaaaaagcaccgaaggccaagcacagcctaattatgttgctgccccagaatctgagtataaaggagacggaaagccaggtgaatccgaagcagctccccttgcatttgttgatgaaacagctccccatgtaattattggtgaagagaagaaagaggaaaatactgagaatgagaacagtcaggcagccgaatctgccgtgccttccctggcatctttagagggagagaagaaagagaatggtggtgcccctgaacaaccagccctgcctgtagctgagacgaaggcagatgctcctccggcagaggcagaaaagggggctgaaaattcaggccagccgaataccggctctcaagaaccgaaggcagcaaactgcgacgaggggcagattcaacctggtgcctctgctgtgaggtgcacataagggagcttgatctcagatgggactctgttgcgttatgtctttaggacgatacctcgcatttgctttgagaattgtaatcgtggttaacctgacagcgctgtgtagcactaggctgcccagcacgtagttatcctttcgtttcttttataacggtggtgttgcagcatgggtaatgggccggcctgtgctgcctcagccaccactgcatacccagtgtaagtgtaactcgttattagcgtggtcgacattgatctgtggagaggactgcaggacagtactgtcctcgacagctgtaacgttacgttttgtgtgttcccttgtgttattgaacttatattatgatccataaataaagccataagcgtggcagggtcattccctgaccaccttcaggcatcaccatttgttggcc

SEQ ID NO: 89989 - DNA, 1272 bp, Zea Mays
acggccggcagctggcagctgcgacttccgagttgcgatcacaatcacaccacaaggccagagtcagtcggtgaggtcagtgagaggcgaaggaggagaggagaaatgggagggctcagatcgaggatcctcaggaccttgcagtccttccccaacgccgccgcgcagtcgtccaacctcctcgcgctccctcccggtgccggcccctcggcccagccgcctgcgacgccgtgcggcctcctccaagaaccggcgccgcaggaggcgctggtcgatgaagcggggcctgcgcccgaggtgcccggccgtggaggcgatgacggcggcggcggcgacgacgacaaggagaacgtctcgccgggtatcaccacgcgtaaggccaagaagttgaagctcagctcggatcaccgtgacaaaagctcgggcctcggggcggagcccgctgatggcgacacgcgctaccgccggccggacctcgcctcggcgacgctcttcgacccggacctcctcgccgccttccgccgcgccgtagacgcctacgcgcgggccctcgagatggccaaacgccgcaacggtggcgaggacgaggaccgggacggcggcgaaggaggaccgggcgtcgcggatgatcccctggaggcgttcgagctgcggtgccctcccggcggcgagcgcgcggtggtgctctacaccacgtcgatccgcggcgtgcgcaagacgttcgaggactgcgcccaagtgcgccgcctgctggagggtctccgcgtcgccttcctggagcgcgacgtctccatgcacgctgcctacagggaggagctccgggcgctgatggcgcgggggcaggaggacgcgttccccgtgccgccgcagctcttcgtggacggccggtacctcggcggcgccgaggaggtcgtggcgctgcacgagcggtcccagctccggtccgcgctccgccgtgcggcgcggcgcggcgcgggagagggcccgtgcgcggtctgcggcggcgcgtggttcgtggtgtgcggcgggtgcggcggcagtcattggctccatgacgccggcggcggcggcgtcgcggccaccggccgcgtgccgtgctccgcgtgcaacgagaacggcctcgtgccatgtcctctctgcagctagcggaagcgtatagtatgtgcacttgtgcagcaacttgatgagggaggcacatacaattttttttgtttattttgtcttgtgtacaatattccaatcctctaatccatattcggtgtttggtttttc

SEQ ID NO: 89990 - DNA, 3205 bp, Zea Mays
aggcgcggtggtgcacgccgtgttcaacactagaactaactcatctcttcctctccattgcattttcttcttcctccaaatacgtaacaaacttctacgtgagcgccagggcagttgcgcccatgggaaggcatccgcctgtcgatgaggcgatggacttcaacggcaacggacgggacgaggcaaacccgagcggctctgaggcggggaaccacaacgagcaccgcggcgacgacccctcgcgcgttggccagagcctgcccgccgatatccgccaaaatgggcagccaaccctcggggaggagatcaccgcgccgctgtgggaggagttcgaggcgctcggcatccacgtccgccgctccgagcccgtgttcccgccgcgcccagggtacggcgccgcggggacgccgtacgtcgtcagggccaacctcttcctcggtcgcctcgtcgacgaggccctgcatcagtacaacgtaaccatttcgcccgagccgacgcccaaggccgcgtacagagagatcatgacgaagctgttgtccgagaaccagcacacggatttcgacggccgcttctccgtgtacgatgacggtgactcgctcttcacagccggtgcgctgccgttcgacaccaaggagttcgaggtccccctctctgcaggcggcgacgaaaagatggacaggaagtacaaggtgatgatcaaccatgccgcaacgattagtctgctacagctgaggatgctgttagcgggctatcccacggacatccccgcgcaggcgctcgtggtcctcgacaccgtgctgcgtgacgtcttcaacgaacgcaatgacatggaatgcgtcgtgattgacaaaaaggatcgcacactgggtgttgacgcatggaaggggctctatctgagcatcaggccaacacagaactgcttgtctctgattgcagacgtgtcctcatctgtattcgttcaacccctgctattgattgaattcgttcagaagatcctaaagatagatgccgtggataggaacttgactaaacctgagtatgacaagctcttgaaggccctcaggggtgtgaggattcaagtcacacacagagataatagacgccgagtatggtcaaagaaaaaagataatagacgccaactctctacgtacagagttgctggcttgtcagtgaatcctactaatgatttgagttttgaatcaaaggttggagtcacaacgactgtgattgattacttcagagaaatatacggcctggaactgaaatacaaatatctcccatgcgtcaatgctggcagcgagcaggatccaatctattttcctatagaggtttgcaagatagctcccaagcagtgttaccagaagaagctggaaggtagtcagttttctactccaaggaagtcagcctggatccatcctgaagccgagcaatcctgtcctcagattgttgagcagaggcagtacaaacaaaccaaacgtgcaaatgaatttgacttagaatttgatggcaatcttacaacagttgctgctagagttctgctgcctccaaatcttaagtatgatgattctgtatcacagaaaacatggtttccactggatgggtactggaatatgaaagacaagaaagtaataaatggtgccaagatcagaaactgggcatgtcttaatttttgtgaagatttatccaaggaagatattaagaagttttgctttaagctggctgaaatgtctcgtattactggactggactttgccgatttgaagctcccaatattcactgcacgtccagatcgagttgaagatggtattcgtaggtgctatcaggaagcgaagaacaagctaagggatcagaagattgatttactgcttgctatactaccagataaaaaagacagtttatatggaaatattaaaaggatctgtgagacagatattggtcttgtgtcacagtgttgtcgaaggtcaagagtcttagtgaataataatcagatattggcaaatattgctattaagatcaatgccaaggttggaggaagaatctcagtattcgatgacgtacagaagagtttaccggttgtttcaaataagccaacaattatatttggtgctcatgtttctcacccttctgttgtagatggttctactggcccttctattgcttctgtcgttgcatcccaagactggcatgaggtgtctaagtataatggtgttgttcgtgcacaaggtcacactgaagagatcggtggccttgaagacattgtcaaggagctccttcatgcatttgcaaacgagtccaaggagaagctccagcagctgatattctacagggatggcataagtgagggtcaattcaatcgaattttggagaaagaaatcccagcgatagaaaaggcttggaacgcactgtatgacaatgagaagccacaaatcaccttcgttgttgtgcagaagaggcataaactgaggctgttccccgtggacgacaactataagatccgttctgctaagaagaaaattgttgagcctggcacagtggttgatagtgagatctgtcacccagcagaatttgatttcttcctttgcagccaatctggtggtatcaaaggcccaaggcgtcctgtgaggtaccttgtactgcgagatgataacaacttcacggcagatgaactgcaggctctcacaaataacctgtgctacacttattcaggcggcaatcgttcgttgtcggtcgctcctcccgcatactacgcccaaaagctcgcacatcgggcccgcgtctacctcgccaaaggctcggacaataatgcagctgctgctaatggtggtcggaagcaaattccagagataaagaatgagctgaaggggtccatgttctactgctagtcctttgcctgctgaacggacgatgcattgttctatagtgaaagacttgagtgtgctctgagtctctgactgacatctggagaaggatggcatctgcaatagtcgccgtgttctttttagtacactagaataaatggatgttttttgtggacgcccatgttgaactagttttcttttccagtaagtacttcagaatgagtgagataaatatatcattcagcgtctggtggtctggcattggaattcaaccagcatggcctgccttgttatccacctgattggttacccgcatcattttgatgctattaacattcacccaccat

SEQ ID NO: 89991 - DNA, 111 bp, Zea Mays
gccgccttctcctcgcctcccgtcccggcgttgacggttgccggcgagtcttcatcactgtcccgctcgtccgctcccctcgtctctcgatctgctcgtccgtaactgttc

SEQ ID NO: 89992 - DNA, 1477 bp, Zea Mays
ggtgtcccaacaaacagcggtttccttctcttctcttccgtttcgcgtattctattctgccatacccaacagcggtgggcatccaggatggggacgctcggcgcggcggccatggccacgctcctaaccgccgtcgtccttctcaccgtccacgtgccgctggccacggtggcgacagaccacgtcgtcgggggctcgatgtggtccatcccgctgcgcgacgacctgtacatggcctggtcgaacaacaggacgttctacgccggcgacaacctcgttttcaggttccagattgggttctacgacgtggtgcaggtgtccaggagggagtacgaggactgcaccaccgacgacccctacaacaacttccgcgtcccgcccgccgtcgtcccgctcgactataaaggcgtgcgctactacgtctgcagcgtcggcaactactgcaaacttggcctcaagttccatgtcacgatccaacaaggctagactgctcaccgttatgttacgctccacaaatgactattgtttcttagcagcacctttataacctgtaaaggacaaattatcaggcatcatcaatcaggccattccaagcttgttgattagcaaactacaggcgttacatgaaaataaatgtaccaacgatgtcattcagacagcaatgcaacagacattgcacccaaatgtgcgttataccgtagcattccagacattcaagtccccctatatatcgaaaccatcactctagcaaatcccacaaacagaagttaaaaggtacccagctatgcctgggtagcattttttatgttgcagcaaaaaaggatacattccccgcttgcgaggtcgattcagcttcctatttcccagctcggcgacagcaaaaccagagatcactcccatgctttaagggcaccacccctcccaattgccttgatgatagtctgcttactgttgcgcgcactgcactctctgggctccgcccggcatctcgtcgtcctcctcgtacgcctcctgggcagcgtgagcttgcttcctgcgcatctcttcctcgatgttgttcacatcatgcatagtcgtctcctcgcattcatctatctccatgtctgtcagcttggatgaaggccttggtggaagtactgtctcgagagccttgcactgctctggtgccaacgagtcagggaactccaccgtgaaatggatgtacagcttccccttcatgaaaggcctctggtaaattggcatcccctcatcattaatcgccttgaattggtctgctcaaatttagcagacaaggattacaaatacagttgcagaagtgagaattgagatctataagaaaaaaagggggcttaccaggtttaacaacttcaccagggtctgatttgatgagaagctgcctgttgtccagatgtgtaagaacaaattggaacccacatagtgcttcggtcagagacaaggtgtgctcatagaagagatc

SEQ ID NO: 89993 - DNA, 1738 bp, Zea Mays
gaagggacgaaaagcgcagacaagagagagaaatcggaatccaagcgcaaccaaaagagaagagggcagacacgagggagcgcgtggggggagagggcatggtctctctcgtcccggcagtcccgtctcaagcaaaagctctctcctcttcttccgctcagtgcaccaatcactgcaacatactggcctgaggtcattgagttggtgaaagggaaggagggggtatcatgggcatctcatccaagtggattaaatccttggttggcataaggaagcaagaaaaagcgcagaatgcagaaaagcaagaaaaagggtggaacgctgagagcagtgaaactaaacattctttggatcccggagctgcacttgcagtcgaagaaattacagtacaaagtgaagcattgactgataacaaaagcgcacaaatggtttcaaattcatttttttcagacagtacaccgcttgatgtgcacatttctcaggctgaacatcatagtaacgaagatttggccgcaactgttgtccagtctgcgtttcgagcgttcttggctaggcgtgctttacgagctttgaaaggaatagttctacttcaagcccttattaggggccattctgttagaaggcagacagcagagacgcttcagtgtatgcaagcgctggtaaaagcaaaagctcgtgtccgagcaagacaagttcgtgttgccttagaaaatcaagtggcacggaaaaagattcctgaacaagatgatcatgagaaccatgtccgagaagtcgagggaggctggtgtggcagtattggttccatggaggaaatgcaagctaaagcactgaaaagacgagaagctgctgctaagcgtgagagggcaatggcatatgctttgactcatcagcggcaagctggttccaagcaacaaaattctttgagcctgcaaggtcttgaacttggtgagaaccactgggagtcaaattggttagacaggtggatggctgtacgtccatgggagaacaggttacttgactgtaatgccaaagagagtctgccaacgcatgaagataaggatgaggaagcaaattctcagatcacaccaaagggtaaagtgtcaacttcaaatactcctggtctgagcaagaagaaaggtgttaaccacaaaaagtcatattcagatgttagttgtacttcatttgcacgaccagcaaatgtattaccatccacatctttaggatcatccaaacagaaggcaaaggctgtgggtgaagtttttgaggaagtcagctcccagccaacagatataggttctaaggatgtgcacaattcaaaagataagcttgtgcaagtgaatggaccagccaagaagcggttatccctcccaaataatgttggcagagaatcagggaagggaccaacccgcaggaattcgcttaacaggtctgctccaaaagcacgggcggactctcctaaccagggtgatgagttagaggcctgataacacattcctccaatttgacgtcggcaagccatcctaaagtgtgcttctccaggttgcccataacgtaacattcccaaacgatatcatgcagctagatttgggttgtgattcatatttctgttgtgtaatgctgtggtgtgttgtgccttgtgtggccttttattccgcatcgccaattttcttatgtttccagcttccctgtaagttgttctaactgctgaaactaaaagaaggaaatgtgctgtattgtg

SEQ ID NO: 89994 - DNA, 1871 bp, Zea Mays
gaagggacgaaaagcgcagacaagagagagaaatcggaatccaagcgcaaccaaaagagaagagggcagacacgagggagcgcgtggggggagagggcatggtctctctcgtcccggcagtcccgtctcaagcaaaagctctctcctcttcttccgctcagtgcaccaatcactgcaacatactggcctgaggtcattgagttggtgaaagggaaggagggggtatcatgggcatctcatccaagtggattaaatccttggttggcataaggaagcaagaaaaagcgcagaatgcagaaaagcaagaaaaagggtggaacgctgagagcagtgaaactaagagctctgctaatcaatcactgcacaaacggaaacattctttggatcccggagctgcacttgcagtcgaagaaattacagtacaaagtgaagcattgactgataacaaaagcgcacaaatggtttcaaattcatttttttcagacagtacaccgcttgatgtgcacatttctcaggctgaacatcatagtaacgaagatttggccgcaactgttgtccagtctgcgtttcgagcgttcttggctaggcgtgctttacgagctttgaaaggaatagttctacttcaagcccttattaggggccattctgttagaaggcagacagcagagacgcttcagtgtatgcaagcgctggtaaaagcaaaagctcgtgtccgagcaagacaagttcgtgttgccttagaaaatcaagtggcacggaaaaagattcctgaacaagatgatcatgagaaccatgtccgagaagtcgagggaggctggtgtggcagtattggttccatggaggaaatgcaagctaaagcactgaaaagacgagaagctgctgctaagcgtgagagggcaatggcatatgctttgactcatcagcggcaagctggttccaagcaacaaaattctttgagcctgcaaggtcttgaacttggtgagaaccactgggagtcaaattggttagacaggtggatggctgtacgtccatgggagaacaggttacttgactgtaatgccaaagagagtctgccaacgcatgaagataaggatgaggaagcaaattctcagatcacaccaaagggtaaagtgtcaacttcaaatactcctggtctgagcaagaagaaaggtgttaaccacaaaaagtcatattcagatgttagttgtacttcatttgcacgaccagcaaatgtattaccatccacatctttaggatcatccaaacagaaggcaaaggctgtgggtgaagtttttgaggaagtcagctcccagccaacagatataggttctaaggatgtgcacaattcaaaagataagcttgtgcaagtgaatggaccagccaagaagcggttatccctcccaaataatgttggcagagaatcagggaagggaccaacccgcaggaattcgcttaacaggtctgctccaaaagcacgggcggactctcctaaccagggtgatgagttagaggcctgataacacattcctccaatttgacgtcggcaagccatcctaaagtgtgcttctccaggttgcccataacgtaacattcccaaacgatatcatgcagctagatttgggttgtgattcatatttctgttgtgtaatgctgtggtgtgttgtgccttgtgtggccttttattccgcatcgccaattttcttatgtttccagcttccctgtaagttgttctaactgctgaaactaaaagaaggaaatgtgctgtattgtgtttatgtgttgaagtttctcgggaacttcgatcctgcttttgcagttgcagaacaccatcctctgattgtataccttcgagtgcaatcattcaggtcaaa

SEQ ID NO: 89995 - DNA, 1146 bp, Zea Mays
gctgaaccaaacaggctcctcctctcttgagaaactgcggtcgttcttcactggagccagcttggtcggttcgtttaccaccaaagcgccccgcaaaatctcgccgccgaccgccatggcagccgccgacgagacgcgtccgctgctcgttgctatatctctcgccgtagccgcctgctgcctcgcgcagctggcggtgggggacacgaacggcgtctacgagccgtgcagtgacgcacggatccagcgcggggacggcttcaccttcggggtggtcttcgccggatacaacgccttcttctccggcaacacacagctctccccctgcgaccgccgcctcaacctcgctgcctccgggcagctcgccgtcttccgccccaaggtcgacgagatctccctcctcaccatcaacaccactaccggattcaacccagcttcagctggtggattcatggtagcatttgccggcaggaagtatgcagctagatctattccgatatttgtatccaacacctcagtcacagtgtccagcttcacactggtacttgagttcaacaaaggcagactccaaaacttgcactggaagaaggacggctgtggcgcttgctccggcaagtcgaacttcgtctgcctcggcaaacagacatgcgccatcaggacgcagagctgcaagagccaagggcccgtcgactgcagcgtcggcatccagctggctttctctggcacggacaagcacgagtcggttctgaactcgtggtacgaggtctccaacctgaggcagtactccctctacgggctctactccaacctcaaggacaccctgagcggccagttcaacaagatcttctaggctgttttggtgctgccattgtttattctctcctgctcccatcccgatcattattaatcctgttttggtacttgtatccagattccagaccagttttaaccctgtctcagctcaaccgtatgtaccattgcccgttggtgtcgttttagtgcctaacaagatttatgaattttgtgatgagctagctactgtcctgccgatgactatgtttgcttccaaaggacacggcttatcgtcgctgatataccaggtattatgttataaatcacatggactgcctattaagttcgttgaat

SEQ ID NO: 89996 - DNA, 1038 bp, Zea Mays
gctgaaccaaacaggctcctcctctcttgagaaactgcggtcgttcttcactggagccagcttggtcggttcgtttaccaccaaagcgccccgcaaaatctcgccgccgaccgccatggcagccgccgacgagacgcgtccgctgctcgttgctatatctctcgccgtagccgcctgctgcctcgcgcagctggcggtgggggacacgaacggcgtctacgagccgtgcagtgacgcacggatccagcgcggggacggcttcaccttcggggtggtcttcgccggatacaacgccttcttctccggcaacacacagctctccccctgcgaccgccgcctcaacctcgctgcctccgggcagctcgccgtcttccgccccaaggtcgacgagatctccctcctcaccatcaacaccactaccggattcaacccagtacttgagttcaacaaaggcagactccaaaacttgcactggaagaaggacggctgtggcgcttgctccggcaagtcgaacttcgtctgcctcggcaaacagacatgcgccatcaggacgcagagctgcaagagccaagggcccgtcgactgcagcgtcggcatccagctggctttctctggcacggacaagcacgagtcggttctgaactcgtggtacgaggtctccaacctgaggcagtactccctctacgggctctactccaacctcaaggacaccctgagcggccagttcaacaagatcttctaggctgttttggtgctgccattgtttattctctcctgctcccatcccgatcattattaatcctgttttggtacttgtatccagattccagaccagttttaaccctgtctcagctcaaccgtatgtaccattgcccgttggtgtcgttttagtgcctaacaagatttatgaattttgtgatgagctagctactgtcctgccgatgactatgtttgcttccaaaggacacggcttatcgtcgctgatataccaggtattatgttataaatcacatggactgcctattaagttcgttgaat

SEQ ID NO: 89997 - DNA, 1357 bp, Zea Mays
ccctctcctcgctacctatgtcctcgttcgctgcctggccgcgccagcgccacccctcctcctctagcagtcctctctctccgctcgtgtgctggtccatcgcctgcctcctcggtttgtcctgaatccttggaccgacgcacgcacacaagctcagctcagctcaggctgctgctgctggattctttggtgttccatcaggccaaggatcccgcaaagagctccggagccaagcctgctgcagccgtcgcgtcgggtgaggcaggcttcagcttcagtctcctactcgacgaggcaagcggatcggagcgggcctccgctccgccatgatgagcttcaagggccacgaggggtttggccaggtggccgccgccggtgccgggagccaggctgcctcccatggtggagcaggcccgctgccatggtgggcggggccccagctgctgttcggcgagccggcgcccccgtcaccggaggagacgcgccgggacgcccagttccaggtcgtgccgggggttcagggcacgccggatccagcgccgcccaagacagggacacctgaggtcctcaaattctctgtctttcaagggaatttggagtcgggtggtaaaggagagaaaaccccaaagaactctaccactattgctcttcagtcaccgttcccagaatacaatggccgtttcgagattggtcttggtcaatctatgctggccccttccaattatccttgtgctgaccagtgctatggcatgcttgcggcttatggaatgagatcgatgtctggtgggagaatgctgttgccactaaatgcgacagctgatgcacccatctatgtgaatccgaagcagtacgaaggcatcctccgccgtcgccgtgctcgcgccaaggcggagagcgagaacaggctcgccaaaggcagaaaggtgaggagactctcttcttgtacctctgggtgaccggcggcttaacttttccctactttcatggcacccatttgcgatgtgctcgatcgcaaactttactgtcaccattttgacctgtgaccagtggtcgctgtgctgttcatgccgcagccctatctccacgagtcgcgccacctccacgcgatgcgtcgggtaagaggcaccggcgggcgcttcgtcaacacgaagaaagaagggcgtggcacgggcgttgcttcgaacgggggcagcaagacggctgcagcggcaccgtcgcgcctcgccatgccccctagcttccagagtagcgtcgccagcctgtctggctccgacgtgtcaaacatgtacagcggcggcttggagcagcaccttcgggcgccgcacttcttcaccccgctgccacccatcatggagga

SEQ ID NO: 89998 - DNA, 1593 bp, Zea Mays
ccctctcctcgctacctatgtcctcgttcgctgcctggccgcgccagcgccacccctcctcctctagcagtcctctctctccgctcgtgtgctggtccatcgcctgcctcctcggtttgtcctgaatccttggaccgacgcacgcacacaagctcagctcagctcaggctgctgctgctggattctttggtgttccatcaggccaaggatcccgcaaagagctccggagccaagcctgctgcagccgtcgcgtcgggtgaggcaggcttcagcttcagtctcctactcgacgaggcaagcggatcggagcgggcctccgctccgccatgatgagcttcaagggccacgaggggtttggccaggtggccgccgccggtgccgggagccaggctgcctcccatggtggagcaggcccgctgccatggtgggcggggccccagctgctgttcggcgagccggcgcccccgtcaccggaggagacgcgccgggacgcccagttccaggtcgtgccgggggttcagggcacgccggatccagcgccgcccaagacagggacacctgaggtcctcaaattctctgtctttcaagggaatttggagtcgggtggtaaaggagagaaaaccccaaagaactctaccactattgctcttcagtcaccgttcccagaatacaatggccgtttcgagattggtcttggtcaatctatgtctggtgggagaatgctgttgccactaaatgcgacagctgatgcacccatctatgtgaatccgaagcagtacgaaggcatcctccgccgtcgccgtgctcgcgccaaggcggagagcgagaacaggctcgccaaaggcagaaagccctatctccacgagtcgcgccacctccacgcgatgcgtcgggtaagaggcaccggcgggcgcttcgtcaacacgaagaaagaagggcgtggcacgggcgttgcttcgaacgggggcagcaagacggctgcagcggcaccgtcgcgcctcgccatgccccctagcttccagagtagcgtcgccagcctgtctggctccgacgtgtcaaacatgtacagcggcggcttggagcagcaccttcgggcgccgcacttcttcaccccgctgccacccatcatggaggacggcgaccacggtggtccccccacccgcatctcctcctccttcaagtgggcagccagcgacggctgctgcgagctcctcaaggcgtgaaccgacgaggaggaggggatggctactcagacgaacggccttctcgccgatggctggtcgtctgtaggcaaatcattcttggctgttccgcattggggtgcaacctcatccacatcatctacctacccagtaggccagtaccccctgttccctgaacagtgcttgggttacaggggtcctcctgtgtgtgtgatgatgtggtgtgcctcccccacatgcatttgctgtaacataatagtgtacccaaaccactgcttcggactatcattgtctgtctcggtatggattctctgttgtcacagtgtctgaataattgaggcgtcagacttcaaagttgctccggttcttggagatgggtatgtttgaagct

SEQ ID NO: 89999 - DNA, 1665 bp, Zea Mays
ccctctcctcgctacctatgtcctcgttcgctgcctggccgcgccagcgccacccctcctcctctagcagtcctctctctccgctcgtgtgctggtccatcgcctgcctcctcggtttgtcctgaatccttggaccgacgcacgcacacaagctcagctcagctcaggctgctgctgctggattctttggtgttccatcaggccaaggatcccgcaaagagctccggagccaagcctgctgcagccgtcgcgtcgggtgaggcaggcttcagcttcagtctcctactcgacgaggcaagcggatcggagcgggcctccgctccgccatgatgagcttcaagggccacgaggggtttggccaggtggccgccgccggtgccgggagccaggctgcctcccatggtggagcaggcccgctgccatggtgggcggggccccagctgctgttcggcgagccggcgcccccgtcaccggaggagacgcgccgggacgcccagttccaggtcgtgccgggggttcagggcacgccggatccagcgccgcccaagacagggacacctgaggtcctcaaattctctgtctttcaagggaatttggagtcgggtggtaaaggagagaaaaccccaaagaactctaccactattgctcttcagtcaccgttcccagaatacaatggccgtttcgagattggtcttggtcaatctatgctggccccttccaattatccttgtgctgaccagtgctatggcatgcttgcggcttatggaatgagatcgatgtctggtgggagaatgctgttgccactaaatgcgacagctgatgcacccatctatgtgaatccgaagcagtacgaaggcatcctccgccgtcgccgtgctcgcgccaaggcggagagcgagaacaggctcgccaaaggcagaaagccctatctccacgagtcgcgccacctccacgcgatgcgtcgggtaagaggcaccggcgggcgcttcgtcaacacgaagaaagaagggcgtggcacgggcgttgcttcgaacgggggcagcaagacggctgcagcggcaccgtcgcgcctcgccatgccccctagcttccagagtagcgtcgccagcctgtctggctccgacgtgtcaaacatgtacagcggcggcttggagcagcaccttcgggcgccgcacttcttcaccccgctgccacccatcatggaggacggcgaccacggtggtccccccacccgcatctcctcctccttcaagtgggcagccagcgacggctgctgcgagctcctcaaggcgtgaaccgacgaggaggaggggatggctactcagacgaacggccttctcgccgatggctggtcgtctgtaggcaaatcattcttggctgttccgcattggggtgcaacctcatccacatcatctacctacccagtaggccagtaccccctgttccctgaacagtgcttgggttacaggggtcctcctgtgtgtgtgatgatgtggtgtgcctcccccacatgcatttgctgtaacataatagtgtacccaaaccactgcttcggactatcattgtctgtctcggtatggattctctgttgtcacagtgtctgaataattgaggcgtcagacttcaaagttgctccggttcttggagatgggtatgtttgaagct

SEQ ID NO: 90000 - DNA, 2120 bp, Zea Mays
cagcgtcagttaccacgacgaccgatcttgctcgccagcgagagcgacccctcccctccctacttcccatgctgatctcggcgcgcttctcttcctcctcccccagagccgggcactgatttcccttggctgctgctgctggattctttggtgttccatcaggccaaggatcccgcaaagagctccggagccaagcctgctgcagccgtcgcgtcgggtgaggcaggcttcagcttcagtctcctactcgacgaggcaagcggatcggagcgggcctccgctccgccatgatgagcttcaagggccacgaggggtttggccaggtggccgccgccggtgccgggagccaggctgcctcccatggtggagcaggcccgctgccatggtgggcggggccccagctgctgttcggcgagccggcgcccccgtcaccggaggagacgcgccgggacgcccagttccaggtcgtgccgggggttcagggcacgccggatccagcgccgcccaagacagggacacctgaggtcctcaaattctctgtctttcaagggaatttggagtcgggtggtaaaggagagaaaaccccaaagaactctaccactattgctcttcagtcaccgttcccagaatacaatggccgtttcgagattggtcttggtcaatctatggtaatataagcttatccttttataccttctattctgaaattattacagtttcaaaatcatttctttgaatcccttcggtgttgatctgccaactgatttctttgcaaaaggaaataaaaaaaaatacttgaccaagtttctttccagctggccccttccaattatccttgtgctgaccagtgctatggcatgcttgcggcttatggaatgagatcgatggtatggtctgtttgttttcagaaaacagtgttctactttgttgcaccgtgtccttaagtatttgcgtgaacatagtactatttcctagcaagcttttgcaccaagatttttttcgcaccaaaatactcagatcacatgtattcttgctacaatcatgcatgtaaacacaaagatcacctgattaatatatatgctcgaactttaccttatactattattatatagcttcattgaataaaagagcaagtacaggttatgaagcatgatactgacagcatcgctgaaatttctaataaacgccagaactctaatggccttttgttttttcttccccacatgtaacgtagtctggtgggagaatgctgttgccactaaatgcgacagctgatgcacccatctatgtgaatccgaagcagtacgaaggcatcctccgccgtcgccgtgctcgcgccaaggcggagagcgagaacaggctcgccaaaggcagaaagccctatctccacgagtcgcgccacctccacgcgatgcgtcgggtaagaggcaccggcgggcgcttcgtcaacacgaagaaagaagggcgtggcacgggcgttgcttcgaacgggggcagcaagacggctgcagcggcaccgtcgcgcctcgccatgccccctagcttccagagtagcgtcgccagcctgtctggctccgacgtgtcaaacatgtacagcggcggcttggagcagcaccttcgggcgccgcacttcttcaccccgctgccacccatcatggaggacggcgaccacggtggtccccccacccgcatctcctcctccttcaagtgggcagccagcgacggctgctgcgagctcctcaaggcgtgaaccgacgaggaggaggggatggctactcagacgaacggccttctcgccgatggctggtcgtctgtaggcaaatcattcttggctgttccgcattggggtgcaacctcatccacatcatctacctacccagtaggccagtaccccctgttccctgaacagtgcttgggttacaggggtcctcctgtgtgtgtgatgatgtggtgtgcctcccccacatgcatttgctgtaacataatagtgtacccaaaccactgcttcggactatcattgtctgtctcggtatggattctctgttgtcacagtgtctgaataattgaggcgtcagacttcaaagttgctccggttcttggagatgggtatgtttgaagct

SEQ ID NO: 90001 - DNA, 1626 bp, Zea Mays
cagcgtcagttaccacgacgaccgatcttgctcgccagcgagagcgacccctcccctccctacttcccatgctgatctcggcgcgcttctcttcctcctcccccagagccgggcactgatttcccttggctgctgctgctggattctttggtgttccatcaggccaaggatcccgcaaagagctccggagccaagcctgctgcagccgtcgcgtcgggtgaggcaggcttcagcttcagtctcctactcgacgaggcaagcggatcggagcgggcctccgctccgccatgatgagcttcaagggccacgaggggtttggccaggtggccgccgccggtgccgggagccaggctgcctcccatggtggagcaggcccgctgccatggtgggcggggccccagctgctgttcggcgagccggcgcccccgtcaccggaggagacgcgccgggacgcccagttccaggtcgtgccgggggttcagggcacgccggatccagcgccgcccaagacagggacacctgaggtcctcaaattctctgtctttcaagggaatttggagtcgggtggtaaaggagagaaaaccccaaagaactctaccactattgctcttcagtcaccgttcccagaatacaatggccgtttcgagattggtcttggtcaatctatgctggccccttccaattatccttgtgctgaccagtgctatggcatgcttgcggcttatggaatgagatcgatgtctggtgggagaatgctgttgccactaaatgcgacagctgatgcacccatctatgtgaatccgaagcagtacgaaggcatcctccgccgtcgccgtgctcgcgccaaggcggagagcgagaacaggctcgccaaaggcagaaagccctatctccacgagtcgcgccacctccacgcgatgcgtcgggtaagaggcaccggcgggcgcttcgtcaacacgaagaaagaagggcgtggcacgggcgttgcttcgaacgggggcagcaagacggctgcagcggcaccgtcgcgcctcgccatgccccctagcttccagagtagcgtcgccagcctgtctggctccgacgtgtcaaacatgtacagcggcggcttggagcagcaccttcgggcgccgcacttcttcaccccgctgccacccatcatggaggacggcgaccacggtggtccccccacccgcatctcctcctccttcaagtgggcagccagcgacggctgctgcgagctcctcaaggcgtgaaccgacgaggaggaggggatggctactcagacgaacggccttctcgccgatggctggtcgtctgtaggcaaatcattcttggctgttccgcattggggtgcaacctcatccacatcatctacctacccagtaggccagtaccccctgttccctgaacagtgcttgggttacaggggtcctcctgtgtgtgtgatgatgtggtgtgcctcccccacatgcatttgctgtaacataatagtgtacccaaaccactgcttcggactatcattgtctgtctcggtatggattctctgttgtcacagtgtctgaataattgaggcgtcagacttcaaagttgctccggttcttggagatgggtatgtttgaagct

SEQ ID NO: 90002 - DNA, 2330 bp, Zea Mays
cagcgtcagttaccacgacgaccgatcttgctcgccagcgagagcgacccctcccctccctacttcccatgctgatctcggcgcgcttctcttcctcctcccccagagccgggcactgatttcccttggctgctgctgctggattctttggtgttccatcaggccaaggatcccgcaaagagctccggagccaagcctgctgcagccgtcgcgtcgggtgaggcaggcttcagcttcagtctcctactcgacgaggcaagcggatcggagcgggcctccgctccgccatgatgagcttcaagggccacgaggggtttggccaggtggccgccgccggtgccgggagccaggctgcctcccatggtggagcaggcccgctgccatggtgggcggggccccagctgctgttcggcgagccggcgcccccgtcaccggaggagacgcgccgggacgcccagttccaggtcgtgccgggggttcagggcacgccggatccagcgccgcccaagacagggacacctgaggtcctcaaattctctgtctttcaagggaatttggagtcgggtggtaaaggagagaaaaccccaaagaactctaccactattgctcttcagtcaccgttcccagaatacaatggccgtttcgagattggtcttggtcaatctatggtaatataagcttatccttttataccttctattctgaaattattacagtttcaaaatcatttctttgaatcccttcggtgttgatctgccaactgatttctttgcaaaaggaaataaaaaaaaatacttgaccaagtttctttccagctggccccttccaattatccttgtgctgaccagtgctatggcatgcttgcggcttatggaatgagatcgatggtatggtctgtttgttttcagaaaacagtgttctactttgttgcaccgtgtccttaagtatttgcgtgaacatagtactatttcctagcaagcttttgcaccaagatttttttcgcaccaaaatactcagatcacatgtattcttgctacaatcatgcatgtaaacacaaagatcacctgattaatatatatgctcgaactttaccttatactattattatatagcttcattgaataaaagagcaagtacaggttatgaagcatgatactgacagcatcgctgaaatttctaataaacgccagaactctaatggccttttgttttttcttccccacatgtaacgtagtctggtgggagaatgctgttgccactaaatgcgacagctgatgcacccatctatgtgaatccgaagcagtacgaaggcatcctccgccgtcgccgtgctcgcgccaaggcggagagcgagaacaggctcgccaaaggcagaaaggtgaggagactctcttcttgtacctctgggtgaccggcggcttaacttttccctactttcatggcacccatttgcgatgtgctcgatcgcaaactttactgtcaccattttgacctgtgaccagtggtcgctgtgctgttcatgccgcagccctatctccacgagtcgcgccacctccacgcgatgcgtcgggtaagaggcaccggcgggcgcttcgtcaacacgaagaaagaagggcgtggcacgggcgttgcttcgaacgggggcagcaagacggctgcagcggcaccgtcgcgcctcgccatgccccctagcttccagagtagcgtcgccagcctgtctggctccgacgtgtcaaacatgtacagcggcggcttggagcagcaccttcgggcgccgcacttcttcaccccgctgccacccatcatggaggacggcgaccacggtggtccccccacccgcatctcctcctccttcaagtgggcagccagcgacggctgctgcgagctcctcaaggcgtgaaccgacgaggaggaggggatggctactcagacgaacggccttctcgccgatggctggtcgtctgtaggcaaatcattcttggctgttccgcattggggtgcaacctcatccacatcatctacctacccagtaggccagtaccccctgttccctgaacagtgcttgggttacaggggtcctcctgtgtgtgtgatgatgtggtgtgcctcccccacatgcatttgctgtaacataatagtgtacccaaaccactgcttcggactatcattgtctgtctcggtatggattctctgttgtcacagtgtctgaataattgaggcgtcagacttcaaagttgctccggttcttggagatgggtatgtttgaagcttgcttggaggtctgaaactttgtgcttggtcactcaagaatcaagatgctgagttattgc

SEQ ID NO: 90003 - DNA, 361 bp, Zea Mays
atgaagattgaagaacagaactacacaaaagaatacctccagaagatgaactcatgccaacgaaaaaatctggatttctggagtccgtcggtgaagtccggaactggaagttggaagaactggattcgcacgtgctggaactcgggattggattcacgcgtgctggaacttggaaatctagagtggactttggaagcctggattccagaacaagaactcaagaagagccgccgagcaggtagggaattagggaaataaagagaagacagaagtggtggcttgcgttcggtgttccatcttcagtagaggtggctggcgtttcaactgccagtagtcgggccgcccgccaaaaaagcccacg

SEQ ID NO: 90004 - DNA, 1294 bp, Zea Mays
gaagccattatataggaaaaataaccactatattagcaagtcgacgactagtcaactgacttatcgactagttaccaagtcggtaccttgtcgactcaacttatcgaccaaatcggtaccttgtcgactcgacttatcgacttgaaaacctttagcagaagattagtttcagcgtcgatgtaatttagggcattcgatgtatgtagattagctagagttcaaagtcatctggcaaaagtggacaattttggttttcaatcaatagaatcacatgtttcatgtaaagagaaaaggacagaaatctatccccttcacaaaatgttaattgatgctctcctaaggtacaaacggaattcatatcctcaaatccctcacaaaaaattgaagacgccgctgccttttttcgcccaatcaggctgcaggatctctgctctcctccgcaactgccgcctcagccacctgcttattctggcctaagtctgacggacgcggcgctgcctcggccgccgccgcctccttctggccttcctccgacgccgcggagtcggaggcggcttcttgggcctgaaaggcctcgaggtccgcagccatggcgcgctcggcccggaggataggctcgtagtaggcggcgtgcgcgtccatgcacttccgcagcgcggccgtgacgtcttggcaccgctccacgacgtcaatgctggcatccgcggcatccgtctcctccacgcacttctcccacgcgacgaactcgtccttgcagccgccgcccttcatgaagagacagaacccgcactccccttgctcctcctcctcctcctccccctcccctgctccgctggccaccgcggaggcatcgatgaccaccgtctcagcggcctcttccgcgccgcctccaacagaaggagccgccgccgcatcgtctgcgccgccgccagctgcggcggtcgcggcgtcggaggcggagtgctggtgatcttctttggctggtgtagcggtggcctccggggaaggaggatcaggacgggaggcggctgtgtctagggaaagcgagggagaaggagaagcggcggttcccattgagctagggttcgggggctagcagatcgcggcggctgcgagactgtgatagggcgacgaacaaaagctagttatgatctgtaacgactaatgagtccgtcgataggggtgggcctaaacgtgtacaataccccatctattgaagaaacaaagcccaggccagcctagcccatatccattttgtaaaggtcattacgttctcatggaatggaaatgttaa

SEQ ID NO: 90005 - DNA, 3627 bp, Zea Mays
ccttccttccgtcgcggcccgcctccttcactacaaccaggacaggccaacgcggaagcccgtcctccccacccccttccagatttgcagctcgcacctcgcgaatccccgaattccccactgcctcgccacgccgcgcgctgaccgcggcacccggagccccacctgctattcccgaggcggaggacccatcctgccttggcgctcgttcctccctcgtgatcggcgccgcgggcgaatcgcgctgcccggtgggggggaatctagggttccggccatgccggcctagtcgtagggcgggggtaccggcctgcgtcgccggcgcgcgtggagatctcggtgcctccgaaccctggcgggggccggggaggccgcagctgctgaggcatggacgtggactcgcgcatgacgacggagtccgactccgactccgacgcggcggccgcggccgcccgcgggggcaacgccggaggttccgggtccgggagcgagacctcctcgtcgtccgcgccctcgacgcctgggacacccgggacgcccgcggcggccccgaatccggcgccggtcggcgctgtgggtccgaggccagcacctgggtacacggccgtgaacgcggtgatcgagaagaaggaggacgggccagggtgccggtgcgggcacactcttaccgcggtgccggctgtcggggaggagggcgcgcccgggtacatcggaccgcggctgatcctgtttggtggggccacggcgctcgaaggaaactctgccacgccgccctcttcggccgggagcgcggggatccgtcttgctggtgccacagcagatgtccattgctacgatgtgtcattgaacaagtggagcaggcttaccccacttggcgagcctccttcaccaagagctgcacatgtggcaactgcggttggaaccatggtggttattcagggtggaattggtcctgctggtttatctgcagaggatcttcatgttctagaccttacacagcaacgaccacgatggcacagagtggtggttcaaggacctggtccaggtccacgatacggtcatgtgatggccttggttgggcagagatttttgttgactattggtggaaatgacgggaagcggcctctggcggatgtatgggcccttgatactgcagctaagccatatgaatggaggaaacttgaaccagaaggtgaaggaccacccccatgcatgtatgccactgcaagtgcacgctcggatggacttctcttactttgtggtgggagggatgcgaatagcgtgcccttatcaagtgcatatggtcttgcgaaacatagagatgggcgctgggagtgggcaattgcccccggtgtctctccatcacccagataccaacatgcagctgtttttgtgaatgcacgtcttcatgtgtccggaggtgctcttggaggtgggcggatggtggaagactcctcaagtgttgcagtactggacactgctgctggagtctggtgtgacacaaaatctgttgttacaactcctaggacaggaagatttagtgcagatgcagcagggggtgatgctgctgttgagcttacacgacggtgcaggcatgcagcagctgctgttaatgatctcatattcatttatggaggtttacggggcggggtacttctggatgatcttcttgtggccgaggatcttgctgctgctgaaacaacaaatgctgctaatcatgcagcagcaaatgcagctgccacaaatttgcaagcaggacgaacacctgggaagtatgcgtataatgaacaaacaagacaaacaattacagaatcaggtcctgatggggctgtagttcttgggactccagttgcacctcctgtaaatggggacatgtatactgatatcagtcctgagaatgcggtgctgcaaggacagaggagattaagcaaaggcgtggattacttggttgaagcatcagcagcagaggcggaggcaatcagtgctacattagctgctgtgaaggccaggcaggttaatggtgagatggagcagttgccagacaaggagcagtctccagactccacatcaactagcaaacattcaagcctcatcaaactggacagtgctctttctaacaacttggcagctccacctggggttcggttgcaccatagagccgtcgtggtcgctgcggaaactggaggtgctctaggtggcatggtcaggcagctttcaattgaccagtttgaaaatgaagggagaagagtcagctatggcaccccagagaacgcaactgcagcaaggaagttgctagatagacaaatgtctattaatagtgttcctaaaaaggtaattgcatctctgttgaaacctcgtggctggaagccccctgtccggaggcagttcttattggactgcaatgaaattgcagatctttgtgacagtgccgagagaatattttcaagcgaaccaagtgttttgcagcttaaagcacctgttaaaatatttggagatttacacggacaatttggagatctgatgaggttattcgatgaatatggtgctccttcgactgctggtgacattgcttacattgattatctattcttgggggattatgtagatcgtggccagcatagtttagaaactatcactcttcttctcgcattgaaggttgaatatcctcaaaatgtacacttgattcgaggaaatcatgaagctgcagatatcaatgctttgtttggtttccgaatagagtgcatagaacgaatgggtgagagagatggtatctggacatggcatcggatgaataggctatttaattggcttcctttggctgcgcttatagaaaagaaaatcgtttgtatgcatggtggcatcggtcggtcaatcaaccatgttgagcaaattgagaatcttcaaaggccaattacaatggaagctggctcggttgtcctcatggatcttctgtggtctgatccaacagagaacgacagtgttgaaggactgaggcccaatgcccggggtcctggtcttgttacatttgggcctgatcgggttatggagttctgcaacaacaatgatcttcagttaattgtacgagcacatgagtgtgtgatggatggatttgagcgctttgctcaaggtcacttgatcactccttcattaacaacaaaataaggaggtactgcaaataatgccggagcgatcttggttttgggtagagatcttgtggttgtgccaaaactaatccatcctttgccccctgcaattacgtcacgtgaggcgtcgccggatcatattgaggacacatggatgcaggagctaaatgctaacagaccaccaactccgaccagggggcgtccccaagcagtagctaatgacaagggttctcttgcctggatatagtagattgaccacacattggttggtatgattcatatgaagcctgagtggtctggatcttgttattttcatttgtgttcgggagaggggctggtcgacagccgtaccgaaacgaaagattgatgtacaggggagcataaagactataaagttggtagaagggagcttaatctattttcttctctctccaattcgtttcattgaacacgagtagcaaacgaatcaagctgattcatcaga

SEQ ID NO: 90006 - DNA, 1638 bp, Zea Mays
acacaatcgaccaccgtctctgttctcccctcacttgaggcctccccacacgccgccgcattcggacgctcgcctcccaaaaccccacgaagagatgcatctgccgccgctgcggcgtgtaccggcggcgctgctagtgccggcgcgcggcctcctcgaggcgcgcgtgccgtgggtgcgagaacgggccctcgaccacgtcgtggagcgggagcgccacctggtgccgtttctcctcgccaaggacgtgctccttgccgccacgccgccgccgcacgccgtgccgctgcactcgctgccctccacaatccctttcccgttccgcccgctgcgcttcctgcggctctacccctcggcgttcgcgctctcgccgcaccccatcgaggtctccccgacgccccggctctcggcgctccacgccgccgaggcgcaggtcgtcgacgccaccgtccccgacgcggctgaccgcctgcttcggctgctcatgctcgccccctctcgcgcgctcccgctccgcctcgtcgcgcgcctccggctcgacctcggcctcgcgtccgacttccaacgctcgctgctccccaactacccggactacttcgcgctctccccggacggcagcctcctcgagctcgtctgctacaggaaggatctcgccgtgtcgtcgatgcagtcctacgcgcagcgcaccggcggctacaaggtcggcgacgtggtcgccttcccactctcgttccccagaggattcgagcttgacaagaaggtgcgcaaatggttagacgagtggcagaggctgccgtacatttcgccctatgaggatgggtcgcacctaacgccaaggagtgacataacggagaagaggaccgtggcggtgctgcacgaggtcctgagtctcacggttgggaagaagatggagaaggaggtgttggtcaagcttggggaggcgctgcggttgccaccaggattcaggaaggtggtggctaagcaccctgggattttctacatatcgcacaagctgaggacacagacggtagttctcagggaatcataccggaggcatatgcttgtggacaagcaccccatgatggggataaggtatcagtatatgcatttgatgcatatggggaaggaggaagttggaaagggcaagggcaaagatcgaaggagtagtcgcagtgaacaaatcatcggggaggagtttggtgccacagtggatgatgatgaaaatgaggagtatgatgatgaagacgacgtggctgaagatgacatggaagtgggtgttgcttctgaggatcaggacagtgacgacgatgttgatgaggatataaaggaacaaatttctcattgattttttgagttgggaagtgtcaaccacacttcaagtggtggtgctcgtacatctctttgttggactgcatgaatgtgcagggaacacagaaatacagatgtacaatcaatcctggtgacaggtggaggagcaaataagttagcagttcaaacaaattgcaccgttcttatgctagactgctgtaagaaacctttcccattgtaaccaaatttgtttctagaatctagatctgtggcaaaaatacaagaagccttttgcaactgaaactgaataaagcatatcttttggcgttt

SEQ ID NO: 90007 - DNA, 1872 bp, Zea Mays
gaccgcgagcccgcgaggatccccactctctcgctcgctctcctcacagtcacacactcgtctcgagcgccgcccgccggccccaaacttccaagcaaacccttggcgccgtccacggccatggatttccgccggccgccacgctcctcgtcgggcggcgtggagcccaagatccgccaggtcgggttcttcaccccggacgcctccgcgccgtccgagctcctgcccccctctgccgcggtcccggcgccatcgtcacagcagaggtcggccggggggtcgccgccggcgtctgaagacctctccccggccgactctcccccgtcatgatccctcccccgcgccacgtcgacaacctcgccccgggcccaccctcccccgcggtcctcgccacttccgcgccggtgctttcgtccccgcgcctcaacgttgcgtccgagatcggagacaacgactcctggccacgcgtgccttctgctgtggagctagaagaaaacaagcgttggtttggctgaaatacagaatgatggtgctccagcctccattccacaaaagcagaaaacctcaaaggcagagagacgtgcaattcaggaggctcaacgtgctgctaaagcggcaacgaaggaggcagataaatcaggaaaatctgctggtgctgcaatctccaagcaagccaagccagtaaaaactgttcagaagaaagatgtgccccaagctgcaagtacagttgtttctgagaagaaggctactgaacgtcctccagaaagagaaagaaagttagatgctcctcatccccgcatgcagtttgatgatgtgcataaggtggagaaagcaaaaaaacgtgcggtagtcaaccaatcagaagctcgaaatagagttgaactgttcaggcatcttcctcagtaatcgcatggcactcagcttcctgacctcgaatcaaaattctttcaactagaaccaatgcatccttctgtatacaaggttgggctccaatatttatctggtgaagtatctggtggtaatggtcgttgcatagcaatgcttcttgcattcagagaggcaataaaagattacactacgcctccaaataaaactctcggcagagatctttctgcaaaaatcagtagttatgtgtcatttcttattgagtgtaggcctctttcaatcagcatgggcaatgctattaggtttctaaagagcaggattgcaaagctggcacatgcattgtcagagtctgaagccaaaactagtcttcagtctgatattgatcgttttataaatgagaagatagttcttgcagataaagttattgtcagccatgccatcacaaaggtcagagacaatgatgtcttactgacatatggatcatcatcaattgttgaaatgattttggattatgctcatgaacttgggaggaactttcgagttgtagtagtagattctcgcccaaagcttgagggacagggattgctgcagagcttaggccctgttcgtttgcatcggattacacccggaatcatttcatctaaacaaagtttatataaattagagaagcaatccgattaggaattattctgacctatcaatccggtggaaacgaacaagaccttagtgggaaagggcatcagctgcacatacacacacataaatgccatctcatacatcatgcatgaagtaactcgagtcttgttgggtgcctcttcaatattatcaaatgggacagtttattctcgagttgggaacttgggactgcatcggttgccatggtggcacatgcatttggagttctagttctggtttgttgtgaggcatacaagtttcatgagagagtgcaacttgattctatatgtgctaatgagcttggtatggata

SEQ ID NO: 90008 - DNA, 896 bp, Zea Mays
gtcagatgccctttgtacacatgtatataaaggagatctctgcaataaacagaacaacttggtcatttgtctcattctctcttttgtctctccactgattcaccactgagcactgcaagagattgcaacacgttatcagcactgtctcaaggagaaatcagagaagggaaagaggaagaacacgctgttcttgacaagaacagcaagatcgatctacacatcaacagcaaggtatggagcataccgtttccatgcgcatacgtcgtatgcgcgaagttcttcatattgttgatgatgcgatgttggaagcgttcaccgttgggcaagccactgcactaccaccggtgcatgagatccctgaacgccgtgtgcaagtgcaaaatgtgcacttctgcgttctccatggatggacagcggtggttccgctgccggtggtggagtgcggactcgccattgcatccccttcaccaccggtgccggtggttgacgtgggatcgtctgcatccgctcccatggacgtcgatttggaggcaccgccgcagcctccgcccactgcaacagcagttactcgtcgttcaccatctccgtcggcacccgtggtcgtcgggaccattgctgctcgtcgtggacagcccccgcgcgccgtcgatgctccgcgcggacgcatcatcctcactggccatcgcccaaatggggtggccccatcttcctcctccaatgggagggcctaatggccctcgatccggccgccacgacagccgtttggggggagggggtggggaagaggctcggcccctgcgcgggcagtggaggagcgcgctcagcgcggcgctgctcctcgacgtggagcagtggtcgggcggcggctcagcaaggcccgaggtcgggcctggcgc

SEQ ID NO: 90009 - DNA, 1730 bp, Zea Mays
catcatatcgtatcagctcagtcataaagcgcggccagatcacctgcttccgcattaccccacccagaatagcaagtacactgtacaccagcgcatgcgccgttctccaatggccgcctcctccactctcttctcgctctccctcgccctcttgctccacctccacgccgcacccgcgagctcgacgcccaccgcgctgccagtcgaagccagagaggacgcgccgacgccggagctgccggaggcagagctagcggccatctttcaggtgatggcggatcttctcggcgacccgacgtggccacagctccacccgcggccctgcaccgatacgccgtggccgggtctacagtgtgagcttgcacccgacgacgcgcgcgtgctccgtgccacccgcctccacctgggccccgacgtcgccaccccgtcctgcaggcccggggctagactcgacccagtctcgctgcgcggcctaccgcatctccggacgctctctatcttcagctgcttcggcgccgcccaagcccccgtcgagctgccgcccgtgctattcacgtcgttgtcctcgctcgagcagatcgtggtcaagtccaaccccggcctcaccggccccgtaccggcgacgttgggcagcctgcggagcctccgcgtgctcagcctctcgcagaacggcttccgcggcgggatccccagggagctcggcggcctcgccgcgctgcagcagctcgacctcagctacaacaacatcaccggcgagatccccgaggagattggtgcgatgtcgagtctgacgatccttgacctgagctggaacagcatcggcggcggcgtgccggcaacgctgggcaagctccagaggctgcagaaggcggacctgagctacaaccgcctcgccggccgcgtgccgccggaggcggggtcgctgcgggagctggtgttcctggacctgagccacaacagcctcgcgggcccgctgccgagctcgctggccggcctgtccaggctgcagtacctgctgctgcaggacaaccccctcggcacggcggtgccggcggtggtcgggtcgctgcggcggctgcaggtgctgggcctgtccgggtgcaacctgacggggcccatcccgcgcggcgcgttcgcggcgctggccagcctcacggcgctgtcgctggaccggaaccggctggacgggccgatcccggcgagcctggccgcgctgccccaactgggacagctcaacctcagccagaaccggctggccggggagatcgcgctgccgggggagtttgtcgcgcggctcggcaggcgcctcgacgtccggggcaacgacgagctgtgcgtcggcaggggcctacagggtagcggctatctgggagcgcccccgtgcgtggacagccacaacggcgacggatcgccggaaatatcaggtgctgctgcggcggccgtcggcctattcgacgggtcggcgtgtcatctttttgtgtcgtgtctggcgttcgtgttccagttgcgatgtgacatgtaactccggtcgctttctccgcccgactgctgcgacgcgagttttttcctggcacgttgaccgttttacggcgtccagtgttcggctggtgccattattctcgttgccaaatgccaacgcccatcgagtaacatggcggccatactcacgtcttacctcattagtgagttaattaactttgtttcaagtttcttgaaataatttttttgtt

SEQ ID NO: 90010 - DNA, 1269 bp, Zea Mays
atgtctttcaagattcagctattgtcctccattgccatttttgcttttgccttgcatcttcacccttgtgtgtccactgagtttcgccgtgagctctccagctggaccactggcatagctacgtggtatggcgatgctaatggcgccggaagtgaaggtggtgcatgtgggtaccaatatgctgttgaccaaccaccgttctcgtccttgattgctgccggcagccccttcatctatgactctggcaatggatgtggctcttgctatcaggtggtatgctctagcaatcaagcttgctctggttacccggtgactgttgtcatcaccgaccagggccctggtggtggcccatgcctgagccaagcaagcgatggcatgtgcatgaatgagggagcccactttgacatgagtggaactgcatttggcgccatggcaaagcccggaatggccgatcaactccgtgctgctggcctgctacaaatccaatacactcgtgtgcagtgtgaatggcctggagttgatgtaaccttctctgttgactccggctcgaacccgaactatctggctgtgctcatcgagtacgaggactgcgagagcgatctttcagccgtcgacatcatgcagagctcagcagggcaatgggtgccgatgcagcattcgtggggtgcaatctggaggctcgactctggctctgctcttcagggcccgttccacctccgcttgacgttcagctcaggccgggtactcatagccagcaatgccatacctgcaggatggaatgcgggtgtggcgtaccgggcaggcggagtggcggtgactagggccaggcccaggagtggtggcagccaggccggtgaggctgctgctggaacatttagaggtttggtgtatcaccttctgatgtttgtggtattggcgttgtgaattatgatgcaaatgcatctttggtagtttagaggtgtaaatttaacaaatttaggactacccagggattttagatgtgcattttgatgttttcttgtagctgaggtctgagaggggggagtgatgttaacgtttttgttgtggttgagttatcagcatgcaactgatcaggttggatggtagtccttgcatgtaaatacacatttggtgaaactgtttaggttaagtctttagttcctttatggaagagatgtcttctttctagctttttatttgatttcgaggtgtttttcatggatcgaataccactagtcattgagttagtaaacaaattgtttttctgac

SEQ ID NO: 90011 - DNA, 1644 bp, Zea Mays
atctagcaaactgcaaaccaggtcatctctgaatttccccaacaaagagcgagcataaaccccgctatacccgcttccttctctccaatctccggtgctcgcatcccgctccgcctccatgcgccgcggcagttccacgacgccagtcctctcacctctgtcctgacccaacacccgggcggctggaacccgcaggtgcgcttagtgccgctcgaggaggctcgccgtttgctggattcgttctgtcctttgccggccggcattgtgccctccgcggcggcgacaggggcgtgcgcggtgctgctgtaggggagggtgacggccatctccctggtcggccgcggcccgggctggtggcgtgcggttgcgtctcgactctgctttttaccgttgcttgctactctatctaccgcctgtacaggtctactgaaattccactattctgccgttgtatgctttgtgctgttgttgagcagaggaagacggattcacaaagcacggtgctccccaagtctagcagggtgtgttgtatggcttccacgctccagctgttgttttccattgccatcacagctttggcctttttcctccacccatgcgcatcgactgatgagttccaccgtgagctctacggttggtccaatggcatcgctacatggtatggcgcagctgatggcgctggaactgacggtggtgcgtgtggataccagaatgctgtggaccagccacctttctcatccatgattgccgctggctgctcttccatctacgactctggcaagggctgtggctcttgctatcaggctgtatgcaccggcaatgacgcttgctccggtaacccggtgactgtcgtcatcaccgacgagtgccccgattgcccgtgtcctgatgagcaggtccacttcgacatgagcgggacagcgttcggtgccttggcgaagcccgggcaggagagccagctgcgtggcgccggcgccatccaaatccagtatacccgggtgcagtgcgagtggcctggcgtggacgtgaccttctcggtggagccgggctccaacccgaactacctggccgtgctgatcgagtacgaggatagcgacagcgacctcgactccgtggacatgatgcagacgcagggcgggacgacggggcagtgggtgccgatgcagcagtcgtggggcgccgtgtggaagatcaactccggctccgtcctccagggccccttcaacatccgcctcaccttcagctctggcagggcgctcgtcgccagcaacgccatacctgcggggtggaacgccggcgtcgcgtaccggtctggcggcgtggctgtgacgagggccaggcccaggagcggtgcctgccggggctacgaggctgccgggacactggatggtttggtgcatcgtcacctcgtcgtgttgttgttactggtgttattgacgctgtgagccgagatgcgatgcaattttgctggttctgggagcgtgcgagtttgggctacatggactgagtagctctgtgtatttttcttgcatcgcatcgtagtggatggattactgcgtcgtattgtggacatgtctggtggttatcaaatgtccgtccatataatactccttccacctcaaaataaataaaatttcagaagtc

SEQ ID NO: 90012 - DNA, 1531 bp, Zea Mays
atctagcaaactgcaaaccaggtcatctctgaatttccccaacaaagagcgagcataaaccccgctatacccgcttccttctctccaatctccggtgctcgcatcccgctccgcctccatgcgccgcggcagttccacgacgccagtcctctcacctctgtcctgacccaacacccgggcggctggaacccgcaggtgcgcttagtgccgctcgaggaggctcgccgtttgctggattcgttctgtcctttgccggccggcattgtgccctccgcggcggcgacaggggcgtgcgcggtgctgctgtaggggagggtgacggccatctccctggtcggccgcggcccgggctggtggcgtgcgaggaagacggattcacaaagcacggtgctccccaagtctagcagggtgtgttgtatggcttccacgctccagctgttgttttccattgccatcacagctttggcctttttcctccacccatgcgcatcgactgatgagttccaccgtgagctctacggttggtccaatggcatcgctacatggtatggcgcagctgatggcgctggaactgacggtggtgcgtgtggataccagaatgctgtggaccagccacctttctcatccatgattgccgctggctgctcttccatctacgactctggcaagggctgtggctcttgctatcaggctgtatgcaccggcaatgacgcttgctccggtaacccggtgactgtcgtcatcaccgacgagtgccccgattgcccgtgtcctgatgagcaggtccacttcgacatgagcgggacagcgttcggtgccttggcgaagcccgggcaggagagccagctgcgtggcgccggcgccatccaaatccagtatacccgggtgcagtgcgagtggcctggcgtggacgtgaccttctcggtggagccgggctccaacccgaactacctggccgtgctgatcgagtacgaggatagcgacagcgacctcgactccgtggacatgatgcagacgcagggcgggacgacggggcagtgggtgccgatgcagcagtcgtggggcgccgtgtggaagatcaactccggctccgtcctccagggccccttcaacatccgcctcaccttcagctctggcagggcgctcgtcgccagcaacgccatacctgcggggtggaacgccggcgtcgcgtaccggtctggcggcgtggctgtgacgagggccaggcccaggagcggtgcctgccggggctacgaggctgccgggacactggatggtttggtgcatcgtcacctcgtcgtgttgttgttactggtgttattgacgctgtgagccgagatgcgatgcaattttgctggttctgggagcgtgcgagtttgggctacatggactgagtagctctgtgtatttttcttgcatcgcatcgtagtggatggattactgcgtcgtattgtggacatgtctggtggttatcaaatgtccgtccatataatactccttccacctcaaaataaataaaatttcagaagtc

SEQ ID NO: 90013 - DNA, 1526 bp, Zea Mays
atctagcaaactgcaaaccaggtcatctctgaatttccccaacaaagagcgagcataaaccccgctatacccgcttccttctctccaatctccggtgctcgcatcccgctccgcctccatgcgccgcggcagttccacgacgccagtcctctcacctctgtcctgacccaacacccgggcggctggaacccgcaggtgcgcttagtgccgctcgaggaggctcgccgtttgctggattcgttctgtcctttgccggccggcattgtgccctccgcggcggcgacaggggcgtgcgcggtgctgctgtaggggagggtgacggccatctccctggtcggccgcggcccgggctggtggcaggaagacggattcacaaagcacggtgctccccaagtctagcagggtgtgttgtatggcttccacgctccagctgttgttttccattgccatcacagctttggcctttttcctccacccatgcgcatcgactgatgagttccaccgtgagctctacggttggtccaatggcatcgctacatggtatggcgcagctgatggcgctggaactgacggtggtgcgtgtggataccagaatgctgtggaccagccacctttctcatccatgattgccgctggctgctcttccatctacgactctggcaagggctgtggctcttgctatcaggctgtatgcaccggcaatgacgcttgctccggtaacccggtgactgtcgtcatcaccgacgagtgccccgattgcccgtgtcctgatgagcaggtccacttcgacatgagcgggacagcgttcggtgccttggcgaagcccgggcaggagagccagctgcgtggcgccggcgccatccaaatccagtatacccgggtgcagtgcgagtggcctggcgtggacgtgaccttctcggtggagccgggctccaacccgaactacctggccgtgctgatcgagtacgaggatagcgacagcgacctcgactccgtggacatgatgcagacgcagggcgggacgacggggcagtgggtgccgatgcagcagtcgtggggcgccgtgtggaagatcaactccggctccgtcctccagggccccttcaacatccgcctcaccttcagctctggcagggcgctcgtcgccagcaacgccatacctgcggggtggaacgccggcgtcgcgtaccggtctggcggcgtggctgtgacgagggccaggcccaggagcggtgcctgccggggctacgaggctgccgggacactggatggtttggtgcatcgtcacctcgtcgtgttgttgttactggtgttattgacgctgtgagccgagatgcgatgcaattttgctggttctgggagcgtgcgagtttgggctacatggactgagtagctctgtgtatttttcttgcatcgcatcgtagtggatggattactgcgtcgtattgtggacatgtctggtggttatcaaatgtccgtccatataatactccttccacctcaaaataaataaaatttcagaagtc

SEQ ID NO: 90014 - DNA, 1302 bp, Zea Mays
cggactggaagccaaccgaagcaagaaagaggagaaacgtagcaagaaaccaactacgaacccaacaaccagagctcaaaatccaattttttttttttaaaaaaaaaactcccagcagaagaacaaccaagaagccaagaacctgtgacgcgagccatggactctggtccggtgcccacgcgcccaacaggaggttccgcagcggtggcttcgtcgtcttcatcactcatctttctgggcaccggctgctccggcgcgctccccgacgcgcgatgcctcatccagccgtcggagcctccgtgcaccgtctgctccacggccctctccctgccgccggaccggaaccccaactacaggtgcaacacctccctcctggtagattactgccacgacgatggagctcacaggtatatcctgatcgatgtcggcaagaccttcagagagcaagtcctccggtggttcgtgcaccacgaagtcccgtccattgactcggttattctcacgcacgagcacgcagatgctgtcttaggcctcgatgatctctgggtggcactaccgagctgtcagagaaacggtagtgccaaagttccggtttttctcacccaattcacaatggacagtgtggccgcaagattccccaacttggttgaacagaagctgcagggaggtgatgacttcgccagacctgctcagctccattggacgataatcgagggtgatgttgacaagccatttgtagcatcggagcttcagttttggccgttgcccgtcatgcatggagaggactatgtctgtttaggcttcttgttcgggaggaaagcgagagttgcatacttgtctgatgtctcaagaattctacctagaactgagcacgcgatttcgaagtctggtaccgccaccggacaagggcagctagatctactcatactagaaacaaacaggttgcatggggcgggagacggtcgcagttgccatttgactctgagccagagccttgacgctgtcaagaggatacgccctaaacgagctctgctgattgggatgaaccacgagtttgaacatcacagagaaaaccagctgttagcaagatggtcatgcagggaaagaataccagtgcagctagctcatgacggcctgcgtgtcttcattgatctgtgataacgcagtgttttagcaacactttgatgccaacttagctgttcggtactagtgggaagtccaccggtgcatattaattactcagtgatcactttgacaatttgctagagtccattgaaatcaaggctgtatttgtctttatct

SEQ ID NO: 90015 - DNA, 1550 bp, Zea Mays
cggactggaagccaaccgaagcaagaaagaggagaaacgtagcaagaaaccaactacgaacccaacaaccagagctcaaaatccaattttttttttttaaaaaaaaaactcccagcagaagaacaaccaagaagccaagaacctgtgacgcgagccatggactctggtccggtgcccacgcgcccaacaggaggttccgcagcggtggcttcgtcgtcttcatcactcatctttctgggcaccggctgctccggcgcgctccccgacgcgcgatgcctcatccagccgtcggagcctccgtgcaccgtctgctccacggccctctccctgccgccggaccggaaccccaactacaggtgagcgctgcgctcctacatagcatagcatagccaatcgctgttcagcgaacgcttctgctccaaataactgccagagcctcaaaacaaaactggtcttgacctagagaattctcgagttttacctgccctggaaatcggcaagagcatccggtgtctcacactgctacccgaaccgcgtttttggccgtgccgtgttggctggctattataggcacagctttgtcgccactcacgtctggtttcaggtgcaacacctccctcctggtagattactgccacgacgatggagctcacaggtatatcctgatcgatgtcggcaagaccttcagagagcaagtcctccggtggttcgtgcaccacgaagtcccgtccattgactcggttattctcacgcacgagcacgcagatgctgtcttaggcctcgatgatctctgggtggcactaccgagctgtcagagaaacggtagtgccaaagttccggtttttctcacccaattcacaatggacagtgtggccgcaagattccccaacttggttgaacagaagctgcagggaggtgatgacttcgccagacctgctcagctccattggacgataatcgagggtgatgttgacaagccatttgtagcatcggagcttcagttttggccgttgcccgtcatgcatggagaggactatgtctgtttaggcttcttgttcgggaggaaagcgagagttgcatacttgtctgatgtctcaagaattctacctagaactgagcacgcgatttcgaagtctggtaccgccaccggacaagggcagctagatctactcatactagaaacaaacaggttgcatggggcgggagacggtcgcagttgccatttgactctgagccagagccttgacgctgtcaagaggatacgccctaaacgagctctgctgattgggatgaaccacgagtttgaacatcacagagaaaaccagctgttagcaagatggtcatgcagggaaagaataccagtgcagctagctcatgacggcctgcgtgtcttcattgatctgtgataacgcagtgttttagcaacactttgatgccaacttagctgttcggtactagtgggaagtccaccggtgcatattaattactcagtgatcactttgacaatttgctagagtccattgaaatcaaggctgtatttgtctttatct

SEQ ID NO: 90016 - DNA, 167 bp, Zea Mays
cggccgccgcacgatgttgcggagcgtggcctcgttgctctccccgacgaacggggtgcgcccgtagatgagctcgtacaggaacacgccgtaggcccaccagtccacggccgcgccgtgcccgcccccgcgggccacctcgggcgccacgtactcgtgcgtgccca

SEQ ID NO: 90017 - DNA, 1021 bp, Zea Mays
ggcgcggcccggcgcttccaccgccgcagccgaaggagctgcagctccgggatcgggaggcaggtcggtgccggctccggcacgtcgtcgtccttgtcgcccacgacgctcctcgcgtcctccagagccggcgacgccgtcgactccagcgacaggtcgaagtccgtgagcatgatgtggccgtcgccgcgtatgagcacgttctctggcttgaggtcgcggtacacgatgcccatcatgtgcaggtactccagcgccaggagcacctcggcgccgtagaaccgcgcggacgcgagcgggaagcggcggcccggcatgcggtggcggagggagtggaggtcgccgccccggcagaactccatcacgatgcacgacaggtccgtgccggcgtcgaagtccgcgaacatggtgggcaggaacgggtggtccagccgccgcaggacgcgcttctcggccgcggcgcgcgccagcttccccttcttggcgagcgcgcgccggtccaccaccttcatggcgtactcgcacgcggacccctcgggggcctggctctggctctcgagacggcacaggtagacggtgccgatgtccccggccccgacgcggcggaggagcgtgaagtcccgcgggccgagcgcccggccccggatgggcgcccacgccacgtcgctcgcgcggtgcgggcgcgggggggaggacgacggcgtcgcggccgaagacgagtccacggagaacgtcgacgaccggtccgcttggctgctgcccccgctgctgctgctgctgcagcagctcgcggagctgacgctggaagccacgggcgccgcggcgtcggggtagggcgacggtgactgtggctctagcatggtgctgccggcgttgtttggaggcttgtgcggtggcgatgacgcgggtgcggcggtggacgaggaggccggagcggccattatatagcgatgcggttgcttctctgcgttggattggtagatctctggtttgctgtggtttttctaaatggaggtttgcg

SEQ ID NO: 90018 - DNA, 2307 bp, Zea Mays
agcccacctccgccctttcgggcagaaagagccagagagagagagagagaggtcggggccggggagcacacacccatcacccatggcctgactgacctccggactctccctgcttccgtccacgccgcgggccgcccagctgactgctcctgccctccgccatggcgtccgtcaagctcggctccaagcctgacgccttcaagcggcaaggccaggcatggttctgcacaacaggacttcctagcgatgtcaccgttgaggttggggatatgtctttccaccttcacaagttccctttactttcaaaaagcgcctttcttgaacggtcaattgaagaaaactctgaccaagaagaatgcatcatcaaactaaatgacattcctgggggtgccaagtcatttgagctagttgcaaggttctgctatggtgtgaaaatagagctttcacctgcaaatgttgtctacctacggtgtgcctcagagcatctagaaatgactgaagaagtagctgaggaaaacctgattgcacagtcagaaatgttcctcaaccaagtggttctccgtaactggaaagattccttggcagcattggaaacatgtgatgacctactcccccatgctgaagacctccagattgtgaacagatgcatcgagtcattggcatcaaaagctactagtaatccaaacctcttcggatggccgataagggaacatggcatgatgcaaagtcctggtggcagtgtactatggaatgggatcagcacgggtgcaaggcccagaaatttcaattcagactggtggtatggtgatgcttcatcattgagttttcccatgtataagaggttaatctccaccatggagtctcgaggcatccggcctgaaataattgctggttccttaacctactatgccaagaagtatcttccaggacttaggcgtcatagtcatagcatgggcacaatgcctcttactgctactctatctgaggttgaacaaaaaaaattacttgaggagatcgacaggcttttgcctcttcacaggggtatagcatcgacaaaagttctgcttgggctccttcgcactgccatgattctgaaagccagccccacgtgcatttctaacttggagaaacgaattggcatgcaactagaccaggccactttggaggatctgctgctgccaaatttctcctacacaatggaaacactgtacaatgtggagtgtgtgcacaggattcttgatcatttcttggcaatggaccaagcaaatggtggcgagtccccatgcttggatgatgtcatggcatccccatccttgacaccgatcacaagtgttgccaagctaattgacggctatcttgcagaaattgcaccagatatcaatttgaagcctccaaagttccaagctctggcctctgctattcctgaatatgcccggccactggatgatggcctttatcgtgccattgatatatacttgaaggctcattcctggctgtcagaagctgaaagggagcagttctgccggctgttggactgccagaagctctccctggaagcatgcacccacgccgcccagaacgagaggctgccgttgcgcgtggtggtgcaagtcctcttcttcgagcaactccagctaagaacctcgatcgcagggtgcctgctggtctcggacaacctcgaaggctccaggcctctgcggagcggcattgccacatccggcgaggctggaggctgggccacggctgtccgagagaaccaggtcctgaaggtcggcatggacaacatgcggacgcggctggccgagctggagaaggagtgctcgagcatgcggcaggagatcgagaagctgggcgggcgcgctggtaagggcggcggtggcgggtgggcctcccgcgtcgtgccccggcgactgggcctgaaggtgaggtcgcagatgtgcagcgcccaggagggctccgtcagtgagcagcacaggagcatgagcgccaagctcgacaagctgcaggctaaggtgtcgaagcagaagaagcagctggccgcggatgcctgaagttgaggtttcgagactccggcttcatggcctgaccttgtaattttagcccggtatcaattgtttttgcctctcttttgttgcctgtgtagctgttaggcgaaacgaccgagtgcagtgtgtcggttcgttcttgaaccgtggatggtaccaagaagaatgggagtgtcctagctaagaacacgaacctgatgtgatcagttaatagtttgttaccggtaaggaaaatgtcgcttgcttggttacttttgtgatc

SEQ ID NO: 90019 - DNA, 1940 bp, Zea Mays
aagaagccggcagagacacactgcacgcacacacagacagccatggcggtcgggggcgatgccaacggcggcggcggcggggtgcgtcagcgccagcgcgggtgttcgtgcaccaaggcggacttcttcccggaggagtcgttctcgagctggtcggcgtacgggcgggcgctgcgcagcacggggccccggctggccgaccgcctcacgtcgcggtcgctggagtcgacggagctgcacgaggtgcgcgcccgcagcggcgccgacatgaagcgggacctcacgtggtgggacctggtgtggttcggcgtcggcgccgtcatcggcgccgggatcttcgtgctcactggccaggaggccagggaggacgtcggccccgccgtcgtcgtctcctacgtcgtctccggcgtctccgccatgctctccgtcttctgctacaccgagttcgccgtcgagatccccgtcgcaggtggatcgttcgcgtacttgcgtgtggagctcggcgacttcatggcgttcgtggcggcgggcaacatcctgctggagtactgcatcggcggcgcggccgtggcgcgcgcctggacgtcctacttcgccacgctgctgaaccaccagcccagcgacttccgcatccacgcgtcgtcgctctccgccgactactcggagctggaccccatcgccgtcgtcgtcatcgcgctcgtctgcatcttcgccgtggccagcaccaagggcacctcccgcttcaactacgtcctctccattgtccacatcgccgtcatcgtcttcatcatcgtggccgggctcaccaaggccgacgctgccaacatgcgggacttcatgcccttcggcgtccgcggcatcttctccgcgtccgccgtgctcttcttcgcctacatcggcttcgacgccgtgagcaccatggcggaggagaccaagaacccggcgcgggacatcccgatcggcctcgtgggcgccatgacgctcaccaccgcgctctactgcgtgctcgccgtcacgctctgcctcatgcagccgtacgcgtccatcgacaaggacgcgcccttctccgtggcgttctcggccaggggcatggactgggccaagtacatcgtcgccttcggcgcgctcaaggggatgaccaccgttctgctggtcagcgccgtcggccaggcgcggtacctcacgcacatcgcccggacgcacatgatgccgccgtggctcgcgcaggtgcacccgcggacggggacgcccgtcaatgccaccgtcgtcatgctcgtcgccaccgcgatcatcgccttcttcaccgaccttggcatcctctccaacctgctctccatctccacgctcttcatattcatgctcgtcgccgtcgcgctgctggtccgccgctactacgtcgccggggagaccacggtcgccaaccggaacaagctggcggcgtgcatcatcgccatcctggcgacgtcgtcggccacagcgacgtgctggggggtgaacgtgaacgggtgggtgccgtacgcggtgacggtgcccgcgtggtttgcgtcgacggtgtgcctgtgggcgttcgtgccgcaggccagggcgcccaagctgtggggcgtgccgctagtgccgtggctgccgtcagcgtccatcgccatcaacgtcttcctcctgggatccatcgactacaagtcgttcatgcgcttcggcttctggacggccgggcttctcgtttactacctcttcgtcggcctgcacgcgtcctacgacacagccaaggcgctcgccgccgattctgccatggccaaggtggaggatggcgacggcaagccggcacgaggcgccgtccataacggtgagtactgaagggaaatgtaatcgtgaatatgaagtcctatactatggttgttagtcgccgacaagcgaacctaagtttgtacaaatcttcagttatc

SEQ ID NO: 90020 - DNA, 754 bp, Zea Mays
atgatagtgcgggagctcgacacgctgtggcaagcagataaaattcgtgcgcgcggcaaacaaggaaagagtgagctgagcatgcgcagagagctcgacaacccgcagcaggggctagcagggcgtgagctgcgcgcagagaagaaatgccggcgagctgaaggtggcggctacagatcagtcgcgatagccaccagggcgcacggcccagcaggagccggcgcgcaggaagacgcagagctcgcgtgcaggggaaaaagggccgagcagaggaacgctgtgtagaggcgagttgagcagggccaagctggagcaccgcggcgcgcagggaagagccagggagaggggcgcgctgcggaagaagctccacggcttggagaagataaagacagggagatgaatcgagcgatggataaggccacagcctgtacaagctcaagcacattccagagaaaaatcaaagaccggtacgcaggagactcatccagttgagtgagcgcacaggagataagaaatatcccgtgggacatggagctggaacgatgcgtgcctgggcttgcatgcgtgaaaaatctttggcagccgaacaacagcaatgggataaggactcaaggcatgcggctgtgaaaaaaaatctgggagagagaaagagagtggcgtgagatgagggatatttccccttttttttaattattctataattttttttctctgatgtatttttagcacaataatttttccccgtttgaatctc

SEQ ID NO: 90021 - DNA, 799 bp, Zea Mays
gtactgtcttaaaccctcgtctttccgccgcccgtcgcttcgttcctcgcttccccccacaggcccacactctcgccgtctcgcgcgcatcacggcggcggcgaagcaccgcgtggccctccacctaagtcctagcccaagcgtaagcgatcgctctccccatcagccactatggcgccacgcccccgcaagcgggcctcgcgccccaagccccgcccgggctcccgacgtggcggcggcggaggggacgacgatcccttcttcgagtccgagcccaagcgccgccgtggaggccgtgacgaggacatcgagagcgaggacagcgacgacgatggcgtggctgcgtttgggggcggatttgatgaggatggggacgagcgcggtagggaggaggaggacgaggagacggtgggggagaagaagatgcggatgacgaaggagtggctgaagaaggtcactgaggtcgctaagagggggcaggaggatgacgacgaggacgagtcgggagggagacgggtggcggagatcctgcagagaaagcagcttgaggagagcggcaggaagcggagggagattgctgcgaggttagaaacaaattaccctccagttatctccagaatggtagtttgtcagatgtatctgtttatgtgcgagtttagtatatttacctgctccactaccattgagtaattcatttggggtttgcaagtaaccacagctcgtaatttcacaaatggaggaacataacctcttttggttcagggtagtgattggagtggagctctttagctactggtta

SEQ ID NO: 90022 - DNA, 2168 bp, Zea Mays
gtactgtcttaaaccctcgtctttccgccgcccgtcgcttcgttcctcgcttccccccacaggcccacactctcgccgtctcgcgcgcatcacggcggcggcgaagcaccgcgtggccctccacctaagtcctagcccaagcgtaagcgatcgctctccccatcagccactatggcgccacgcccccgcaagcgggcctcgcgccccaagccccgcccgggctcccgacgtggcggcggcggaggggacgacgatcccttcttcgagtccgagcccaagcgccgccgtggaggccgtgacgaggacatcgagagcgaggacagcgacgacgatggcgtggctgcgtttgggggcggatttgatgaggatggggacgagcgcggtagggaggaggaggacgaggagacggtgggggagaagaagatgcggatgacgaaggagtggctgaagaaggtcactgaggtcgctaagagggggcaggaggatgacgacgaggacgagtcgggagggagacgggtggcggagatcctgcagagaaagcagcttgaggagagcggcaggaagcggagggagattgctgcgagggtattaccaccgggccctcaggatggctttaaggttcttgtgaagcaccggcaacctgttactgctgttgctctatccaaggatagtgataagggattttcagcatcaaaaagatggaattattatgcattgggatgttgaaactgggaaatgtgagaagtatatatggccaagtgaaaatgtgttggtttcacatcacgcaaaaccaccaatatcagctaaaagaagcaagcaagtgctggctttagctgccagttctgatggtcgttacttggcaagcggtggcttggaccgtcatatccatctatgggatgttaggtcacgggagcacatacaggcatttagcggccatcggggaccaatatcttgtcttgcttttgctccggactcttcagagctgttctctggttcttttgatcgatcaataatgcagtggaatgctgaggataggacatacatgaactgtctatatgggcatcagaatgaaatcttgacaatggatgcacttagtaaagacaggattctaactgtagcacgggaccgtacgatgcatctttggaagattccagaagagtcgcagttagtgttccgtgctcctgctgccgcatctttagagtgctgctgcttcattgatgacaaggagtttttgtctggatctgatgatggaagcattgagctttggagcataatgaggaaaaagcctatccttataataaaaaatgctcatccagtattgtgtactaaccttaattcagttgacaatgatgacgagtcacctaaagaaaatggaatgcataaaccggaaaatgtgccatccgcagcccagtcatgggttggtactgttgctgcaagaagaggttctgaccttgttgcatcaggagcaggaaatggtttagttcgtctctgggctatcaaacctgattctaagggagccgagccattattcgatttgaaactggatggatttgttaattctcttgccatagcaaaatctggacgttttattgttgctggtgttggccaggagcctcgccttggaagatggggacgagttcgatcggctcaaaatggagtcgcaattcacccaatccgactaaaagatgtgaaagaggacttgtagagtagattgatgtcttgcattacagtggaacgtccatccatccagcctgcacttctgcagccacggcacaaaagaaaatttgttgaggctaactgggatacatgcaagcaatacaaatttggagggcactacagatgatttttgagctccggttatgtgtgacacggggaatttgtgaggcaattttgtaacttctacagccttctggagcggacaatgaggatttgaagatccatattttttgttccccatgtctggttaactgcattcttttttctgatagctagttctcgccattcgcttttgtacggggtttctccttgcttcgtgtcttgagcgcacgaatagtttgatttggctgcatgacctttatagggtagttccaacaatgacttacgagctagttgtaagcattttattttattctatattataattgaagagaagtaatttttgatcaata

SEQ ID NO: 90023 - DNA, 967 bp, Zea Mays
cgctatcccgctcgctactattaaaccgaccccaactcgtctctcaccacctctctccccatccccgtctcgccgctagctttccctttccccctgctgctcctcccctccgtcctcctcctcaccctccccgcgggccgcgcggctcggcagccaagcaagcaacagcacaacacacccccgcaccgccgccacttctctctctctctctctctctctctctctctctctctctctctctctctctctctctctctctctctctctctctctctctctctctcgcaccaccaccatggcgtcgggcggctgcgctctcgccccgaggctatgactcggcgccgcccgtggccgtggctctccgtcttctccatctccccgcgacgacgacaacccctcctcctccgactccgactcctccctgggcggcggtgctagccagatgtcgacggcgctggcggtggtcgggggcggcaaggaccggccgtcgcccggcggcggcggggcgccgcaggtggacacgggcaagtacgtgcgctacacccccgagcaggtcgaggcgctcgagcgcgtctacagcgagtgccccaagcccagctcgctgcgcaggcagcagctcatcagggagtgccccatactcagcaacatcgagcccaagcagatcaaggtctggttccagaaccgcagatgccgcgagaagcagcggaaggaggcctcgcgcctgcagactgtgaaccggaagctgactgcgatgaacaagctgttgatggaggagaatgacaggctgcagaagcaggtctcccgactcgtctacgagaatggatacatgcgacagcagcttcacaatccttctgctgcgactacagacacgagctgtgagtctgtggtcacaagtggtcagcaccaccaacagcaaaacccagcagctccgcgtcctcaacgggatgcaaataacccagctgggtaa

SEQ ID NO: 90024 - DNA, 2001 bp, Zea Mays
gtgctactggattgccctctcaggatatctattgtgcttacagctggtaacttttgtttcttgtcttgttctatagatctgtgagagatcactgacacaatcgactggaggtccatcaggacccaacactccaaattttgtaagagccgaagtgcttcctagtggctatctaattcgaccctgtgagggaggtggctccatgattcacattgtggatcatgttgatttagatgcttggagtgtgcctgaggtccttagaccactttatgaatccccgaagattcttgcacagaaaacaactattgctgcactgcgtcacattaggcaaattgcgcatgaatctagtggggaaatgccctatggagggggccgacagccagcagttttgagaacatttagccagaggcttagcaggggtttcaatgatgctgtcaatgggtttccagatgacggttggtcactgatgagcagtgacggtgctgaggatgttactattgctatcaactcttctccaaacaaacttattggtcctcatgtcaactcttcccagctgtttactgcgatcggaggtggcatcctgtgtgctaaggcatcaatgctgcttcagaatgtgccacctgccctactagtacgatttctgagggagcatcgctccgaatgggctgatcctggtgttgatgcttattctgccgctgctcttagggctagtccatatgcagttcctggcttgcgtgctagtgggtttatgggcagccaggttattctgccgcttgcacataccttagagcacgaagagttcttggaggttattaggcttgagggacacagcctctgccatgacgaagttgttctgtcacgagatatgtatcttctgcagttgtgcagtggtgtggatgaaaatgcagctggtgcatgtgcacagcttgtgtttgcacccatcgatgaatcttttgccgacgatgcgccactgctaccctcaggcttccgtgtcattccactggatgcaaagacggatccaccatcaggcacacgcacacttgacctcgcatctaccctcgaggttggatctggtgggacaacgcgtgcttcgagtgacgcctccagcacctgcaacacaagatcagtgctgaccattgctttccagttctcatatgagaatcacctacgagagagcgtcgcagccatggccaggcaatacgtcaggactgtggtggcgtcggtgcagagggtagccatggcaatagctccttcgcgcattggtggacagcttgaaatgaagcaaactccaggatctcctgaggcacacacgctggcaaggtggatcggcaggagctacaggttccacactggagccgaactcctccgcacggacacccaatgcacggatgcttccttgaaagcgctgtggcaacactcggactcgatcatgtgctgttccctgaaggctgctcccgtgttcacctttgccaaccaagccggcctggacatgctggagacgacgctgattgcgctccaggacatctcccttgagaagatccttgatgacgatggcaggaaggcgctctgcaccgagtaccctaagattatgcaacagggcttcgcgtacctccccggtggcgtgtgtgtgtcgagcatggggcggccggtgtcgtacgagcaggcggtggcgtggaaggtcctgagcgacgacgacaccccgcactgccttgccttcatgttcgtgaactggtccttcgtgtgagaacccggtcccctagtagtcagtagagccaagtcgcctagcgtttgcggctctgttgtttgaactctgtaccccatgtaccgtcgattttgcctgtgtccaggcaacctatgaaacacacctttgtagttgttcatcatccccgtggaacaaacagctttgtactagttgttcgtcttcgcttgcttgctatcttatgatgggtcctggtttgctacagctcctgaaaaattgattggaccattgcgtctgtgctgctg

SEQ ID NO: 90025 - DNA, 2064 bp, Zea Mays
gctactggattgccctctcaggatatctattgtgcttacagctggtaacttttgtttcttgtcttgttctatagatctgtgagagatcactgacacaatcgactggaggtccatcaggacccaacactccaaattttgtaagagccgaagtgcttcctagtggctatctaattcgaccctgtgagggaggtggctccatgattcacattgtggatcatgttgatttagatgcttggagtgtgcctgaggtccttagaccactttatgaatccccgaagattcttgcacagaaaacaactattgctgcactgcgtcacattaggcaaattgcgcatgaatctagtggggaaatgccctatggagggggccgacagccagcagttttgagaacatttagccagaggcttagcaggggtttcaatgatgctgtcaatgggtttccagatgacggttggtcactgatgagcagtgacggtgctgaggatgttactattgctatcaactcttctccaaacaaacttattggtcctcatgtcaactcttcccagctgtttactgcgatcggaggtggcatcctgtgtgctaaggcatcaatgctgcttcagaatgtgccacctgccctactagtacgatttctgagggagcatcgctccgaatgggctgatcctggtgttgatgcttattctgccgctgctcttagggctagtccatatgcagttcctggcttgcgtgctagtgggtttatgggcagccaggttattctgccgcttgcacataccttagagcacgaagagttcttggaggttattaggcttgagggacacagcctctgccatgacgaagttgttctgtcacgagatatgtatcttctgcagttgtgcagtggtgtggatgaaaatgcagctggtgcatgtgcacagcttgtgtttgcacccatcgatgaatcttttgccgacgatgcgccactgctaccctcaggcttccgtgtcattccactggatgcaaagacggttagtacgacaggctttgtgcttgtagtattgccttctgttggtctaaactaacaatgtgttgtgtaactatcaactggcaggatccaccatcaggcacacgcacacttgacctcgcatctaccctcgaggttggatctggtgggacaacgcgtgcttcgagtgacgcctccagcacctgcaacacaagatcagtgctgaccattgctttccagttctcatatgagaatcacctacgagagagcgtcgcagccatggccaggcaatacgtcaggactgtggtggcgtcggtgcagagggtagccatggcaatagctccttcgcgcattggtggacagcttgaaatgaagcaaactccaggatctcctgaggcacacacgctggcaaggtggatcggcaggagctacaggttccacactggagccgaactcctccgcacggacacccaatgcacggatgcttccttgaaagcgctgtggcaacactcggactcgatcatgtgctgttccctgaaggctgctcccgtgttcacctttgccaaccaagccggcctggacatgctggagacgacgctgattgcgctccaggacatctcccttgagaagatccttgatgacgatggcaggaaggcgctctgcaccgagtaccctaagattatgcaacagggcttcgcgtacctccccggtggcgtgtgtgtgtcgagcatggggcggccggtgtcgtacgagcaggcggtggcgtggaaggtcctgagcgacgacgacaccccgcactgccttgccttcatgttcgtgaactggtccttcgtgtgagaacccggtcccctagtagtcagtagagccaagtcgcctagcgtttgcggctctgttgtttgaactctgtaccccatgtaccgtcgattttgcctgtgtccaggcaacctatgaaacacacctttgtagttgttcatcatccccgtggaacaaacagctttgtactagttgttcgtcttcgcttgcttgctatcttatgatgggtcctggtttgctacagctcctgaaaaattgattggacc

SEQ ID NO: 90026 - DNA, 1625 bp, Zea Mays
ctgtttgaatttattgccaggacccatcacatggcacttctaacttctttaatgtaatttacaggggtttcaatgatgctgtcaatgggtttccagatgacggttggtcactgatgagcagtgacggtgctgaggatgttactattgctatcaactcttctccaaacaaacttattggtcctcatgtcaactcttcccagctgtttactgcgatcggaggtggcatcctgtgtgctaaggcatcaatgctgcttcagaatgtgccacctgccctactagtacgatttctgagggagcatcgctccgaatgggctgatcctggtgttgatgcttattctgccgctgctcttagggctagtccatatgcagttcctggcttgcgtgctagtgggtttatgggcagccaggttattctgccgcttgcacataccttagagcacgaagagttcttggaggttattaggcttgagggacacagcctctgccatgacgaagttgttctgtcacgagatatgtatcttctgcagtggtgtggatgaaaatgcagctggtgcatgtgcacagcttgtgtttgcacccatcgatgaatcttttgccgacgatgcgccactgctaccctcaggcttccgtgtcattccactggatgcaaagacggatccaccatcaggcacacgcacacttgacctcgcatctaccctcgaggttggatctggtgggacaacgcgtgcttcgagtgacgcctccagcacctgcaacacaagatcagtgctgaccattgctttccagttctcatatgagaatcacctacgagagagcgtcgcagccatggccaggcaatacgtcaggactgtggtggcgtcggtgcagagggtagccatggcaatagctccttcgcgcattggtggacagcttgaaatgaagcaaactccaggatctcctgaggcacacacgctggcaaggtggatcggcaggagctacaggttccacactggagccgaactcctccgcacggacacccaatgcacggatgcttccttgaaagcgctgtggcaacactcggactcgatcatgtgctgttccctgaaggctgctcccgtgttcacctttgccaaccaagccggcctggacatgctggagacgacgctgattgcgctccaggacatctcccttgagaagatccttgatgacgatggcaggaaggcgctctgcaccgagtaccctaagattatgcaacagggcttcgcgtacctccccggtggcgtgtgtgtgtcgagcatggggcggccggtgtcgtacgagcaggcggtggcgtggaaggtcctgagcgacgacgacaccccgcactgccttgccttcatgttcgtgaactggtccttcgtgtgagaacccggtcccctagtagtcagtagagccaagtcgcctagcgtttgcggctctgttgtttgaactctgtaccccatgtaccgtcgattttgcctgtgtccaggcaacctatgaaacacacctttgtagttgttcatcatccccgtggaacaaacagctttgtactagttgttcgtcttcgcttgcttgctatcttatgatgggtcctggtttgctacagctcctgaaaaattgattggacc

SEQ ID NO: 90027 - DNA, 514 bp, Zea Mays
cttgccggaggcggcgccaaacccaccgatgtcggcgtggtcatcgtcgtagtggcgggcgtcggcctcggcgtcatcgaggggcagctggacctgcgcgagcatgaggtagttgggctcgttgtcagaggtgtgcgtgccgaggatcatcttctggacggagtggtccttccccggcggctcggtgcggtcggggagccactgcacggtaagggagggccattcgagcgcgtgggtgatgacgaggtcgtagaggaagggtgtgttcttcttccagatcttgtactcctcgttgatgaggcgctcctccacctcggcgcggaactcctcttcgtccgccgccccgccgactgccttcggcatcgtcggtccgccgggagcgagctaggtttgagagcagagggttttaggttggtgagcgggggacaaaatggcagaatcgcgagaggaggggcagggatgggagaaaaattgggcgaagtgaaggatgggaaagagctgccgaagagagagc

SEQ ID NO: 90028 - DNA, 1694 bp, Zea Mays
accctcctgctcctcctcccgcggtcccgccatttcgtcccccgctcaccaactcaaaccccctccgctctcaaaccctaaccctagccctagcccgctcccggcggaccgacgatgccgaaggcaggcggcggggcggcggacgaagaggagttccgcgccgaggtggaggagcgcctcatcaacgaggagtacaagatctggaagaagaacacacccttcctctacgacctcgtcatcacccacgcgctcgaatggccctcccttaccgtgcagtggctccccgaccgcaccgagccgccggggaaggaccactccgtccagaagatgatccttggcacgcacacctctgacaacgagcccaactacctcatgctcgcgcaggtccagctgcccctcgacgacgccgaggccgacgcccgccactacgacgatgaccacgccgacatcggtgggtttggcgccgcctccggcaaggtgcaaattgttcagcagataaatcatgatggagaggtcaatcgagctcgctatatgccccaaaattcatttataattgctattaagacagttagcgcagaagtatatgtttttgactatagcaagcacccatctaagcctccactagatggtgcatgcaaccggtggtttacggctgaagggacataattctgaaggatatggcttatcatggagtatttttaaagagggacatttgttaagtgggtctgacgatgctcaaatttgcttgtgggacattaaagcaaatagtagaaacaaaagtcttgacgccttgcagatttttaagcatcatgatggtgtcgttgaagatgttgcttggcacttgaggcatgagtacttatttgggtcagttggtgacgattatcatcttttgatttgggacctgcggtctcccgcccctactaaacctgttcagtcagtggtggcgcaccagggtgaggtgaactgcctggcttttaacccgttcaatgaatgggttgttgcaactggttctactgacaagactgtcaaattatttgatcttaggaagattgatacttctctgcacacctttgactgtcacaaagaggaagtttttcaagttggatggagtccaaagaatgaaactgtacttgcatcctgttgtctgggcagaaggctcatggtctgggatctaagcaggatcgaccaagaacaaacaccagaggatgctgaagatggtcctccagagctcatgttcatccatggaggccataccagcaagatctctgatttctcctggaacccctgcgaggactgggtggttgctagcgtcgctgaggacaacatcctccagatatggcagatggctgagaacatctaccatgacgaagatgatctgccaattagcgatgagccggcaaaaacttcttgaagcaacacatcacaaaaggaatcttaactcctatcgactgttggtgctcctagatcggaaccctgctcgccggagaatcttaaccgagtgagagttggctgtaggttgcttccgtggtcgtaactttatgcttgacgggttggtcgtttcttcgaccgtctgtatgtgtattcgtcgaacctttagcattatacatatgctgattgactagatctgttcgtcgcagttgtgttttgtagtattgctttatatctagcaggatcatgctcgtgatgtgatttgt

SEQ ID NO: 90029 - DNA, 1614 bp, Zea Mays
gcagcagtcgcagtctcactctcacacatcacgagctttctcgagctccaccggcagccaagctacgtgttcccaccctagtctactctagcggcccttgtcctgctgcttgccttgcttgcgcctgtgatactgagcgggagatggaagcgtacgcggcaatggcgtcgccgcccacgaaaggcatgggcgtggacaagctcagctacgagatcttctccctgctcgagagaacgttcctcctcggccccggcacgcctccccgggcgcttctggacggcgggcgcgtgcgggtactggcgatcgacggctgcggcgcgggcgccgaggacgcgctcctggccgccgccgcgctcgcgcggctcgaggccgggctgcgcgaccgcaccggcgacccggacgcgcgcgtggccgacttcttcgacctcgcggctggcgccggcgcgggcggagtgctcgccgcgatgctgttcctgaggggcgccgacggccggccgcggtacacggccaacgaggcgctcgcgttcgtggccgggagcatcggcgggaagggctggggaggccgccggcgcgggccgtgggcgaagctgttccgcggcgccgcccgcggcggggaccggtcgttcttccgcagcgcgttcggagacgcgacgctcagggacaccgtggcgccgctcctcgtgccgtgccacgacctcgccacggccgcgccgttcgtcttctcccgcgccgacgccgtcgagagcgacagcttcgacttccgactccgcgacgtgtgtgccgccacctgcgccgcgggtggcgcgctcgcgagcgtgaggtcggtcgatggcgccacggccatcgccgcggcgtccgggggagtggcggccatgggcaacccggccgcggcggccatcacgcacgtgctccacaacaagcaggagttccccctcgccaccggcgtccaagacctcctcgtgctctccatcggcgccggtgcctcggccaccgtctgcgacgggtccagcacgcccatgcccgcgcgttctccgtcgccgcgggagctggcgcgcgtcaccgccgagggcgtcgcggatatggtggacgagtcggtggccatggcgttcggagacgcgtgtggatgcaagtacgtgcgcatccaggcccgcaaggcgccggcgccgctccacgcggcagcgggagcgatgcttgcgcagcgcagcgtggagtcggtgctgttccgggggcgaaggctgtcggagcggaccaacgcggagaaggtggacgcgctcgccgcggagcttgttaaggagcaggagcggcggcggcacagcccgcttccgaacgtagccataaagcaggtggccacgccgcggctgtcgtcggcgaccacgacgtcgtcaggcaccgcgacggcaaggaccgcatcgacgatgccgtcgccggcgtcgtgggattctcgtcgatagttgagttaattagggcatgtacaatgcttagacagttgccgtctgtaagcgcttagaagttcgcatatagataacataatagacagtgggttgtctgtttacactgtctacgtagttttaaatttgtataatgtcttttattgctataagagatcccatgtat

SEQ ID NO: 90030 - DNA, 1864 bp, Zea Mays
ccaaacccacccgcctttagatcgtggtagtcatgtccatgttattttatactaagctgtgctttaggctcctgttttcaggtcgtgctcgtgctggtcgaaaaagttgaccctatattcacatccctacgtacaacacacgaatccatgcatgtattaaagtgctgcattaaaatagtcgagatagttcgtgcttgatgcttgcatcgtagacctttcctgcagcttaacacgacacgggcctcaggctgggctgacacaggcccggtagtcgtcggacccgaccatgggccgcacgacgagtgggcttggtacgatctcctagcacgccagactgccagaggatccaacagttttctccgtgataaaaaaggcaaaacggtagaagtagaaccggcaaaaccctcccaatcccccctccgctgccgccgcccacccgacccaaccgatcgaggcgcgccgccgccagtgccctacgttgttgccgtccatgccgggatcttctccctgtcccgccgctggctatagtgggagcggcaacggctcccactccgccatcgtcgccggcgctgtgaccggctcccacgtgcttaagatcgtgttctattcccgcactaaggaggtccccaattgccaggtcatcaagtcccgccatttctgcctgggaggccacacctggttcgtgcagtattaccccaatgggaactccgccgacaacgtcaacttcatatcgttgtttctcactatgcatggtgcagtagccggcaaggcagtgaaggcgcaggtcaccatcagtttactcgaccaggacggggagccggtgccgtcgtacacccaagtcacaacattcgtggacttcgctgagaaagggagctggggatacccagagttcatcgagaggaaagctctggaggaatccgagcatctcagggatgactccttcaccgtcaggttcgatgtgaccatcatgagcgacatccaaaccgtggcaatgccgtcagtggtcgtgccgccgtccgacatgcaccggcactacgctgatctcctgctgagcaaggaaggcgccgacgtcaaattccgaatcggcgggcagacattctccgcccatcggcttgttctctcgacacggtcgccggtgttcaaagccgagctctttggtccgatgagagagagcacaaccaccaacgccatacgcattgacgacatggagccggaggtgttcgacgcgctgctcaccttcatctacacggacaccctgccagagacgaaggatggggagggatgtgcgatggcccagcatctgctcgtcgccgctgaccggtatgacctggagaggctgaagttgatctgtgaagataagctgtgcaggtatatcgatacgggctccgctgcgaccatcctggctttagctgaaaagcacaactgccatgggcttaaggatgcgtgcttcgcgttactaagctccgctgcgactcttggtgcattcatggaaacagatgggtttgaccacctgacagttagctgtcccagccttctgaaagaactgttctccaaatttgttccgacttgaactaaaaagaggtggcgtgtaacagcaaatcttgacaaagtcctcctatgttttagtcttatatatataggtaccccaagacattgtatcctttatatatgtaggatcattttggcggcaagctacactaagcagcttgtgtcttggtgctatgaacagtgagtttagttatgtgtaccggcagcattgcatggatatgctgttcgcttgactttaatctaaaacggtttctattgcttctacagtgttttgtctctatgtattgcagctgcagcagtcgaaacagctggtttt

SEQ ID NO: 90031 - DNA, 153 bp, Zea Mays
atgggcgaggagtggtccctcgccgccttctccggatggatgctgctcggcaacacgcacgccatgctcggccgcatggacgactccatcgcctgctacgacaaggggctccaaggaaccacaaggtcatcagagtgctttgtgtggaattag

SEQ ID NO: 90032 - DNA, 246 bp, Zea Mays
tttgttattagcaataaatcagatgttcctttcgctacttggagtcgtgaattggtccaacagacatgtcctctgatgcttagggttttcacaaggatgattgttgggcaaagtctgcctgggactaccagacaaaaaccttcccatcttgcaaaagggttgaagcttggcctctacagtgatgcggggacacaaacctgcagccaaaaaatggcaggatcacttgatcatgaagaccaaacgtga

SEQ ID NO: 90033 - DNA, 297 bp, Zea Mays
acatagcaaaacatactcccagtaccaattatacagcgagacaccacaatacatctcgtgcacatcacaaatgtcaatggtcgtccaacttagaattaatcagtcccaagaaaagcgccgacaccgactcctgcgcacgcgtgtcacggcctacaccttaatctccagcctccatcggtacaactcctggtccggcatgagcaagtcgacggacacgaggctgatgtcggcatcgtaactaaactccacttccgccgagtctagcaggcacctcgccggctcccgcgagcagtagac

SEQ ID NO: 90034 - DNA, 1355 bp, Zea Mays
atgtccagcgccctgcgcgccgcctggagcggggctcagcagcagctgccgccccacgcgggcggtggcatcggcgggcatagggcgcagcaccacaagggcccctggaccgaggcggaggacgtagtcctcagggagatggtgatgaagcacggcgaccggaagtgggcggtgatagcgcagtcgctccccggcagggtgggcaagcagtgccgcgagagatggaccaaccacctgcgccccgacctcaagaagagcgtgtggactgaagaagacgacatggcgctgatcaaggcgcacaagcggtgcggcaaccactggtcgaccatcgccacgttcctgcccgggcgttccgagaacgccgtgaagaaccactggaacgccaccaagcggagcctcaaggccaagcgccggctgaagaagaagagcaacgcgcagcaggtgccggccgggcagtggtccgtcctggaggagtacatccgcagcctgtaccctgacctcgccgacggcgccggcgccgaccagaccccgccggcggccgaggactcccccccgtcgtcctacaacctcgggtcgtactcgtacggcgaggtgatcagcagcccagcgtccgccgccgcgccgcccggcagctttgaccagatgaccgccatggggctgtacctgggcgcgtcgtcgtcgtcgcccgcgccggccgagctgcaggggggcatgagctccgacatcgtggcgccgttcctgcacctggacctcaacgcctactacggcggcgcgccggcggcgacgatgcggcttatggctccgatggggggaatggcggcgcctgtgccgcagatgatggagcacgatcactaccagcaccagcaggcttcctacgccaccgccaaccagctgctcacgtaccccttcatcgacaacagcgtcatgtggcagcaggcgccgtacgccgcccatggcagcgccgcctacggcggtggcgccgacgcggcaggtgccggcccgagcaacgtcgtcgccgttccggcggacgacgtcgacgtcgtccagatggcctccagggagttcctgacgccgtcggaggacgaggtcaccctggacctggccaggttccgttgacacagcagctagcaggctcgtcgatcgtcgtcaaaaaacgcagaaggggcgttcgtccagcagtttgtttactgccgtgttcgttccttattattgcgttgttgtatctttttacatgtttgttgtactggcatttcaattccccggcggagaaaccgtccgtgtagttcccgtttcaataacctggaccgtatgttgtaatgtttggattacccctaatgacaatttcatttgcttgt

SEQ ID NO: 90035 - DNA, 559 bp, Zea Mays
cttggccgccgcccccctgcccatctcctcctctctcaattcttgcagccacaccaccaaaccctagcccccccccaatctcctcctcccaaggtgccaatccttgccgctcagatcatcgtcgtggtgcgagtcttcaatcgttttggtggagggaagaagggaggaaggaaaaggggagaatccaaggtggtggactcccagatcgttcttagggatttgcccaaacttccggtgaaggcacctaatttctgctttgggaatagagggatgtagcagcacggccactacacctttaataaaggaaccaccatttaataattttgttaatcagagttgggcaagtctagtgaattgctttgttcttggttgagcgtttattttggggtgggctgagtttcttatcccatttgttttacttcagttggggcataaatgagctttaccactttgcatctagtttctactatgtgaattatatgtctttatatcctgtatgaacttcatgtttttccctccttgttatgttagtttcaaaggaggtgctgccggattttgc

SEQ ID NO: 90036 - DNA, 947 bp, Zea Mays
gcattgtaaagccgcccatcgactcctcgagctcgatcgctcgccgccaagaactacaagccatggagacggcgtcggccgcgtccgtccagggccccagcgcggcgccgtgggcggacatggacacggactgcctggttcacgtgttcgggcgcctcgacctggaggacctggcggcggcggccccgctcgtgtgccggggctggcgccgggccgccgccgaaccgtccctgtggcgcgccctcgacctgcgccgggaccacgtcgcgcgcttcatgccctggggcgcgctcgccgccgccttcgcgcgccgctacgccgtgcgcggcttctcgctcgcgggcttcctcaggatctgcgtgtggcgcgcgcgcggctccgccgaggacgtcgcgctcccgccgctcctcgccgagccggcgcacgagatcgaccacatttcgctccggtgccccaggttgcggcgcctggcgctcccgcacctgacggtcggcgacgaggcgcgcctgccggacctcgtcccgcggtggccgctgctggagcatctggagctggagacaaagccgtcgtcctcctccttcccggcgctcgccgcgcaggtcgcgctgcactgcccggccttcgccagcctcaagacctcgggggccttcaagcgcgaggacgccgcggcgctggcgcgctccctgcccaggctccgctccctctgcgtcgaccgctcctacctgcccaaggagcagcttctcgccatcctcgccgcctgcagggacctgcgggagttcagcgcgcgcagctgcgttggcttcgacgacgaggacgaggaggtgctcaggcacggggccaggatcctgcggttcgacgtcggagggtcgaagctggtggacgaactagacgacgagttccccggcggtggcggtttctgcgactcgtcctacgttgacgtgatgtga

SEQ ID NO: 90037 - DNA, 768 bp, Zea Mays
gacaaaccggcccggtccaaatggctccaccaaaagtttcagatctacgatgcatgtatgccatcgaaacagacttgggtagatctgcttcatgaagtacatgaggcggagaatatgattgctaaaactgccgagtgaccgatcccttgaaaaccctagaatacattgcatccgattcgatttctttttaaagaagaagatccaaaccccttatctgatattccgaattcccaatccaagccggagttggtatcctcaattgcttcgctgcttctcggtgcgcgtcgagcggatcgatcaagcgatggatcaccgggacctgcagggcgtggcgctgttgcccgacggcgtgctagcggacgtgctctgccgcgtccggacccggggcctcgccgcgtgcaggtgcgtctgcaaggcgtggctcgtcgtgtcgtcgacgaccgccacctgctgcgggcggatctcctccctttgtcgatctcctccctttgtcggtagatgggctctcttcatcaacttccagtcttcccgagttcttcgcgcccctctcgcacggccctacatggctacatccagggttggctctagtgcccctaaattctagggcactatatctgctgcagttaattgtatagctaatataataactaatgttaaattaaataatctaatatctaagttgagagttttaaaattaagcttttcataagcatctatgttttctatggagatatttgagtatgtcaatgagatggattcgtattctaa

SEQ ID NO: 90038 - DNA, 312 bp, Zea Mays
atggggaactccggtctcgccttcgcgaagatgcttgatgaactccagaatatggagacacgtctgacgggcgcgattgagggacgctgccatagcatcgagcgcatcgtcgacgatcgttgcaccaccatcggcaaacactttgaacaacgctgcggcgacatcgagcatcaacttgctgacgcgaaacaacacgcgaatgtgcgcctgatatccgtcgaaatgtcacgagagaatccacagatgtttggagtggagacgattaatcacgccaaaatatacgggaggggagcagctcgatatgggatgtga

SEQ ID NO: 90039 - DNA, 1485 bp, Zea Mays
atggaatgccaggaaaagaacaatatatgcaatgagcacgctagtaaggtagcacatgtcaggagaagaagagcgagcaaagaaggatgcttgaattctcaagccactgtaaattggagaccaaatacttcacacaaaaataagataggacatagaaagatagacactgatactcattctactcatcaaataagcgttgtcagatcacggtgctacacacactggttcagtgaatctgcaggtgctgctcatatggaaacatacactactgatgacgctcttacgctcatggggtttggaaagttccaagcacttgtccttgcatatgcaggaatgggctgggttgcagaagccatggaggtcatgctattgtcattccttggaccagtggtgcgggaagagtggaatgtctctccccaagacgagagtctgctatccagtgttgtgtttgctggcatgctaatcggagcttgtgcttggggctttatttccgacagatacggaagaaagactgttttattgctttcgactctgcttactagtggattgggtcttctaagtgctctatctattaactacttgtgcttgctggttcttcggttttttgtcggcataggagtgggcagtgggcatgtattttcatcttggttcttggagttcgttcctgcaggaaatcgtggcacttggatggctgtactatcagcattgagttggaggtggttgctggcattgtcttcccttccatgcttcctcttgcttcttttcttcagaatcacacctgagtcaccacgctatctttgcgcacaaaatagaatgactgatgcaaggtttgtcctggagagaatggccattgcaaaccaagcagctcttcctatgggagttctcacataccaccaagaaacaaaaactgaatgcattactcatgtttctgaggatgaacatcttattccagtcagagagaaggaacatacagataggaatgctattagttccaaatctggtgctgttgctgtattgcacaagctattatcacataacttgctcaaatcaactctacttctttggtttgtttactatgccagttccttcgcttattatgggataacattgctgacatcacaactaagtgatgtgaatagaagctgtaaatctgatctggtctttgaagtgcaccaaaataatggcaatctttataaagatacttttatcactagtttagcagctcgtgcttgtggcaccggtgccactacaactttatgtctatatgcccccgaggtgtatccgacatatgttcgctcaacaggggtcgggatcgcaaccgccatcggtaagatcggcggggttatttgccccctcgtcgccgtgggcatgctgcggagctgccatcagatggaagcggtgctggtgtttgagctggtgctgttcctcgctggggtctcctgcatcctcttccctgtggagaccaagggccgagaaatggactga

SEQ ID NO: 90040 - DNA, 1986 bp, Zea Mays
attcgttgagtgcgcgcgcggcgcggcgcggcggcttgccattacccgtcctctctcttaccccgtcgtcctcttcacctgcaattgagcatttgcttgctccccctccccgacaaaaaccccctgtcccgtcgagcctcgcatccctagttccctacaagcaaggaaggaaacccgggcaacacgacaccggcggtgccagtgccacggaaaattagccggctccctccccgacgtccggcggcggccgagcaacggtgctggctcccaacatggagacatataccacagacgacgcgcttaccattatggggtttggaaaattccaagcgcttgttcttttctacgctggaatgggctgggttgcagaagctatggagctcatgctcttgtcgtttctcgggccattcatacgagaggagtggaacgtctccccagagaacgagagcctcctttcgagtgttgtctttgctggcatgctgctaggtgcctgtgcttggggctttgtttccgacaaatatggacggagcggtattggtagtggtttgctcatggcatccggctggactagatttgcttcgtcagcaaactaactagccatgtcagcaatctacctcatacaatgattcacaaggattacagggagtgggtggcagccatgtgtttatatcttggtttttggagtttgttcctgcacaaaatcgtggcacttggatggttattttctcccttttctggactctcggcacgatcttggaagcttcacttgcatgggtcgtattgccagcattgaattggaggtggctgctagtcttcaccgcccttccatgcttcctcttgcttcctttctttggactaacacctgagtctccgcgctacctttgtgcacaaaatagaatgtctgatgccacatctgttctagagagaatggccaacgcaaaccaatcagctcttcccccgggagttctcacgtacaatagacaaacaaaatgtgaccacgacgttctcgctcccgagagtgaatgtcttcttcctgtcagagagaaggaatgcacagttgacaatgccaagagctccgaatctggcagtcttgctgcactgcgcatgctattatcgcgcgaactgctcagatcaactctgcttctttggtttgttttctatgcaaattcctttgcttattacgggttagtattgctgacatcgcagttgagtgatgcaaataaaagttgtgcatctggtgtgtcttttggtctgcgccaaaaggaaatcaatctttacaaagacactttcatcactagtttagcagaaatcccaggtttatttttgtctgctgttcttgttgattggtttggtcgaaaagcttcgatgtggtctatgatgttcgcatgctgtgctttccttggaccacttgtacttcaacagactgagttgttgacaactattcttctatttggtgcccgtgcatgtgccatggggagctttacagtcttgtgcctttatgctccagaggtgtatccaacatttgtccggtcaaccggtgcaggaattgcgaccgccattggtaggattggtggggttgtttgccctctcgttgctgtcgccatgctgcggagctgccatcagatggaagcactcattgtgtttgaggtgatattatgccttgctgcagttgcctgcatgttcttccctgtagagaccaagggccgtggaatggactgatgcaatatcaggcttcagcatctagatgagcttgtagttcatcactgtttgttttatgccatcattatgtacagagaatatacatgtaacatggtgtggatagttcctcaaaatatgtgcaggactttccaaatttgtaagacagattttgtactgaaagacagctggttctgtactgccaaaacactgaaagacagagttgtattactcctcagcatttcttgcaagccagaacctttttggccaaaatacacgagttttgcaggt

SEQ ID NO: 90041 - DNA, 2044 bp, Zea Mays
attcgttgagtgcgcgcgcggcgcggcgcggcggcttgccattacccgtcctctctcttaccccgtcgtcctcttcacctgcaattgagcatttgcttgctccccctccccgacaaaaaccccctgtcccgtcgagcctcgcatccctagttccctacaagcaaggaaggaaacccgggcaacacgacaccggcggtgccagtgccacggaaaattagccggctccctccccgacgtccggcggcggccgagcaacggtgctggctcccaacatggagacatataccacagacgacgcgcttaccattatggggtttggaaaattccaagcgcttgttcttttctacgctggaatgggctgggttgcagaagctatggagctcatgctcttgtcgtttctcgggccattcatacgagaggagtggaacgtctccccagagaacgagagcctcctttcgagtgttgtctttgctggcatgctgctaggtgcctgtgcttggggctttgtttccgacaaatatggacggaggactggtttaatattttcaactctatttactagtggaatgggttttctaagcgctttatctcctaactacttatgcttggtggctcttcggtttctggttggagtaggagtgggtggcagccatgtgtttatatcttggtttttggagtttgttcctgcacaaaatcgtggcacttggatggttattttctcccttttctggactctcggcacgatcttggaagcttcacttgcatgggtcgtattgccagcattgaattggaggtggctgctagtcttcaccgcccttccatgcttcctcttgcttcctttctttggactaacacctgagtctccgcgctacctttgtgcacaaaatagaatgtctgatgccacatctgttctagagagaatggccaacgcaaaccaatcagctcttcccccgggagttctcacgtacaatagacaaacaaaatgtgaccacgacgttctcgctcccgagagtgaatgtcttcttcctgtcagagagaaggaatgcacagttgacaatgccaagagctccgaatctggcagtcttgctgcactgcgcatgctattatcgcgcgaactgctcagatcaactctgcttctttggtttgttttctatgcaaattcctttgcttattacgggttagtattgctgacatcgcagttgagtgatgcaaataaaagttgtgcatctggtgtgtcttttggtctgcgccaaaaggaaatcaatctttacaaagacactttcatcactagtttagcagaaatcccaggtttatttttgtctgctgttcttgttgattggtttggtcgaaaagcttcgatgtggtctatgatgttcgcatgctgtgctttccttggaccacttgtacttcaacagactgagttgttgacaactattcttctatttggtgcccgtgcatgtgccatggggagctttacagtcttgtgcctttatgctccagaggtgtatccaacatttgtccggtcaaccggtgcaggaattgcgaccgccattggtaggattggtggggttgtttgccctctcgttgctgtcgccatgctgcggagctgccatcagatggaagcactcattgtgtttgaggtgatattatgccttgctgcagttgcctgcatgttcttccctgtagagaccaagggccgtggaatggactgatgcaatatcaggcttcagcatctagatgagcttgtagttcatcactgtttgttttatgccatcattatgtacagagaatatacatgtaacatggtgtggatagttcctcaaaatatgtgcaggactttccaaatttgtaagacagattttgtactgaaagacagctggttctgtactgccaaaacactgaaagacagagttgtattactcctcagcatttcttgcaagccagaacctttttggccaaaatacacgagttttgcaggtactccagatcattttgtaatatgtattaacgtctttggatgagctcataataagtttattaattt

SEQ ID NO: 90042 - DNA, 1970 bp, Zea Mays
ttcgttgagtgcgcgcgcggcgcggcgcggcggcttgccattacccgtcctctctcttaccccgtcgtcctcttcacctgcaattgagcatttgcttgctccccctccccgacaaaaaccccctgtcccgtcgagcctcgcatccctagttccctacaagcaaggaaggaaacccgggcaacacgacaccggcggtgccagtgccacggaaaattagccggctccctccccgacgtccggcggcggccgagcaacggtgctggctcccaacatggagacatataccacagacgacgcgcttaccattatggggtttggaaaattccaagcgcttgttcttttctacgctggaatgggctgggttgcagaagctatggagctcatgctcttgtcgtttctcgggccattcatacgagaggagtggaacgtctccccagagaacgagagcctcctttcgagtgttgtctttgctggcatgctgctaggtgcctgtgcttggggctttgtttccgacaaatatggacggaggactggtttaatattttcaactctatttactagtggaatgggttttctaagcgctttatctcctaactacttatgcttggtggctcttcggtttctggttggagtaggagtgggtggcagccatgtgtttatatcttggtttttggagtttgttcctgcacaaaatcgtggcacttggatggttattttctcccttttctggactctcggcacgatcttggaagcttcacttgcatgggtcgtattgccagcattgaattggaggtggctgctagtcttcaccgcccttccatgcttcctcttgcttcctttctttggactaacacctgagtctccgcgctacctttgtgcacaaaatagaatgtctgatgccacatctgttctagagagaatggccaacgcaaaccaatcagctcttcccccgggagttctcacgtacaatagacaaacaaaatgtgaccacgacgttctcgctcccgagagtgaatgtcttcttcctgtcagagagaaggaatgcacagttgacaatgccaagagctccgaatctggcagtcttgctgcactgcgcatgctattatcgcgcgaactgctcagatcaactctgcttctttggtttgttttctatgcaaattcctttgcttattacgggttagtattgctgacatcgcagttgagtgatgcaaataaaagttgtgcatctggtgtgtcttttggtctgcgccaaaaggaaatcaatctttacaaagacactttcatcactagtttagcagaaatcccaggtttatttttgtctgctgttcttgttgattggtttggtcgaaaagcttcgatgtggtctatgatgttcgcatgctgtgctttccttggaccacttgtacttcaacagactgagttgttgacaactattcttctatttggtgcccgtgcatgtgccatggggagctttacagtcttgtgcctttatgctccagaggtgtatccaacatttgtccggtcaaccggtgcaggaattgcgaccgccattggtaggattggtggggttgtttgccctctcgttgctgtcgccatgctgcggagctgccatcagatggaagcactcattgtgtttgaggtgatattatgccttgctgcagttgcctgcatgttcttccctgtagagaccaagggccgtggaatggactgatgcaatatcaggcttcagcatctagatgagcttgtagttcatcactgtttgttttatgccatcattatgtacagagaatatacatgtaacatggtgtggatagttcctcaaaatatgtgcaggactttccaaatttgtaagacagattttgtactgaaagacagctggttctgtactgccaaaacactgaaagacagagttgtattactcctcaaaaaaaaaagaaaaaagaaaaaaagctaacaaaaaaaaaaaaaaa

SEQ ID NO: 90043 - DNA, 703 bp, Zea Mays
agttatataacatgcttaattgatctgtaaaactgccatcaattaagaatcatagaacaggttcaataccagagtatcccatccatttggaattttggatctactcgttctactttactgatcgcctttttatgtgtgcctatggttctttagactctaaacatgctttgccagtttcgttggtcaagttgtgttgcagttgcagcagagtatgccttcagctaattcccttctttcttttctaggtgtatccaacatttgtccggtcaaccggtgcaggaattgcgaccgccattggtaggattggtggggttgtttgccctctcgttgctgtcgccatgctgcggagctgccatcagatggaagcactcattgtgtttgaggtgatattatgccttgctgcagttgcctgcatgttcttccctgtagagaccaagggccgtggaatggactgatgcaatatcaggcttcagcatctagatgagcttgtagttcatcactgtttgttttatgccatcattatgtacagagaatatacatgtaacatggtgtggatagttcctcaaaatatgtgcaggactttccaaatttgtaagacagattttgtactgaaagacagctggttctgtactgccaaaacactgaaagacagagttgtattactcctcagcatttcttgcaagccagaacctttttggccaaa

SEQ ID NO: 90044 - DNA, 2440 bp, Zea Mays
ataatctcgagcgcatgccgtatgcgaaagaaaaaatctctcgtctgcagtccagcttggaccgtggggaagcagcatatcctttgcggccgcaagagacgcggcgtagaacaaaggagccgccaagacggcaaggcgccaaggcgaccggacaggcctaggcgaagcgggcgcagctcctgccggtggtgggtagtggccctagcaataaacatcttgcccaaccggctctcgctacgcgcctacgcttcgtcaacaccggaaccgcccccaccccgccccgagcgccaattgcaccgccgctcccggccaaaccggccaagtcaacggcgcatccacttctccttaccatcccggaggtaatcttgcgccgattcggtgccgatttgcgccatccgcgaccggaggctccgccgggtcttgtgttcttgcggggcgggggctcaggacaacctggcctctgcttgattggattcggggcgttcggcgcctccagctcgcgatctttcctgccggtttcgtcgaccgctggtcaacctggccggtcggtcccgggggctcttcacctccgtgctgcctgccaccgtcgctttaggtcggtatagtacagctgcatcctctctttacttgttggattggatccaccggtgtctatctcctctcctgccaggtcacggcctaattcgtggaattttgtttggtggtgcatatctccagtcaagtctcggccaagattttagctatctccggtcaaaaggctttaccgattcttggattggtggcttcttgggggcgagaagccggttcctgtttcgtctcttgtgctccagcatgttctgtagcacaccggttccccatctccagtgaaggtgttcgtgtgctcttggttttgtgcctcccggaatcgttcccggaaagctacttttggccgctgcggcgatggcgtcgagcaccagcgagatggccgaggggaaggagaagctgaagaggtccggcagcttgggaagcaacgatacgtatgtgcgtgcagacaagattgatcttacgagcctcgacatccagctggagaaccagctcaccaagacctggggcaaagccaatctcaaatcccaggggccaaaggaggagtgggagatcgaccttgcaaagctggagatccgctatgtcatcgctcaggggacgtatggcacggtctaccggggcacctacgatggacaggacgtcgcagtgaagcttttggattggggagaagatggttttgccacagaggctgaaactgctgctttacgaacatcatttaagacggaggttgctgtttggcataagctcagccaccctaatgttacaaagtttgttggtgcatctatggggaccacagaccttaagattccatcaaacaattccaatggtgctgcacgtacaaatttgccagcaagagcatgttgtgttgtggtagagtatcttgctggaggaactttgaagcaatatttgataaagaatagccgacggaagcttgcttataaagttgtggtccagcttgcattggatttggccagaggattgagctatctgcactccagaaagattgtacatcgggatgtgaaaagcgaaaacatgctgcttactccacagagaaaccttaagattgccgatttcggtgttgctcgtgttgaggctcagaatccaaaggacatgactggtgcaacaggcacacttggttatatggctccagaggttcttgatggtaagccatacaacaggaagtgtgatgtttatagttttggcatttgtttatgggaaatctattgctgtgacatgccttacccagacctaagttttgccgatgtctcatctgccgttgttcaccagaatttgcgcccagacattcctcgctgctgcccaagcgcatttgcgaatgttatgcggaaatgctgggatgcaaaccctgataaacgccctgatatggatgaagtggtgcagcttttagaggctctggacacgagcaaaggcggtggcatgatacctgatggccaatcatcaggatgcttatgcttcacaaaggctcgtggtccatagatacttttcatggtactcccttcccttggcaacactttccccgtgtaaatgactgggccacagcatgcttctctttgcacgacctgtgcagtcgtcgcttacagttctccatagctgccttgcgatcattgcgtgtcaacctgtagctctcatacgatttttgctgtcctctgtcgacaatcttttcatatactagtgtgctgctgtaattgtggttctaaaagagatttggcatacgcgttacactcttgaaactgctgtatgatcagtataaatctttactctgattattatttccatttgtgctaagaattgagtacaagaatggcctgaaataaattcgtgtttagctgatcctgtgctt

SEQ ID NO: 90045 - DNA, 2364 bp, Zea Mays
ataatctcgagcgcatgccgtatgcgaaagaaaaaatctctcgtctgcagtccagcttggaccgtggggaagcagcatatcctttgcggccgcaagagacgcggcgtagaacaaaggagccgccaagacggcaaggcgccaaggcgaccggacaggcctaggcgaagcgggcgcagctcctgccggtggtgggtagtggccctagcaataaacatcttgcccaaccggctctcgctacgcgcctacgcttcgtcaacaccggaaccgcccccaccccgccccgagcgccaattgcaccgccgctcccggccaaaccggccaagtcaacggcgcatccacttctccttaccatcccggaggtaatcttgcgccgattcggtgccgatttgcgccatccgcgaccggaggctccgccgggtcttgtgttcttgcggggcgggggctcaggacaacctggcctctgcttgattggattcggggcgttcggcgcctccagctcgcgatctttcctgccggtttcgtcgaccgctggtcaacctggccggtcggtcccgggggctcttcacctccgtgctgcctgccaccgtcgctttaggtcggtatagtacagctgcatcctctctttacttgttggattggatccaccggtgtctatctcctctcctgccaggtcacggcctaattcgtggaattttgtttggtggtgcatatctccagtcaagtctcggccaagattttagctatctccggtcaaaaggctttaccgattcttggattggtggcttcttgggggcgagaagccggttcctgtttcgtctcttgtgctccagcatgttctgtagcacaccggttccccatctccagtgaaggtgttcgtgtgctcttggttttgtgcctcccggaatcgttcccggaaagctacttttggccgctgcggcgatggcgtcgagcaccagcgagatggccgaggggaaggagaagctgaagaggtccggcagcttgggaagcaacgatacgtatgtgcgtgcagacaagattgatcttacgagcctcgacatccagctggagaaccagctcaccaagacctggggcaaagccaatctcaaatcccaggggccaaaggaggagtgggagatcgaccttgcaaagctggagatccgctatgtcatcgctcaggggacgtatggcacggtctaccggggcacctacgatggacaggacgtcgcagtgaagcttttggattggggagaagatggttttgccacagaggctgaaactgctgctttacgaacatcatttaagacggaggttgctgtttggcataagctcagccaccctaatgttacaaagtttgttggtgcatctatggggaccacagaccttaagattccatcaaacaattccaatggtgctgcacgtacaaatttgccagcaagagcatgttgtgttgtggtagagtatcttgctggaggaactttgaagcaatatttgataaagaatagccgacggaagcttgcttataaagttgtggtccagcttgcattggatttggccagaggattgagctatctgcactccagaaagattgtacatcgggatgtgaaaagcgaaaacatgctgcttactccacagagaaaccttaagattgccgatttcggtgttgctcgtgttgaggctcagaatccaaaggacatgactggtgcaacaggcacacttggttatatggctccagaggttcttgatggtaagccatacaacaggaagtgtgatgtttatagttttggcatttgtttatgggaaatctattgctgtgacatgccttacccagacctaagttttgccgatgtctcatctgccgttgttcaccagaatttgcgcccagacattcctcgctgctgcccaagcgcatttgcgaatgttatgcggaaatgctgggatgcaaaccctgataaacgccctgatatggatgaagtggtgcagcttttagaggctctggacacgagcaaaggcggtggcatgatacctgatggccaatcatcaggatgcttatgcttcacaaaggctcgtggtccatagatacttttcatggccattttgagacatgctggtgctgtggctattgttgttcttttcgcccttaaatgtagtagaatcagttcattagttatgagactcaatgtcggctggctaaactgcactttctaaaactcgctcgttatggcacttctctcatcgcttggaataaggtcacttgtctaaagaacaaaggtggtcttggagtgcttaatccgagaattcagaatgtggcccttctgatgaaatttgttcataagttttacaatagactggacattccttgggtcc

SEQ ID NO: 90046 - DNA, 3190 bp, Zea Mays
ataatctcgagcgcatgccgtatgcgaaagaaaaaatctctcgtctgcagtccagcttggaccgtggggaagcagcatatcctttgcggccgcaagagacgcggcgtagaacaaaggagccgccaagacggcaaggcgccaaggcgaccggacaggcctaggcgaagcgggcgcagctcctgccggtggtgggtagtggccctagcaataaacatcttgcccaaccggctctcgctacgcgcctacgcttcgtcaacaccggaaccgcccccaccccgccccgagcgccaattgcaccgccgctcccggccaaaccggccaagtcaacggcgcatccacttctccttaccatcccggaggtaatcttgcgccgattcggtgccgatttgcgccatccgcgaccggaggctccgccgggtcttgtgttcttgcggggcgggggctcaggacaacctggcctctgcttgattggattcggggcgttcggcgcctccagctcgcgatctttcctgccggtttcgtcgaccgctggtcaacctggccggtcggtcccgggggctcttcacctccgtgctgcctgccaccgtcgctttagtcaagtctcggccaagattttagctatctccggtcaaaaggctttaccgattcttggattggtggcttcttgggggcgagaagccggttcctgtttcgtctcttgtgctccagcatgttctgtagcacaccggttccccatctccagtgaaggtgttcgtgtgctcttggttttgtgcctcccggaatcgttcccggaaagctacttttggccgctgcggcgatggcgtcgagcaccagcgagatggccgaggggaaggagaagctgaagaggtccggcagcttgggaagcaacgatacgtatgtgcgtgcagacaagattgatcttacgagcctcgacatccagctggagaaccagctcaccaagacctggggcaaagccaatctcaaatcccaggggccaaaggaggagtgggagatcgaccttgcaaagctggagatccgctatgtcatcgctcaggggacgtatggcacggtctaccggggcacctacgatggacaggacgtcgcagtgaagcttttggattggggagaagatggttttgccacagaggctgaaactgctgctttacgaacatcatttaagacggaggttgctgtttggcataagctcagccaccctaatgttacaaagtttgttggtgcatctatggggaccacagaccttaagattccatcaaacaattccaatggtgctgcacgtacaaatttgccagcaagagcatgttgtgttgtggtagagtatcttgctggaggaactttgaagcaatatttgataaagaatagccgacggaagcttgcttataaagttgtggtccagcttgcattggatttggccagaggattgagctatctgcactccagaaagattgtacatcgggatgtgaaaagcgaaaacatgctgcttactccacagagaaaccttaagattgccgatttcggtgttgctcgtgttgaggctcagaatccaaaggacatgactggtgcaacaggcacacttggttatatggctccagaggttcttgatggtaagccatacaacaggaagtgtgatgtttatagttttggcatttgtttatgggaaatctattgctgtgacatgccttacccagacctaagttttgccgatgtctcatctgccgttgttcaccagaatttgcgcccagacattcctcgctgctgcccaagcgcatttgcgaatgttatgcggaaatgctgggatgcaaaccctgataaacgccctgatatggatgaagtggtgcagcttttagaggctctggacacgagcaaaggcggtggcatgatacctgatggccaatcatcaggatgcttatgcttcacaaaggctcgtggtccatagatacttttcatggtactcccttcccttggcaacactttccccgtgtaaatgactgggccacagcatgcttctctttgcacgacctgtgcagtcgtcgcttacagttctccatagctgccttgcgatcattgcgtgtcaacctgtagctctcatacgatttttgctgtcctctgtcgacaatcttttcatatactagtgtgctgctgtaattgtggttctaaaagagatttggcatacgcgttacactcttgaaactgctgtatgatcagtataaatctttactctgattattatttccatttgtgctaagaattgagtacaagaatggcctgaaataaattcgtgtttagctgatcctgtgcttttgttcatttgttcaggccattttgagacatgctggtgctgtggctattgttgttcttttcgcccttaaatgtagtagaatcagttcattagttatgagactcaatgtcggctggctaaactgcactttctaaaactcgctcgttatggcacttctctcatcgcttggaataaggtcacttgtctaaagaacaaaggtggtcttggagtgcttaatccgagaattcagaatgtggcccttctgatgaaatttgttcataagttttacaatagactggacattccttgggtccatatggtgcgggactcctactattcttcggtcagatcccccactgctctcataagaaagggcccttctggtggagagatgttacacaattactcacctacttcagaggatatgccatgcctcgtgtgggtgatggaagcattatcctcttttggcaggatgtttggaacaatcacgcccccatgacggctttcccctgcctctattccttagcaaaaaaaaataaggaatccacaatgctggcattcatcagtaatgtctttagaagataattttcacactcctctgtcatgcaggctcaggaatacattatcttttcatatatgatcgaatgctggaagctagggaagagacggataaatggatttacccttaggaaacaacaagttcatctcctcgaaattctataatatcatctttgcatccatcaatcctctcgcgattttttttatggatttggtctcatctttcggctgactgcctgactgcgtaacccaaacgctgtattaggattcccatcttttgcatatccttattggagttaacctaatgttggttaataaagttatgcgacaacttgt

SEQ ID NO: 90047 - DNA, 2200 bp, Zea Mays
agaacaaaggagccgccaagacggcaaggcgccaaggcgaccggacaggcctaggcgaagcgggcgcagctcctgccggtggtgggtagtggccctagcaataaacatcttgcccaaccggctctcgctacgcgcctacgcttcgtcaacaccggaaccgcccccaccccgccccgagcgccaattgcaccgccgctcccggccaaaccggccaagtcaacggcgcatccacttctccttaccatcccggaggtaatcttgcgccgattcggtgccgatttgcgccatccgcgaccggaggctccgccgggtcttgtgttcttgcggggcgggggctcaggacaacctggcctctgcttgattggattcggggcgttcggcgcctccagctcgcgatctttcctgccggtttcgtcgaccgctggtcaacctggccggtcggtcccgggggctcttcacctccgtgctgcctgccaccgtcgctttagtcaagtctcggccaagattttagctatctccggtcaaaaggctttaccgattcttggattggtggcttcttgggggcgagaagccggttcctgtttcgtctcttgtgctccagcatgttctgtagcacaccggttccccatctccagtgaaggtgttcgtgtgctcttggttttgtgcctcccggaatcgttcccggaaagctacttttggccgctgcggcgatggcgtcgagcaccagcgagatggccgaggggaaggagaagctgaagaggtccggcagcttgggaagcaacgatacgtatgtgcgtgcagacaagattgatcttacgagcctcgacatccagctggagaaccagctcaccaagacctggggcaaagccaatctcaaatcccaggggccaaaggaggagtgggagatcgaccttgcaaagctggagatccgctatgtcatcgctcaggggacgtatggcacggtctaccggggcacctacgatggacaggacgtcgcagtgaagcttttggattggggagaagatggttttgccacagaggctgaaactgctgctttacgaacatcatttaagacggaggttgctgtttggcataagctcagccaccctaatgttacaaagtttgttggtgcatctatggggaccacagaccttaagattccatcaaacaattccaatggtgctgcacgtacaaatttgccagcaagagcatgttgtgttgtggtagagtatcttgctggaggaactttgaagcaatatttgataaagaatagccgacggaagcttgcttataaagttgtggtccagcttgcattggatttggccagaggattgagctatctgcactccagaaagattgtacatcgggatgtgaaaagcgaaaacatgctgcttactccacagagaaaccttaagattgccgatttcggtgttgctcgtgttgaggctcagaatccaaaggacatgactggtgcaacaggcacacttggttatatggctccagaggttcttgatggtaagccatacaacaggaagtgtgatgtttatagttttggcatttgtttatgggaaatctattgctgtgacatgccttacccagacctaagttttgccgatgtctcatctgccgttgttcaccagaatttgcgcccagacattcctcgctgctgcccaagcgcatttgcgaatgttatgcggaaatgctgggatgcaaaccctgataaacgccctgatatggatgaagtggtgcagcttttagaggctctggacacgagcaaaggcggtggcatgatacctgatggccaatcatcaggatgcttatgcttcacaaaggctcgtggtccatagatacttttcatggtactcccttcccttggcaacactttccccgtgtaaatgactgggccacagcatgcttctctttgcacgacctgtgcagtcgtcgcttacagttctccatagctgccttgcgatcattgcgtgtcaacctgtagctctcatacgatttttgctgtcctctgtcgacaatcttttcatatactagtgtgctgctgtaattgtggttctaaaagagatttggcatacgcgttacactcttgaaactgctgtatgatcagtataaatctttactctgattattatttccatttgtgctaagaattgagtacaagaatggcctgaaataaattcgtgtttagctg

SEQ ID NO: 90048 - DNA, 96 bp, Zea Mays
caaaggttctagggggcatagttccttcctgcattcagcccatgcttcttggcctcatcacagcgtgttactcttcttcattatctgaagaagaag

SEQ ID NO: 90049 - DNA, 4352 bp, Zea Mays
ctgctgttagattgtgatttcttcttgctgctttcgcccttcactgttgctggaattacagaagatcaggctctttctttgtcagaagttaggaacattgcttctctttggcttctggtaatatggcagcgacgtcgccaaacaacataaggcgcaagtactcgtggtggtgggacagtcatatctgcccaaaaaactcgaaatggttgcaagaaaatctttcagatatggatagtaaaattaagctgatgatcaagatcattgaagaagatgctgaatcatttgcaaaaagagctgaaatgtactaccgacggcggcctgagctgatgaccttacttgaggagctgtaccgtgcataccgagctttagcagaaagatatgaccatgcggcaggagaactccgtcaagcacatcgaaaaatagcagaagcatttcctgatcaggttctaatggacttggatgatgaccttccagcagaaactgcttccattgaaactgacatggacaatccagacatggctccatatttcctctctttcatcaacgctagtgatttgaaaaggaatgctaaagatgaccaagattttgagagactgcagaaagaactagcaagcttgtcacaggaaaaccaagacctcaaggacaggatctcgtccatgttagagcaaggcaacaaggctgagtgcgagatccttcgcctcaaggagtcccttgctcaacaagaagcagaaaaggagtctgcagtttcactatgccagcaatcaactgctagactacaaaacctgaagtctgaaattatgcatacccaggagaaattcaacaggctgaaagaagagatgcaaactgaactacaacctttgaggaaaggagatgaacatttatttttacttgaaagagctaatcaggacttgcacttggagctagataacctgaaacttctgttgaaacagaagcatggcgaagtaaatgaaaagcaagatgagttggaaaagcttcatatctctacagaagaagagcatctcaagcgtatgcaagcagaaatggcacagctttctttggaaaaacagttatcactggcacaagacaaactgaggcatttgactcttgagaagcaggttgaagcacacaagataaaggaggtcgaaacgagcaaagttgtgattcagaaagaactggagaagattcttgaagagaaccaaaggttgaatgaccaaagtcactcttcttcagcagtgataattcgtctgcaggatgagataatttccatgaaaaatgtgcaacgaagattagaggaagagatttttcagcatgtggaggaaaagaagacacttcaacatgagctttcttatcttaaagaggataggagtgacttggagaggaaacactctacaatcaaggaacagataggatctatgaacttgaatttggaatctctacaagcactagcacaagagctgagggatggcaatgttgagctgaaagagattgtcaagaaccatgagagcattgaacttgtgcatatcgataacctaagaaagttggagaggatgtcagagacaaatgcacatttagagaagtctttgtcagctgcaacaactgagcttgagggactgagggagagcaaggtggcattagaagaatcatgcatgcacttcagatccacgattaacactcatcagtctgagcgagctgtgcttgtagcgcagattgaggtaatttctcagaccatggaggagctactggagaagaatgttttcttggagaattccttatctgacgctaatgctgaacttgagagtttaagaatgaagttcaaagaactaaaagaatcttcagaagcactccaaaatcagaattctgtacttcaatctgataagagaactcttgtccaccaggttgagggcatcactgtaactctgctgaatttggaaaggcaatacaaagaactcggaaggcggcactcagatctgcagaaggagaaggacttggtgcttgatgaagtgatcaagatacaggaacagataaggcttgagaggaaggagcatgaagattgtacacagtcaagcaacattagatttgatgctctacagaagaagattagtctattgctagaagagggcaggagtagagaggtgcagcttggtgaggaggagctcaagattgtcaaagctgagatagagatatttgtcttgcagcagtgtttgaatgacatgacagaagtaaattctgaaatcgcagaacaactgcgaaagaataaagaaatatgcaaggtccaggagggaaaaatctacagcttatcacagcataatcagaaactaactgaagggattgattcagtagtgagagtattgcatctggatcataagtatgaatccttaggccaaatgaagcttgaaatcattgtgcagctcatcttaaatgagatcagctgcctgctgaataacatatctgatgcccaggatgtgaagcagaaggagcttgttgagaaatcacttgtagttacacttctggagcatttcgggcaagaggtggctgacttgaggtcagagcggaatgtcttgaggcaagatcagcagataaagattgaggaactgctccagctgcagagagaaaaggaggaacttatgaagataagtgatgaattcttggaagaggtggaggctcgtaatcacaaagtggatgagctaaaggctgaggcgaagttcttggttgtaaggttctccgaactgcaagagtctaggaggtcattgcaaagcgagatcaccaagctattacaatcgaactcttttctatcaaatgaactaaatgattccattgaaaaacagaagaggtttgaacatgatttcagcaatcttgttagtgaagcagttagtaaagatatcctcagtgtgatctttagaagccttcatgaagagaggacattgcagctgaagtctttgcataataactttggctgtcttcaaacagcaggcggtgagctttatcaggagatcaagatgatgaacaagaggcttggagacatagaaatggagaacaagtaccttggcaaagaactaagtagaactatgagtgtttatggtggatctattgtgcaaacagcaacaggaaaaggaaatccagggcgaagagatgccaaccttctgaattcaaacaggaaaatccaacaagattgtcatgtaaatctggaggtggaacaagaggaagtttgcaatgctgattttcaggagtcaaatgaaacactacaggatgaggtccgtaagttaaggagcgaagtggaaatgcttaggagcaaggagaaggctgtgttcaacatcaaatcctgtgatgaagagatcatgaaattgctggctaacatgcaaatggctatcatgaatgcagctctgttcaaagagaaggttcttgagctcatcataacatgcgagagttttgagataagtgccatggtacagaaggaggttctgaaggaagaaatcatacaaagaaattcatatgtagatgagctgaaggacaaactaaatgctgttgagattgaaaacagaagactgaaggtcgacctaaatggtgatttcacaatgttagggtcattgcagactgaagtcagtgccctggaggagcaaaccttatctctcgctaacgaccacttgcatacaaataagctcaggatggaggaaaatgcattatctccacaccttgtgaagaccacaacaagatccagtggcgaagaaaatgcattgaggatggtgaaggggatggagctgcaaaaattgcatggaacaatcaaagcccttcagaaggtggtcacagatactggtgtcctccttgaacaagagaggcttgatttcaatgccaatttaaaagaagcaaagaagcagatcgaggtgctaaagctcaaggagatcttggatgatgatataattgaaatgaactacgagcaaatgttaaaagacatacagcttgacctcattcaaacttcttcaggccagaaaaccagtccgtttggtcaggaaaagaaaaatgtagcacaagtagatgacaagatggtaaactcacgcggttctattgggccgagccatggacatgtggctgacgacctaagaccgccgcaaagtgagtcatttgggagagagaacaatttaatggtcgtgaaagagctcagcattgacaagcaagagttaccgaggtcgcttgctatggagccacacgaggagtggagaaacaaggtcgtagaaaggttggcttctgatgcccagcgactcagtgccctccagtccagcatccaagaacttaaaacgaacgccgaaacatccgaagaggtagagctcgggagtgtcaggtaccaaataacagaagct

SEQ ID NO: 90050 - DNA, 787 bp, Zea Mays
aacagaagctgagggtaccatcatgcagctgatcgataccaacagtaagttatccaagaaggccgaggagttcacgtctcccgatggccccgatgcggagaacagtgacttgaggagcaggcatcagcgtaagatcttggagcgtgcaaggaagatgtccgagaagatcgggaggctggaggtggaaatgcagaaggtccagcaggctctgctcaaatacgaggaggagcagagtaccaggagtacctcaaaagccctgcagcggcggtccaaagtgcagctcgtggagtatctctacggccggcggcgggacagtcgcaaacagcagcggaactcgccttgtggttgcatgagagcgaaaaccatcgacgactaacgacgtgcctttcatgccgcttccttttttttaaggcgtaatggaaggccaatcttgtcagcttcagaatgtatcaggtcttatgtttatttcatgttcaatgtagataaatgagtggctgtataagggctgtaaattgtagccatgtacaataaccctctgttattaatgaccaattggcttgtaaaattattgcttaacagttgctgcttgtagttgtcgcttctgatcatgttccataggaggtttgcactcgaaagagtatatttctttccataaatagccaggagaggacattgaattgaattggaaattggaagatatcgtttatgtgaacttttgtacaaagatgaaaaataggggaactagtatttggtaattttgctgttgcaaggttgcctaccgtgatta

SEQ ID NO: 90051 - DNA, 1841 bp, Zea Mays
gctagacacatatattaggagtttctcaagtgtaagtggcgacaagaaacaatatctgtactcatccttaccacatcatcacctacttagaaaccttaaccgagtcaacaaaaaaaaagaatagcatgcatgattatatgtcaacatccatgaccaagcatgaacttctcaaggtcggtagccccctctctaactcgccaccaaaatccaatatatatatatatgtacaaacacacatgaaaacttcaagacaccacagtactacagacattctctttctatctgcctctccaatcaaaccccaaattcattcctatcaaaatggcacctctgtcagggccaacaagcaagagtaagaagagagctctccgacacgtcctcctcctctgcctcctcctcccatgtatctcccaaccactcccggctccttccccatctccaacggcggcgcctccggcgacgacgcttcccctctcgccgttcaacgatcgcctcgacgcggcgtacatcgcgctccaggcgtggaagcacgccatcatcgaggaccccaagaacctgaccgccgactggtgcgggcccttcgtgtgcaactacaccggcgtcttctgcacggcggcgcaggacgacccgcacatcctgaccgtcgccggaatcgacctcaaccacggccgcatcgccgggttcctccccgaccacatcggcctcctggccgacgtcgcgctcatccacctcaactccaaccgcttccacggcacgctgccgccgtccatgcagcacatgcgcctcctctacgagctcgacgccagcaacaacctcttctccggcgggttcccgtcgttcctcacctcgctgccgtcgctcaagtacctggacctgcgcttcaacagcttcgacggggacctgcccgacgccgtgttcgggcggcagctcaacctggacgcactgtttgccaacaacaaccgcttcaacgtgaccctgtcgtcgcagagcctgaccaactccacggcgtcggtcatcgtgctcgccaacaccgagctcaccggctgcctgccgccgagcatcggcgacatggccgacacgctggtggagctcatcctcctcaacaccagcatcagctcctgcatcccgccggagatcggcaagctcaagaagctcagggtgctggacctcagccacaacgagctcgccggggagctgccggagagcgtcggagacatggagagcctggaggtgctcaacgtggcctacaaccagctgtccggcgtggtgccggagagcatctgcctgctgccgaagctcaagaacctgaccgtcgccggcaactacttctgcggcgagccggtgtcgtgcctccacgtgcccctgcgcgacgaccggatgaactgcatccccgagtggccccaccagcgcacgcacgaggagtgcatcgccttcgagcaccgcccgccggtgcactgcggcgccaacggctgcattgttcatcacccgctgtgaagctccggcatacgcatacgcatgcatgcatggccatacatgcatgtgggttctatcgaaacggtgacggtctttctgcgactaaaaaatggtatttgctataggcaaagttgttttggatcataaattcgcgtgattttgatttgtgtcgtcggtgccaaaaacgtgtatttggtagcgaggactgggagtgggtgtattagttttttcgcctttgttcttttccttctagctttttgttacctgcacataaaggcatacatgcatacggctaatgtaaacccaacaaaaatgtgacatgtaactatatatgcctaatttaagaatttgaataagggggtcaaaaa

SEQ ID NO: 90052 - DNA, 1617 bp, Zea Mays
atggcgccactgaacggttgccccctgccaaccacctcgaccaccggtcctcctcatctcctcccctcctccgcctccatatccgccttcatcgcctccgaccctgccctcacgctcctccacacgcgatgcgtctccatggcacacctgcgccagctccacgcggcgctcgtcaagtccggcctcgccaaggaccccatcgccgccagccgcgccgtcgcattctgcgcgggccccgggcgcgacgtcttatacgcggagcgcctcgtgaggcaccacccgaggcccaactccttcatgtggaacaccgtgatcagggcgctgtccgacggggcccgaccggacgccgccgtggcgctgttcgtcgacatgctcagttctcccacgccgcccgaccggcgctctttcccatctctcctcgcggcgtacgcgcgcctggggcgcgctggcgacggcgaggcgcttcacgggatggcgctgaagctcgggctcgccggggacgcgtacgtacgcaacgccacgatcgccatgtacgcgtcgtgcggccgcgcggacgaggcactggcactgttcgggcagtgcccggagctagacgtggttgcgtgcaacagcgtgatcgtggcgctcgcgagggccgggcgcgtcgacgaggcgcgctcagtgttcgacgccatgccggagcggaccgtcgcgacgtggagcgccatggtgagcgcgtacgcgcgcgccgcgaggtgcagcgaggccctggcgctcttctccgcgatgcaggcggacggcatggagccgaacgccaacgtgctcgtcagcgtgctgggctgctgcgccagcctcggcgcgctggtccagggcgcgtgggtgcacgagtacatagaccgccacggcgtcgccatgaatgcgctcgtcgtcaccgccttggtggacatgtactgcaagtgcggctccgtagacgatgcccgccaggtgttcgatgccgcaaggtcgcaaggcttggccaagctatcgtcttggaactccatgatgcaggggttagcggtgcacgggcagtggcgagaagcggtcgccttgttctcggagctgaaatcctacgggctgagccccgacaacgtcaccttcatcgcggtcctgacggcctacggccactccggcatgcccgacgaggctcaggccgcgttcgcgtccatgtccagtgaacacggagtggagccggggatcgagcattacggctgcctcgtggatgccctcgcccgcgccgggcggctccgggaggccgaggacgcgatccgggcaatgccgatggcgccggacgcggccatctggggcgcgctgctctccgggtgccggctgcacggcgacgccgagctgggtgcgcgcgcggcgcgcgaggccgtgcggtgcgatccgcgcgacagcggcgcgtacgtgctcgcagccagcgtgctggcgcgtggtggagaccccggccgcggcgcgggcatcaggggccggatgagggaggccggcgtcggcaaggtccccggttctagcatgatcgaggttaacggcgtcgtgcacgagtttgtgagctagcgtagccagtagtgtagtgtactaatccacgatacattgggacaagct

SEQ ID NO: 90053 - DNA, 1800 bp, Zea Mays
gaggcacgagagcgccatacatacacaaacagcgtacaagactcaaccactccctccttgtttgtttatataccttggcaccaccaaggcagcaccctgtaaactaactaccaaagccgaagaaggcggcttgccctgcccgtcgccttggtgccgcgcgcgccatggccaagagcaagtcgtccgccaaggccggccccccgctcctcggcaagtacgagctcggccacctcctcggccggggcaacttcgccaaggtataccacgcgcgctgtctcggcggaggcgaccccgtggccgtgaaggtgctggacaaggccgggttggccgccacgggcatggcgtcgcgtctcctgcgcgaggtgtccgccatgcgccgcctgagccaccccaacgtgctccgcctccacgaggtgctggcgacgcgctccaaggtgtacctcgtgatggagctggccccgggcggggacctcctgacccggctggcgtcgctgccgtcgcgcaggctccccgagcacgcggcgcggcgcgtgttcctccagctggcgtcggcgctcatctacagccacgcgcgcggggtgttccaccgcgacgtgaagccgcagaacgtgctgctggacgccgagggcaacctcaaggtgtccgacttcggcctcgcggcgctcccggactcggtccgcgacgacgggcgcctgcacacggcgtgcggcaccccggcgttcgcggcgcccgaggtgctccggcgcagggcctacgacggcgccaaggcggacgcgtggtcctgcggggtcatcctcttcgtcctcctcgcgggccacctccccttcgacgacgccaacatcgccgacatgtgccgcagggcgcaccgccgggagtacacggtcccgcggtgggtgtcgcagccggcgcgccgcctcgtggcgcgcctgctggacccgaacccggcgacgcgcctcgccgtcgcggagctcgccggccacccctggttcaagcgctcgctcagcgtggactcccagctcggcggcctcctggacggccaggcggagcgcgagctggcgttccaggccccgccggcgttgaacgccttcgacatcatctccatgtcccccgggctggacctgtcgggcctgttcggcgagggcaggcgccgccgcgagaagcggttcatgacgacggcgtccccggagcgggcggtggagcggctcgcgcaggccggcgcgaggctcggctacttcattgtggggaagaagggggccgagcgcctgccgctgggcgtcctgccgggcctcgtggccatgtcgatggagatgtcggaggtgtcgccggagctgatgctggtggagctgaggctggagggcggccacggcgacgaggacgaggcgttcgggtgggaggagctccgggttgagctgggggacgtggtaacagcatggcacgtgagtgaagaaggttaaaaattcgcaagaggaaatgcgagaacgatttcgcaggtgtatcagtgtagcatgtatagccgtatagcaagtgcgcatctcatctcgtgtacgtgaaattagttggttaggacgaacagcagcgtgtgatgttggggattaactagactggtagtttcaatcaaatgtgtgatgtttgggattatttgtcaaattagtacgtatactaaagaccttactaggtacctcgcgtgattgttgttcaagtgtactagctaccaagctagtgacaagaatgttgcaaggatataccagaggaaactgttcaaagaatgagcttaacttgaactgattgcagcattaaaac

SEQ ID NO: 90054 - DNA, 1122 bp, Zea Mays
ggaatgtcagaagtcagaacagctcgttcgtccgtcaccaactcgccatagatgatagaacgctatcccatcttcacacacaaaaatatccgcgcgaccccgacctcccccctcccactccgggcagcagccagcagccagcaggcatggggatacccgtggtggttcccgtcgcggcggcctactcgtgctcctcctccctcgccgcgccaccgagggccgccgccgccgcggcgagggcgccgagccgcgcgcacgtcgcggcggccgggatgtcctccagggcgtcctccttcgtcgggggcagcggaggcgacctcgcggcggtggccgcgtcggtagccgcgcggcccaggagggcgggctccgggggaggcggcgcgctcgggtgcaagtgcctcttcgggctcggcgtgccggagctcgccgtcatcgccggcgtcgccgcgctcgtgttcgggcccaagcagctccccgagatcggccgcagcatcggcaagaccgtcaagagcttccagcaggcggctaaggagtttgaaactgaactgaagaaagagcctggggaaggcggcgatcagcccccacctgcaactcccacagctgtaagtggcggggaggagaaggggcttgaggcatctagtagcaaggagagcgcgtgaggatcaggatctatctagtgttgtttatgaaaattgtattctgggcttctcgagttagcagttcatatccttttaaccgcatcgcggtttcaggccatgtagcgatattgtttgtagtttgtaccgggaataacatatttggttgagcttctacgtattgaagaaacaacttatctgtgaagctgacgcgaacaaattctatttattatctatttttagtttgttctgagaagcagctgttgtagaagtctattgtttggtacatattctgcttaaatatgtgaacaaaatgtgaaataagctgtacaaattctgcttaaatatgtgaagtctaatgtaaaataagctgcttggtacagatttacagttttttaagcagaaatgtatcgaacaagatgtttatgtaacatcttactagttcaattgtttcttaaaataaactaaaagcagagaataaacataa

SEQ ID NO: 90055 - DNA, 1139 bp, Zea Mays
agctcgttcgtccgtcaccaactcgccatagatgatagaacgctatcccatcttcacacacaaaaatatccgcgcgaccccgacctcccccctcccactccgggcagcagccagcagccagcaggcatggggatacccgtggtggttcccgtcgcggcggcctactcgtgctcctcctccctcgccgcgccaccgagggccgccgccgccgcggcgagggcgccgagccgcgcgcacgtcgcggcggccgggatgtcctccagggcgtcctccttcgtcgggggcagcggaggcgacctcgcggcggtggccgcgtcggtagccgcgcggcccaggagggcgggctccgggggaggcggcgcgctcgggtgcaagtgcctcttcgggctcggcgtgccggagctcgccgtcatcgccggcgtcgccgcgctcgtgttcgggcccaagcagctccccgagatcggccgcagcatcggcaagaccgtcaagagcttccagcagtaaaattgttccgtgatccatccaacttctctcgcaggcggctaaggagtttgaaactgaactgaagaaagagcctggggaaggcggcgatcagcccccacctgcaactcccacagctgtaagtggcggggaggagaaggggcttgaggcatctagtagcaaggagagcgcgtgaggatcaggatctatctagtgttgtttatgaaaattgtattctgggcttctcgagttagcagttcatatccttttaaccgcatcgcggtttcaggccatgtagcgatattgtttgtagtttgtaccgggaataacatatttggttgagcttctacgtattgaagaaacaacttatctgtgaagctgacgcgaacaaattctatttattatctatttttagtttgttctgagaagcagctgttgtagaagtctattgtttggtacatattctgcttaaatatgtgaacaaaatgtgaaataagctgtacaaattctgcttaaatatgtgaagtctaatgtaaaataagctgcttggtacagatttacagttttttaagcagaaatgtatcgaacaagatgtttatgtaacatcttactagttcaattgtttcttaaaataaactaaaagcagagaataaacataa

SEQ ID NO: 90056 - DNA, 679 bp, Zea Mays
tccaaatttatcgcttgcaacgtccccaatccggtgaaagccgggaaaataacgccatggctatcctcgccgttgcctctccgttcaaaaccctaaaccctagcccgccggaccacagccgcacccgcaggcgcctcccctcctccattctccaccttccgctaccggtgccacgatgtcgccgcctccggtgctccgctaagtacagtgaagcggcggcgccgtccgcgtcgacaacgacgccgcggccgtctgagataccttggagcaaggatatctgcaattcggtgcggctcattgggactgtgggcaccgatgtcgagctgcggcagctgcccagtggctccgctgttgcgaggggtcgcctcgccgtatggaagtcggccaccgagactacatggtattactgatttgattggcgctaggcaatgttaattcttctaccatttctagcgtcacctatttatgtccatattgttgggggccggcagtggacagtggttcgactatccgggtcattcgcagtaggtgtttgtagctttgtgagtgtgagggatgcgtgattcttgaaaggtcgacgaagacattcggtaatatgttggctagagcagtttgtgcaattgatgtattgtagcaacaagaaagatgattgcccagaccatggaattgagttttgttt

SEQ ID NO: 90057 - DNA, 1322 bp, Zea Mays
tccaaatttatcgcttgcaacgtccccaatccggtgaaagccgggaaaataacgccatggctatcctcgccgttgcctctccgttcaaaaccctaaaccctagcccgccggaccacagccgcacccgcaggcgcctcccctcctccattctccaccttccgctaccggtgccacgatgtcgccgcctccggtgctccgctaagtacagtgaagcggcggcgccgtccgcgtcgacaacgacgccgcggccgtctgagataccttggagcaaggatatctgcaattcggtgcggctcattgggactgtgggcaccgatgtcgagctgcggcagctgcccagtggctccgctgttgcgaggggtcgcctcgccgtatggaagtcggccaccgagactacatgggtaacactacaattctgggatgatatggcaattgtgtcctctgagcatgttaagaagggtgaccgaatatttgttgctggacggcttgtgtcagatactgttgatgaggggcctgagaagcggcacgtttactacaagcttgcagttcaacagttgaatttcatcgagtcccagccagttcgattatatgaatcagatgcaagccaggatgccccaggtggaaggcgtgctgattattttaactttacctctaattcaactgacgaaaagaatagggataacatgagctcttctcggtcaactgaagagctgtggcaagcgttctttgctaatcctcttgactggtgggataacaggacaaataagaagaacccaaggtatccagacttcaagcataagcacactggtgaagcgctatgggttgatgggaggaacaaccctaactgggttacatctcagctggcagttttggactcaagaatgagttctctgcaagacaatgagagaaaaccagtctcttacatgtatgctgacgagttcatgacattggaaggcaatcgataatctttatgaacgaggaagcttcgcagcccccattttttgtgcagcttggctggctgttatgacgattgtgatgtcggagtagctaaccttgctgtctcagttttgttgtacatatctgagcggctctggagggttgttatgagcgtacgtagtatcatgtattcggtagactgtaaggtcgctatgagcctatagcaggcataaacaaatgggagaaacccttgcttcttctgactctgttagtagtattatctggtttgtgacatggtttttaactatgctgttacgtcgagcggttatggtatgtaaaccgtggcctctcatgaagtttttccttttgtcttcggaagaatttgg

SEQ ID NO: 90058 - DNA, 318 bp, Zea Mays
ctgccctcgtcggcgcagcacccgcccaagaactccgcgaagggcgcggcgaggccgtcgaaggccttgaacagcagctcgaacttgtcgtgggggacgctgttggtggactcggcgccgtcggggaggccgtcgacgcgcgggagcgggagcgccacgatgtcgacgcgcggcgcggcggcggggcgcagcggcgggaggcgggcgacgttgcccggcgtggagacgaaggacacgcggtggccccgcagcgccagccgctccgcgagctccaggtacgggagcaggtggccgaacccgagccacgggaagatcaca

SEQ ID NO: 90059 - DNA, 202 bp, Zea Mays
tgcacccttaaaatatttgccccactataccttcaccactgctaggtacgtggggtattacacaaaaattgcctcgatcgatcttcacgtcacaatataataaatgcgcacaggtattgtcgggtctccaaccattaccaagacgcttccccccatttacatttttttaactcgaccggccggtgatgaatgttgcaaaaaa

SEQ ID NO: 90060 - DNA, 2211 bp, Zea Mays
acgcacgcagacgcaggcgcgcgcacagcgtagggtcgcagcctcccacgcacaggcaggcacaggcaaccgcattttcccttctccacctccatcgcctcctcgatctctcctcccccccgtcccccgctcccccccacccggcgccgactaccaaccgcatgcgccatgcagccggggcccacctcgccgccgcacgaatccccctcgccgccgcacgaggtgacgccacaggaggagcccgcgaccctgcccctgcccggcgaggaggcccagccccagggccaggctgacgacggcgacgcggtcaaagcggcggcgggagcccgggaggaccggaacgacaggagcggcgccaccgcatccgcccgggggaggaagaggcggaggcgcggcggcacctcctccacctccccctcgcccttcccgtcccctgccgccgccgcggggacgacgcggggggtcgtcatggtcaagcgggacctgctcgcgcgctgcatgacgtgcccgctctgccgccgcctcctccgcgacgccaccaccatctccgagtgcctccacacgttttgcagaaagtgtatatatcagaagtttgatgatgaggaagtagaatgctgcccagtatgtaaaattgatcttggctgcacacctactgagaagcttagagccgatcacagcttacaagatgtaagatcaaaactttttccattcaaaagaaagaagattaatgcagaagaagtttcatctagtatttcacttcccactaaaattaaagaaagatctatctcttcattagtcgtcgatacgcctaaagtaaaaccaacaggcttgactggacggcgaacaagagcagttgccagaaaagctgctgctgtcgccactgccactgtcaccttgcatgaacttcgtccagttattgaagatcctgtgaaaaaggaaattgatagttgtgacagccatcctcatgattcaaatttgcctgctagttcaagcaaagcaccacaaataagaagacagatatcacctaacgtggaggcatctaaccgttcctccaacaaagataccgaaggtgatagtaacgatgagctggcagataagtctgagctctggcgtcctttaaattgtttagtagaagctgccaacaggacaaaatcctttaggtcaagttcacagagtccagttgttaagggagagcaacccaatggctctacgagtagtacatttgctagcaaagcaaaggcaagggagaatctggagaagtccaaaattcaggatgacaaaaaagatgttcccatgccaccagtgctgccaaaaagaagagctcaaggtactgcgcggaagaagagagatcgtcttcaagctccaactgatgtgaagcctgatgctgcagttgcacagaatgcaaagaagttcagctccatatggttttcattgattgcctcatttgaccagcaaggagatccacctttaccacagatcccttcccactatttgcgaataaaagacggaaatatccctgcttcatctatcctaaaatacctcatgcaaaagctcagtcttccaagtgagtctgaggtggaaataaagtgttgcgagcagccagtgaacccttcacaacctctgcgcaatttagtagagctgtggctgaagggaagagcaacacagacaactcagaccatgaccggttcgtccgctaaagagtttgtaatggtgctaacatacggacggccaaaggctcctgcaatgtgaaggcaccatgcaaacattcaggccctcaaacctatttttcctgtgaggcagctatagccagacaattgttggcgaggtcatcaaagataactctccctgacgacacagcctcacaatatgcagtggctggctcacttcagagccagcccaagcccttgatgtcacattcatgtattctttttttatagcatatgttgtttgattcctttaggatgtccttttcttatttattatacatcgatagtggtatatagatagaaagttgtgattgatacttgtaggtatcattgatgttttgattgggccttaaattatatagggagagaaacttgtagtctttgcttgtaagagatgagcagagttgattgcagagtgtttctgctgtaccgtgacttattgtagcactagcaccgaattgtaaccctatattttgtctttgaactcgttagtgacttatttgtt

SEQ ID NO: 90061 - DNA, 859 bp, Zea Mays
aaatttatgtttgttgactttattaaaaaagggattatcttcattttgtagctttgaatcgcctctcagaaccgagatcctcaaaacccttctcccccctcccggatcgagtgcttgagctccgaccaaatctcgcagcggctgcaattccgagcccgaagagcggatcaggcgaggacgacgccttcgattctgatctgcggtcggcgcgacctagagagaaccggagatgcagcagggcgacggcacggaggcgcaggtgacgtgggaggaccagcagaacatcaaccgcttcggtcgcctcaacaaccgcctccacgagctccaggacgagatcaagctcgcgaaggagacgaatgagaaccttgatgatgctgggaatgaactcatcttgtcggatgaagacgttgtacgcttccaaattggggaagtgtttgctcacatgccaagggatgacgtcgagactaggctggagcagatgaaagaggatgcggctaagaagctggagaggttagaggaggaaaaggaatccatcctggcccagatggccgagctgaagaagatactgtacgggaagttcaaggatgccatcaacctggaggaagattagcagtactggagtcgtggcgatttgaccctctttctagttcaggtgctgttttttcccttgctctccggctctcccaaacatcagtcttgtgatgctggcctggttgtgttagcagttctttcaaaacctctattacccagaagaacccagaaaatagttccattcattccgcgggtgtatatgcattgaagttaatggacctgagccgatgaatcccttttcagttcagttttcgctgggtgcatgtgg

SEQ ID NO: 90062 - DNA, 1889 bp, Zea Mays
gcgaatttatttgtttatcaccttttgtttttggggttttcttcccccctcccccctcccctcctctcttcgttcactcctctgcgtccggtcttcttcgtcccctccgtcgccttcacacctgcttgccatttgcgatttcaccgtcccgtcccgtggcgcaacgaccgccgccttccggccacccggtcgcggctcccccggattcgcgcccaccgcgcctccggatcgtctcggagatctgccgctgagggagttgcatataatctgagctggtgctcctcaagtgttcggaagaggtccctgttttattcgtttttgttggtgcgattgcgagtgtaatggaggaagtggaggaagcgaacagggaagccgtggagagctgccacagggtgctcgccttgctctcccagccgcatgaccccgcgcaggccaggagcatagctctgggcacggacgaagcatgtgccaggttcaggaaggtggtctctctactgagcaatggaggagcggggctaggagaagccgggccgtcatgcggaagcgcaagcgcaagccgtcctagagctaagcttgttagcagaagacagaatccagggttcttgacccagaaaggcttcctggacagcaacaccccggtcgtggtgttgaacagcgcccatccttctactacctccgcgcaggtgtaccctagaactggagctctcgtcgatgcacagagcgtgcaccccctcggagtcggaggacctcccaagctggtccagcccttgtccgcgcactttcagttcggcagtgtgccggctcggtatcagttcccgaatcagcagcagcagaagttgcacgccgagatgttcaagagaagcaacagcggggttaacctgaagttcgagagcgccagtggcactgctgggacgatgtcgtcggcgaggtccttcttgtcgtctctgagcatggacggtagcgtggctagcctggacgccaagtcatcgtcgttccatttgatcggtggacctgcgatgagcgatccgctgaacgcgcagcagcccccgaggaggcggtgcacgggccgtggggaggatgggaccggcaagtgcgctgttacagggaggtgccactgttcgaagagaagtaggaagttgcgggtgaagaggtcgattaaggttcctgccattagtaacaagattgccgatatacctccggatgaatactcgtggaggaagtatgggcagaagccaattaagggttcccctcatcctaggggttactacaaatgcagtagcgtgaggggctgcccagccaggaagcatgtggaacggtgcgtagatgattcggcgatgctcatcgtgacatatgagggcgagcacaaccacaccagaatgccaacaactcagtcagcacaggtgtaaagaactcatcatcatcgccgcacctccttccgcaagtgccaccagcacggggtcaggtcaacaatgatttgtgcggagacattttcagctgtcgttgagatgtttggccctgctgctactatccacatgatttgtagcgagaatggagtgggtggtgagcacaagattttcttctctcttatggaggttatcacaatgatgacgaggaagaacaagccattagatagataggacagctgagctgttggtcgggattagtgtgaagaggtggaaaggaaagataaaagttggcgggaatgggacagttgtgtaaacttagtagaatggggaagtagagatagtgctgttcttcttggactaatctgattccattcctcactcacctgtatcaagatagcgtcaaaactgaaaagaagtgcacagcacagaggccgccttttgctgttatagcaattcattcgttcaatgatcagcggtgctgcc

SEQ ID NO: 90063 - DNA, 861 bp, Zea Mays
atggggatgcaggaggaggcgccaaatccctcgccggtggtctatcgggatcggacgaatcggtcgaggcgaccttccatattcccctaccccaccaatggcttcctccttgccctcctcttcgtcgcatcagggacctcactccctactctaggaggtttcgaccgaggaggagcggcccagcctaggtggaagcacctctctagctatgcttctccgcaatcaataaatcatttgcaaagcctcggagcaacggggaaaggaggctgttgcgtcgatggcaggatgaaaggggacatagtcctaaagcagaggctatgcttctctgcgatcaaagaaatcatttacaaaggtctatcacggcttgccactgtttgtccacagtttgctggtcgtgcttctagcctcagagcaaggggaaaggggctgttgcgtggatgtgcttacaacttcacatataacacatccactttccttgcagagatgactggggttcacctttcagagaaagcagttaataagcgtttgaactggttggctgatgaagataacagattggataatgcttggttgtataattcaaaggatgtggttgatagaactggcaggaaggcaaagcagttttgggcaactttgggatacatacttattgcgaagcctaaatttatgctacaaaaggataggttgaatctcatagagacaacactctcttctgaggttgattatgattcaagaaatgaagtgcgtgttggtgctggtgctgaagacaccaacataactggtggtattatccaattgtattggagttctattcttgaaaggtgcttggatacaaacgatcaaagcttgaaggaggcttga

SEQ ID NO: 90064 - DNA, 136 bp, Zea Mays
tatattgcgtgataagcctatgcatttttttcaaaccttcttttatctcctagtggaggtaagtaggttgccctgtatggggtttctttccctcattctctctttagtataaagatgtgcagctctcctccactgt

SEQ ID NO: 90065 - DNA, 1124 bp, Zea Mays
cttatcgcggcttccatgaggagagcacgaattattaacactggtcatctcacccactatttaaaacttaattctacaaacaatgttaaacaatgtcatctacagtttcacattttctattttacgtgattcatcgaagatagtctaaataaataaactgatgtggtagacttggtggtaccgagacttgcctacttggatccagctccagcctccaaaagagagagaaggctatatataagaagagcacccatccagccggccagcccaacctaagtagccgctggtagtagtggtagagctgagagctccagctaacaaccttgtgtccgctggcttggctgcttctctcttctccctcctcctccattgcttccactgcatgtgcgtcgtccttcatcataccccgatcaagaaaaaaaggctagctagctaaccaagtccaggtgatatatcgatctccagcgagctagctagcaaggctgcgcatgccgtcgtcgtcgtccatgggcatgggcatgggcaaggcggcggtggtgagcaagagctggcaggagtcgaagctgctgtggcacatcgcgttcccggccatcctgaccgccgtcttccagttctccatcggcttcgtcaccgtgggcttcgtgggccacatcggctccgtggagctcgccgccgtcaccgtcgtcgagaacgtcatcgagggcttcgcctacggggtcctggtacgcgccgcgcatatatgcaacgactacactcccccatcatcggttttattagtgcgaaaagaaaagacatttctttaggttcttctattcacgtacaaaacgcaaattacgacttatttggccggattaggagaaaggacaaagaaatcattatctactgtagaagatcatatcgatattgttgcttaattaacgatgtcgaatggtgggtggtttgcacgtccccgtccttctctcacgtccatatacgcatagaacaaccaatttgttccttcccatggaggcttatatgagagaattgaagcagggacaagttaaccggcgcgaacatgtactacattcatgcgtaaaagctagcgatgacagaaatactcactgtctatttcataatgttttttt

SEQ ID NO: 90066 - DNA, 2157 bp, Zea Mays
cttatcgcggcttccatgaggagagcacgaattattaacactggtcatctcacccactatttaaaacttaattctacaaacaatgttaaacaatgtcatctacagtttcacattttctattttacgtgattcatcgaagatagtctaaataaataaactgatgtggtagacttggtggtaccgagacttgcctacttggatccagctccagcctccaaaagagagagaaggctatatataagaagagcacccatccagccggccagcccaacctaagtagccgctggtagtagtggtagagctgagagctccagctaacaaccttgtgtccgctggcttggctgcttctctcttctccctcctcctccattgcttccactgcatgtgcgtcgtccttcatcataccccgatcaagaaaaaaaggctagctagctaaccaagtccaggtgatatatcgatctccagcgagctagctagcaaggctgcgcatgccgtcgtcgtcgtccatgggcatgggcatgggcaaggcggcggtggtgagcaagagctggcaggagtcgaagctgctgtggcacatcgcgttcccggccatcctgaccgccgtcttccagttctccatcggcttcgtcaccgtgggcttcgtgggccacatcggctccgtggagctcgccgccgtcaccgtcgtcgagaacgtcatcgagggcttcgcctacggggtcctgctgggcatgggcagcgcgctggagacgctgtgcgggcaggcggtgggggcggggcaggtggggatgctgggcgtgtacatccagcgctcctggatcatctgcggcgccacggcggtgctgctcacgccgacgtacctgttcacggcgcccatcctgcgcgcgctgcggcagccggccgacgtggcgcgcgtcgcgggcgcctactgccgctgggtgctcccgcagctgttcgcctacgccgccaacttcccgctgcagaagttcttccaggcgcagagccgggtgtgggtggtcaccgccatctcgggcgccgccctggcgctccacgtcgccctcaactacgtcttcgtcgcgcgcatgggccacggcctccccgccgccgccgccgtcgggaacgtcacctggtggctcgtcatcgccgcgcaggtggcgtacctcctgtctgggcgattcgaggacgcatggcgagggttctctaggctcgcgttcgccaacctcgccgccttcgtcaagctgtcgctcgcgtccgccgtcatgctctgcttggagctctggtactacactgcggtgctcatccttgtagggttcctgaagaacgcgcggcttcagattgacgtcatgtccatctgcatcaattaccagctgtggacgctcatggttgcgctgggcttcaacgcagcggtgagcgtccgggtgtccaacgagctgggcgccaacaggcccaaggcggccaagttcgcggtgaccgtggcggtgctgacgtcgggctccgtcggcgccgtcttcctcgccgtgttcctggcctggaggacggggctgccgcgcttcttcagcgaggacggcgacgtgctgcgggaggcctccaggctgggctacctcctcgccggctccatcttcctcaacagcgtccagccggtgctctcgggcgtggccatcggggcgggctggcaggcgctcgtggccgtcgtcaacatcggcagctactacttcgtcggcatcccgctcgcggcgctcttcggcttcaagctaggcatggacgcgatggggatctggctgggcatgacgctcgggactctgcttcagacggctatcctcgtgttcatctcgtacaggaccaagtgggagaaacaggctatgcgggccgaagaaagggtcagggagtggggagggagggccgacgccctgccgtcggccacgcaggtcgcgccggcggccgaagatgcgggtccaccatcaaatgcgagtgcgacctaagttctaaggtcgtttaggattaattaatggcagtgttatgtgtaggcatcaagactttgctgcagcaacagcccgaacatcgccacagcggaccggacccatgtgtacagattgatcgagtggagcttaattaatttatacagtgctgcccgggacctccgttgtttttcgttttttcccc

SEQ ID NO: 90067 - DNA, 920 bp, Zea Mays
aatttcttttgcatcaagtgacagcattccacaaggttggccaagctaaagaccacataccttcatgtctgcactgtgaaattttataattgaaaagggaaacagttttttttcctgcaatggacagtatagctaaatccttatgcctcttctcgacacagaagttcggcttttcgtatgtataacctgaaccaaaagttctccaaaaaaaatatgtatacccatatccaagccgaggtaaaaaaaaaccagcttcagcatggaaaagaccccgtcatcttgatatgatcaagggtgcttctcaagccgtaccgctcaatggctcgcatgcctgctcgaaacccatctccataagcgacagaagaatctgtttcaatttggtacttgaagaactccccgagtcttttttcaaattccgtctttgcgccctttttcgatgatgaagatgttgaagatgacgatgacgcatctgaggtggttgacatgctaccagaacctgatgtgatttctgactcaagccaaagatgagctagaacctgacagatgccttcttcaacctctggactcagggttcgaatacctttaagtcggaggtaagcatgcatcatctcatgagccagaatcgagccaagaaaatcaccttggcagcccgtacagtataagaattgcagtcacttcacaccgtctaatgagtttgtatggtcctgtgaccatatctatgattctgttgcctggtccaattggtcctttcaatatctagacaataccattatgttatttatgtttaatcgtaattggctttgaagctcacaaattcagtagaccaattaagcaaaacaaggaaatgttttaagatcatacagttctgacaatctgctcctcagataggcagaggcctcttgtttcaggaaggtggtgca

SEQ ID NO: 90068 - DNA, 483 bp, Zea Mays
atggagagaaaaaagaagcgatcaaagcgtgatatggacgggaagcggaggtgcaggtgcagcaaagaaatagggtgggagcccgagtccaggagggagaaacggagagagaaaaaacaacgagctgaggttgacatctctgtcccaaccccactctcactcgcccaccgcccgcccgcgtcgttgtcgcggcgacgtcgacacccctacgcgcggggccggtgggagggggagggtagaggaggcccacgtggggctgaggctggcgaggaggcgcggcgacgtctggcgcacgcattccgtcgagcgccctgcctgcgcgcgcaggaaattctctggcagttgggctcggaccttggagctggaggggtgactgaggagaggcgggagtggggtgagaccgtgagaggtcgctaccgaagtcaatgggcaatggcagtgctggccaggctgtttttgtatcaaagccctttctgtttatga

SEQ ID NO: 90069 - DNA, 3073 bp, Zea Mays
ccaccaccaacctatcccccaccgcgtcacgcgcctccacctccccagatcggcggcgaaccggggggcccggacaggcggcggagagctcgaggcgtcatggcgaagtcgagcgcggacgacgccgagctgcggcgcgcgtgcgccgcggccgtggcggcgtcaggcgcgcgcggggaggaggtggccttctccatccgcgtcgccaagggccgcggcatcttcgagaagctcggcaggctcgccaagccccgtgtcctcgctctcaccgttaaacaatcatcaagaggcgaggcgaacaaagcttttcttcgagtattaaaatattcatctggggcagtgctcgagccagccaaactttacaagctgaaacatctaacaaaggttgaggttatttccaatgatcccagtggttgtacatttgttctgggatttgataaccttaggagtcagagtgttgccccaccacaatggacgatgcgtaacattgatgacagaaatcgtctacttttttgtattctgaatatgtgcaaggagatactcagttatcttccaaaagttgttggaattgatattgtggagctagctctttgggcaaaggaaaacacactgaccatagataatcaagtgagtacccaagatggtcaagaaacatcagttgctactcaaaccgagaggaaagtaacagtaactgttgaaaatgatctcgtgtcccaagcaaaagaggaggaagaagacatggaggcacttcttgacacgtatgttatgggaataggtgaagcagatgcattctctgagagattgaagcaggagcttgtggctttggaggctgcaaatgtatatcaattactggaaagcgagcctttaatagaagaggtcttgcagggtctggatgctgctagtgcaactgtagatgatatggatgagtggctacggattttcaatctgaagctgaggcacatgagagaagatattgcatcgattgaatcacgtaacaatggcttggagatgcagtctgtaaataacaaagggcttatggaagagctagataaattgcttgagcgtctgcggattccacaggagtttgcagcatcattaactggaggctcatttgaagagtcacggatgctgaaaaatgttgaggcatgtgaatggttgacaggggccattcgcagtcttgaagttcctaatttggacccatgctatgtcaacatgcgcgctgttagagagaaaaaggcagagctggagaaactgaaaacaacttttgttcgacgagcatcagagtttttgcggaactacttctccagtttggtagacttcatgatcagtgacaaaagctacttttcacagcgtggacaattgaagcggcctgatcatgcagaccttaggtataaatgcaggacatatgcccgacttctgcagcacttaaagagtctggacaagagctgcttaggtcccttaaggaaggcatactgtcattcccttaatttactactacgacgagaggcacgcgaatttgccaatgaacttcgtgcaagtacaaaagcaccgaagaatcctgctgtttggcttgaaggttctggcggctctggtcataatggaagcagttctgatacttcacaggtctcagatgcatactcaaagatgcttacaatatttatcccgcttcttgtggacgagagttccttttttgcacattttatgtgctttgaagtacctgcacttgttccagctggttctcctaatgctaataagagcaaatccggaggaaatgacccggatgatgatctgggtcttatggatccagatggcaacgatctgaaacctgacagtacctctgctgaactgggtacattgaatgaagctcttcaagaattactcgatggaatccaggaagacttctatgcggtcgtagattgggcttataaaattgaccccttgcgttgcatctcaatgcatgggattacagagcgttacctttctggacagaaagctgatgctgcaggatttgttcgcaaactacttgatgacttggaatcaagaatatcagtacagttcagccggtttattgatgaagcatgccatcaaattgagcgtaacgaaagaaatgtgcggcaaactggaattctagcctacattccaagatttgctgtccttgcatcacgtatggaacaatatatccaaggacaatccagggatttaattgataaagcatacacaaagctagttagcacaatgttcgcaactttggagaaaattgcacagagtgatcctaaaactgctgatattgtgttgattgagaattatgctgctttccagaacagtctttatgacttggctaatgttgtgccaacgcttgcaaagttctaccatcaagccagtgaatcatatgaactagcttgcactcgccatatcagctcactcatttatctgcaatttgagaggttatttcaattcaaccggaaagttgacgaattgacttacactattgctgctgaggagataccgtttcagctgggattatcaaaaactgacctaaggagggtactgaaatccagcttatctgggattgataagtcaattagcgccatgtacaggaggttgcaaaagacactgacctccgacgagttgtttccttcgctgtgggacaagtgcaagaaggagtttttggacaaatacgagagctttgttcagatggtaacacggatatatgggaatgagccgatcatgtcagtcaacgaaatgaaagacgtccttgctggtttttagatacaagtacacagcaccatgtatgatttcagagaaatagctatgtattccattcattccattgaattctgcacccacttgcgttactgtgttaggcgccctttttgggttatgtgtgtgtatgtggatgtcctctgtatagaagtgaacgcggcatgcttcccctaatgatgttcctgtgtcgcatcgagccgtcagtgacaatgcaaactgcaaacccggagtaccggaaggaacatgttcatgtttatgacgtcatttgtccaattgccgttccattcacggtcaagaaggtcatgtcttg

SEQ ID NO: 90070 - DNA, 1982 bp, Zea Mays
atgcacccacgccccgtctctttgaagccgcccgcgtctccacccgagaccccgacccaccccgccctcccccgccgtcgcgctcgcgctcccccgcgacagccgccatgcgccctatctccgccatgcctgcgcctcctcccccgcccgcccgagaaccaccaagtttcccttccttacacagcgaggtccaccatcaacgcccccttccctggcaagccacagccgtccacgttcctggccaccagcgacctcccttctctagcccttagcagcgagcaacacctcctccccatggctgcccccagaccccagtcccgtccgcgcatccgctcccccgtcagcgacgcacctattctcctcgacgtcgcccatggcgtggacggcgacctccctcaccctgcactctggtatgtcaccgtattgcccgcctcctttccccgcaccggcgcagccccctgttgcggcggccccttccccaaacagcacggcaccacgtgctccccctgccgcgcccgcactctccttccccaaacagcacggccccacgacgctcacactctccttccctggcgatatcccctcatctgcgccttgtccctcggagatccccttccatcttcggcaccgagaggaaaatggatggcaatcccatccatcggcgccaaaccctacacatcctccatagtaggcacccgcccctccttacgcggcaccatcggtggggatatcccccaatctgctggaaggagtccgcgccaaatcagagcccgaaatccgtgccaaatccacgctggatgaggtggtggggagaccccccaatctgcgtcccttctacatgcctacacatcctccatagaaggcgccctcctactaaccactaaaaaaccccttccacacgctgacaactccatatatattagtccaaagggagagcacgattaaggccacgcctaccagcttcaccctcctcgcatttgtaagtccaatttttagatttatgatttcagatgttgagttgattttgcaaactggtaagtgttttgtttcatacggcaactctgcacatggacagaatcacagctctgttagcgttgttttatcaagttcttctagcagttgaagtagtgttttcttggcagatgttcgcctttaggacattgctgcgaggggaatcggatatgccacaggctgcatgttgttggagtttctatgtatccccatatcaaatttgtttttccctaatcagggaactcaattgttgtactgctcatctctttcgagaagatcacactgtcgcatttctaatgtttggatctttttgcatagtgcgagtaatagcaggagctcttccgaaaggccttcacatgttaatcctatcgaagaataacatatcaattattgaacgcctcagagaattgacacgattgcgcttgttggatatcaactataataggatatctagaattggccatgatcatctgttaggattggcctcatgttcctctttgaaggagttgtatctggtcggtaacaagatcagtgaggtagatggtcttcaccgacttctgaagctcaaggttctggacttgtgccacattcagtcttctgtagccactatacttggggttggtgcagaggatgctaggaaaatactcaataattatggtacatgtccaattctaagtatggtatattgtgctctaatatttttaggcatcattgtttctgttaaatactttgcccatggttaaggttatgagtgcattggttaatgaaatgtatgacattaaacggtggctgcgtggtgttccatcgtttcgccttgagccattatttaggcgaagagttccacaattgcatactgcacttgaacatatatagtactcatgaagttgttctacatcatattggatttcaatgcttttttatcagtgacagttttctcttttttggtgagtacaataattgtatttttatct

SEQ ID NO: 90071 - DNA, 1769 bp, Zea Mays
atgcacccacgccccgtctctttgaagccgcccgcgtctccacccgagaccccgacccaccccgccctcccccgccgtcgcgctcgcgctcccccgcgacagccgccatgcgccctatctccgccatgcctgcgcctcctcccccgcccgcccgagaaccaccaagtttcccttccttacacagcgaggtccaccatcaacgcccccttccctggcaagccacagccgtccacgttcctggccaccagcgacctcccttctctagcccttagcagcgagcaacacctcctccccatggctgcccccagaccccagtcccgtccgcgcatccgctcccccgtcagcgacgcacctattctcctcgacgtcgcccatggcgtggacggcgacctccctcaccctgcactctggtatgtcaccgtattgcccgcctcctttccccgcaccggcgcagccccctgttgcggcggccccttccccaaacagcacggcaccacgtgctccccctgccgcgcccgcactctccttccccaaacagcacggccccacgacgctcacactctccttccctggcgatatcccctcatctgcgccttgtccctcggagatccccttccatcttcggcaccgagaggaaaatggatggcaatcccatccatcggcgccaaaccctacacatcctccatagtaggcacccgcccctccttacgcggcaccatcggtggggatatcccccaatctgctggaaggagtccgcgccaaatcagagcccgaaatccgtgccaaatccacgctggatgaggtggtggggagaccccccaatctgcgtcccttctacatgcctacacatcctccatagaaggcgccctcctactaaccactaaaaaaccccttccacacgctgacaactccatatatattagtccaaagggagagcacgattaaggccacgcctaccagcttcaccctcctcgcatttgtaagtccaatttttagatttatgatttcagatgttgagttgattttgcaaactggtaagtgttttgtttcatacggcaactctgcacatggacagaatcacagctctgttagcgttgttttatcaagttcttctagcagttgaagtagtgttttcttggcagatgttcgcctttaggacattgctgcgaggggaatcggatatgccacaggctgcatgttgttggagtttctatgtatccccatatcaaatttgtttttccctaatcagggaactcaattgtgcgagtaatagcaggagctcttccgaaaggccttcacatgttaatcctatcgaagaataacatatcaattattgaacgcctcagagaattgacacgattgcgcttgttggatatcaactataataggatatctagaattggccatggtgcagaggatgctaggaaaatactcaataattatggtacatgtccaattctaagtatgaaagtcggggccattactcagatggtaaacaaacttgggccatgtaaatggtcgaccttgcctaaactatacctggacgtattggaaagcaatgctgggaaagctatgccatgaaagatatttgtagcagtgttacatgatggcatcaagtgctgggaaaatatttattaatttatggttttgtttctatggaatataggagtcatgattttgtgcatttgatcagagactacattaactagaggatactttctttttttcaaaattacaaaaacaatactaagtgtacctattattgtcta

SEQ ID NO: 90072 - DNA, 673 bp, Zea Mays
atcatctgttaggattggcctcatgttcctctttgaaggagttgtatctggtcggtaacaagatcagtgaggtagatggtcttcaccgacttctgaagctcaaggtgcagaggatgctaggaaaatactcaataattatgtgagggttttaatttagttgctagctcgatgaaagactatgattcgcaagactggatattttcctgcttatgaagaagcggtggcaaccaaattttcgaaaaagtcggggccattactcagatggtaaacaaacttgggccatgtaaatggtcgaccttgcctaaactatacctggacgtattggaaagcaatgctgggaaagctatgccatgaaagatatttgtagcagtgttacatgatggcatcaagtgctgggaaaatatttattaatttatggttttgtttctatggaatataggagtcatgattttgtgcatttgatcagagactacattaactagaggatactttctttttttcaaaattacaaaaacaatactaagtgtacctattattgtctactcgtctcatgatgattactatgtagataaattctctaagctatgaacagtgaccaatgaaatatattcatttgcatacagttctcaaactaatgtattcacgtcattatatattgtgccagctttgtcaa

SEQ ID NO: 90073 - DNA, 1657 bp, Zea Mays
gtaaatttaagcatgtttgcttgaagccgctcagcctcagatcatcttaagaggttgtggatttattgagtccaacacaagtttggtgttcctttgtacagttttactatggagtaccagactacgagtcattgtttgtgccatgggtccttgacctttgtaactaattcaagtcagatgatatgtatctccttatgaaattcttttctcaactaccgtgatgatatttcaataattgatttcagtttcttctatgcattcaaagtagccaggctatcatgacggcattaagttcttgtatttaaccgttcgaccaaatttgtccaattgttataggtatctgtgaaaatccatgaacaacttatgtgttcatgtctctcattttatgtccttgcatgtcaataactataggtatctgtgtttatcacatatacaagctaacaatatacagttatgggtgagacaacgtcttagttcactgatcacacacatatttttgacagtcaatacttgcaataatgtgatatttgtaaactaatttttcctcaaaaattgtaacctgcatcaggcaaatatgagaaactagcatttgttgatgtttgaagtatatttatgtggatttgtgacttccttacatctcctctttcaaacaattggttcattattattattggtatggtggtgttatcgccccatttgcattaagctgctcactaagtcaaagtagtaaaaagccatggctgttgttacctagaagatgttgtgtatattcaaatcatagtgcttgtgttttgggctggagatagcacaaaataactactaaaactatctattatcaagtgatccatttgcagttttttcaatctgacactcacagactcactggttatatttcagagctgggaagaagctaacgatataccatacttagactcactggttaaggttatgagtgcattggtttgtaaaaaaaatatttcatggtcaccacagtaggagcaacatatccctgtttagcatattgggtaataactgtgctgatagtgtcacttaaacttggtaaacctgcaactgtaaatactgatacgtggactataagttttggccgtgcagttgctgtgtgataactattttgagttttcctaaacagtttcttacctagattgtcgtgaacttgcggtgtagtagcattgtacctattttaacttggccttgtttgtttgattttgtaagtgagggttttaatttagttgctagctcgatgaaagactatgattcgcaagactggatattttcctgcttatgaagaagcggtggcaaccaaattttcgaagtatgtgagttaaaaatctcgtcatgaatgaactcatgttgtttatagatttgcactggaatatgggcatgtagtgggcactactgggctaggagaagatgaagtgtttgtttttaattgcgtctttttgattgctttggcatgtatggctggcaatgtcatgttttttcatttttgtccacttcaatacacatgaaaccgttttggagactaattttgaagtatgtttaaacaattattctatttaaataagatctgcatatgtgatatattgaaaccattttggcaatgtcgtgtttttttatttttgtttaccatctgcat

SEQ ID NO: 90074 - DNA, 1401 bp, Zea Mays
aacaagctgagaacaaggaaccaggccatagcagcaacattacattagcatcgtcagctagctagctagctcatcgttagtatattaattcgcgcacatacgtgtgtgtgtgtcagtgtagtgtgtgcatacggacttttggccttacgctgaaaccgtccgcgcgtgcgcgtcttcctctgccaatatatatatgcaatccttgcagtagctagctccatcgatcgccgccaccgccgcgctgggctctcctcgctcacagtctacagtgagctctcactgcaccacactcccaagaattagtgaatctgtgaggcttttattttcccgcgcgcgctgctagctagcttgggcgatcgccgtcgtcgtcgtccatggaggaggggctccctccagggttccggttccacccgacggacgaggagctcatcacctactacctcacccgcaaggtgtccgacttcaccttctccacgcgcgccatcgccgacgtcgacctcaacaagtgcgagccatgggacctcccaggcaaggctagcatgggcgagaaagagtggtacttcttcagcatgcgcgacaggaagtacccgacggggatccggacgaaccgcgccaccgactcgggctactggaagacgacgggcaaggacaaggagatcttccacggcggcgcgctcgtggggatgaagaagacgctggtcttctaccggggccgggcgcccaagggccagaagacgagctgggtcatgcacgagtacaggctgcagaccaagttcccctacaagcccagcaaggacgagtgggtggtgtgcagggtgttcaagaagtgccaggtcgtcaaggtgaggccgccgatgcaggacgacgacgcatccctatccccgtgccacgaccacgacgcatccctgtccctaagtgagctcgacgtctcctccatcctcggaggcctggcctccgccgccgcggcgcacgcatcgtccgcctcgccgcaccaccagggatccgccgccgagagcttcgccgccgcccataggatggacatgagcgcgtacatgagctggatggcggccgccaacccgggcgccgcggccgccatgcttccctgggccacggcgccgccgccgggattgtcgtcgttcggcaatgtcttcgcgccgcccagccagatgttgcagaggccgcttccgttcgccgggtgcagccagccgcgggacctcggtggcgtcgtcgcaagcggtgagcatgccatgttcgggacctccgtgatgaaggctgggacgatggagtatgatcagcagcaggcgccgccggagcagcagctgggagtggacgaatccacatggagagcattctgatggtcatcgccgcgcgcctacatataatattgcacacaaaaaagac

SEQ ID NO: 90075 - DNA, 1027 bp, Zea Mays
ggctcaagcctcaaggtacggtaccaagatgagaaagccttcaaagggacgcaaggagagggatgtgatttaccaccggaatgatcactcagatgaccgtgggaagcatttcttcaagattttgattggtgaattccatgaaagattggtcataccggttaagtttgctaaaaatttcagaggaaaaatagaaagaagtattacgcttgaatcacttggtggctgtacttttgatgttcaagtcgcacagaatttgggcagaatcgtgtttcaatctgggtgggagtcgtttgttagtgcccatgacttgaaaatgtgtgacttgttggtattcaagtatgatgggatgtctcggatgaaggtcctggtatttgatcctagtggttgcgagaaagtaccgcctttttttgtcacgaaaaatgctatgagtggaggacggaagagagaagggccccttgacatttcaagcagcgatgctaatcttcccatgaaaacaccagagactaaaaagaaagcttggaagcaaagggacaggagtaggatcagtattaggtcatctagatccctatccagctcatcaggaggaatgacagcttcagaggacgatgaagcacattctgttccaagttacgtactcccacgtcacaccagccttgatactatgcaaaagaggaaggtgaaagagagactccaagctatttgttctgaaatccccatctatgtgttagtcgtgaagaacacaaacatttctggaagatctcgagctatggtcttctccagaaaatatcctgatgtgtgtcttccatccaagagcggtgcgttgattcttcagtgtcatggcaagagctggcaagtgatgtattgcattgaggtttggaaagatcgaggcgaatccaaaaggcttcgcaacgggtgggcacagtttgctcgtgacaactatttgcagctgggagatatctgcctctttgagccactgaagaccaagaagtgcaccatgaatgtgcacatcatccgcaaaaaagagtga

SEQ ID NO: 90076 - DNA, 88 bp, Zea Mays
ctctctggcgaagaggaacgggctcaaggcgagctgttctcttctcctgtagaaagcgtttctacccctggacctcgcaagaatcctg

SEQ ID NO: 90077 - DNA, 1385 bp, Zea Mays
ctattgcaaactttattgcaggtactgtaccaagatgagaaagccttcaaatggatgcaaggagagggatgtgatttaccaccggaatgatcacacggatgacaatgggaagcatttcttcaagattttgattggtgatttccataaaagattggtcataccggttaaatttgctaaaaaattcagaggaaaagtagaaagaaatattaagcttgaatcacttggtggttatacttttgatgttcaagttgcacagaatttgggcagaatcatgtttcaatctgggtggaagtcgtttgttagtgcccatgacttgaaaatgtttgacttgttggtattcaagtatgatgggatgtctcggatgaaggtcctgatatttgatcctagtggttgcgagaaagtaccgcctttttttgtcacgaaaaatgctatgagtggtggacgaaagagagaagaaccccaagaaccccttgacatttcaagcagctatgctgatcttcccatgaaaacaccagagactaaaaagaaagcaagaaagcaaagagacaggagtaggatcaatattagtccatgtagatccatatccaactcatcaggaggaatgagaagttcagaagacgatgaagcacattctgttccaagttgcatactcccacgaggcaccatccttgatagtatgcagaggagaaaagtgaaagagagactccgagctatttgttctgaaatcccaatctacgtgtttgtcgtgaagaagtcaaacatttttggacgatctcaagatatggtcttctccagaaaatatcctgatgtatgtctcccattcaagagcggagcggtgattcttcagtgtcatggcaagagctgggaagtgattcttgaggttcggaaagatcaaggtgaatccaaaaggcttcgcattgggtgggcagagtttgctcgtgacaacaatttgcagctgggagatatctgcctctttgagccactgaagaccatgaagtacaccatgaatgtgcacatcgttcgcagaagagtgagatctgggaaatgatttctgctgttctttgcgacttttgcagcggtagccgttgacagtagtgcttcttggtttgataagagttgctaatggtcatgtcagccattattagtgccaacttttgcagcagtgatattaacgatttaacgcttttatgcttgggaggctccaactcctttcatcctaaaataaatatcattctcgcatatttttagttttaactgaatatacataagaaatagttaagatatgtagtgcagaattagtattagactagtggattatatagtggtatagataaatcactgatttatatttttataataaacttattgaggatataattattgct

SEQ ID NO: 90078 - DNA, 1307 bp, Zea Mays
cgaagcacatatatataggactgggtacgcacagagatcgtcgtcaccaacttcgatctccaatccccagctagctaactatccaatggcgggccaagtgatggaagctcaggcgtgccggctgcagcctcccaccatggcgccgttcgcgccactacctcatcagtacaacaacacctgcaagcacctcaacacgacgatggccgccacttccggcaacaacaacagcaacggcagcaccgctaccgcggctggcggtgcggcggccgacggcatggccgcctacctccagcacctgcagcaggcgggcgccgaggcggcggccaagagcggcggcggcggcggcgcggcgcgcggggagcagtgcccgcggtgcgcgtcgcgcgacaccaagttctgctactacaacaactacaacacgtcccagccgcgccacttctgccgcgcctgccgacgctactggacgctgggcgggtccctccgcaacgtccccgtcggcgggtccacgcgcaagcgcccgcgcctggcgcaccaccaccagcacgccaggctcgctcctccggcgccgcacgtcttcggcctcacgccgatgatgcctcctcccttgcaaccgtcgtcgtcgacatcgtcgtcgcagggacagggacagggacagggacagagcggcggcctcctcggctcactgttcgcgctcggcgccgcgggcgcggggccgccgctgctcgaaggccgcggcgcagggtcgtcgttcgacttcgacctcgggctcggactcccgacgggggccttacacctgggcgcggccggacaaatgcaaggcctcgggctcatggggggaggaggtgcctccgcagccgggtcgtcgtccttcctctggcccgccgcggggctgctggtggacaacgacagcgtggacacgtggaagatgccaggcgccgctgcgggttcaatgtggccagacttctcttttccggcggcagcggcgccacaaaccgccggattgcttcatggcggaggccacctgatgtgagacgagacgccgcgcttccttcgacgtactaccccctagcgctagccctagattctagcgcatgcagcccggtgtccgggccggtttgcattgcatagcatacatagtagttggtctttttttcagcattgtattattggatcatgtgtacgtaattaagccgtgcttcagttttccttgactctgttaagctataaagggccctccaaatctgcagttttggggcgtttgtttcagaaaatcatattctagaattcgattctatcacaaaaaaaaa

SEQ ID NO: 90079 - DNA, 2296 bp, Zea Mays
gttttatttaaaagaatagtgacttatcatttttttatttgttttatcacttaaagtttgtgtttaacttaaatttttgcatttttaataaatattatgaataaaatgagtgattaaagttttcaaaaaaaggttaatggagtcatatatctatgaacaggtaatactctttaggaagaagtacttgaaaaacaaaactcgaacaaaaagaaaaaaagaaagaaaaacggtccaccacaccttgtatgtgccctccggcgggcgggtcagagctcgcaactcgcaccagcacagcagcaccggcagcaccaccaaccccagggcagccgcgccgccagccacgacaagcttagcagcccctcgcactcgctagggtatttattggtacaatcgggtgatctgcgtgccgcatcgcgccgggacacgggagacaatggcgttcacgacgctcggcggctgtggggcgcaggcttcagtgcggttggctccccagaatggaatccttggatctaattcgaagccattcgcgggcatcatactcaagaaacctcagcaggttggatccctgcccctccgtgcaaggggatccattttttcttcaccacgcaggcttttctcccctaaggcagcagcccctaaatcaggggattccatacgcattgcagtgctaggggccagcggttatactggagctgagattgttcggattctagcgaaccaccctcagtttcatataaaagtgatgactgcagatagaaaagctggcgagcaatttggatcagtatttcctcacttgataacacaggacctgccgagactggtcgcaataaaagacgctgacttttcagatgttgatgctgttttttgctgcttgccacatggtacaacccaggaaattatcaaaagcttaccccgacacttaaagattgttgatctctcagcggacttccgactacgcgacatcaatgagtatgctgagtggtatggacattcccacagggcaccggaacttcagggggaagctgtgtatggtttgaccgaacttaaacgagatgacataagaaatgcacgcctggtagcaaatccagggtgttatcccacatctattcaacttccgctcgttcctttggtaaaggcaaaactgatcaagctaaccaacattattattgatgcaaaatctggagtcagtggtgcaggacgtggggctaaggaagcaaatctttacactgaaatcgctgagggtatccatgcttatgggataacaagccatcggcatgtgcctgagattgagcaaggacttacagatgctgctgaatcaaaagttactatcagctttactccacatttgatgtgtatgaaacgtgggatgcaatctactgtgtatgttgaattggcatctggagtgactcccagggatttgtatgaacacctaaagtctacttacgagaatgaagaatttgtcaagctgttacatggtagcaatgttccttgcacaagccatgttgtgggatcaaattactgcttcatgaatgtctatgaggatagaatacctggaagggccatcatcatctctgtcatagataatcttgtgaagggagcatctggtcaggctttgcaaaatcttaatctgatgatgggactgcctgagaatatggggctgcaataccagcccctgttcccttgatcttttgtgtcattatctattattacattatttaggagtccagaaaccaaattatcattactgtcaagaggtggcaaggagcctgacatcagaattcagtcaagtcgaagttagacagttagtgtagcttggtctgtgttgttttagctttattaaaccattaagagaataatgatgatggcaatttagcagtacaatggtagtattatgtgggcagcttggttccaataaaatcataagcctatacacatcttgtgcccgcaatgttgtttgctattttgatcacgaaatcaatattgagcttgaattcagttctgaggcagctatccttggcatcactggataactttatggtatcttttttactatgttcaagcaaaaagtttagcccattacagttgtactttgagaagattgaaatgtctcttagtatagttcttaagtctcttagtatgattctcaagttttatcctatagcagtatagctgcatggactcatagcttgctactgtagctatcttatctgcagcgtttcttttaacaggattttcatctctgcagcgttgctgctgtgtaaacatctgtaatacagacaactacgaaacgaacttt

SEQ ID NO: 90080 - DNA, 109 bp, Zea Mays
catgagagtctggtatatactttgcaaggcgatacttctacacaagcaccaaagaaatgaaaatattggctgcaatcaagcatcttgtaatgaaaatgtaatcttgtaa

SEQ ID NO: 90081 - DNA, 186 bp, Zea Mays
atggaggtgaagctaaagcgccggtacaggcgccgagagccgaaggaggtccgtcgcagctcgcagcggcccgacaacacctcgaggagcgcgtcgacgatgctcagctcatgctccccttcctccagcttcgcagcggcggcggggacgggttggcgtctggacatcgatttgggctcgaggtag

SEQ ID NO: 90082 - DNA, 1431 bp, Zea Mays
ccacctcctgcaccacagcgccattgcgcttccacggccagctaccgctgccggaatatacactggtggatctttaacaggttcctccggtccgatccaccgccagcttccgacgtcgtactcgggcggatcggttccacaatgggggaacggggagcagaggaggacggctcgggcggctcctccctctccctcatgtgcctggaggacggcgccgacctcgacgccggtggctccgcggagagcgccgacgacggcgagccggccgtcgttgctcacagcgacgccggtgaggaccaggaggaggagtacatggactacctcgtgtccaaggagagcagcttctgctgctccccttcctcctcgcccgtctcctccgacgccggcgccgagacgcgcccttcgtccacggcgtcgtcatccgacgagtggttccgctgcgcgcgccacgccaccgtcgcgtgggtccttgagacgcgggcttacttcggcttctcccaccgcgcggcgtacctggccgtctcctacatggaccgcttctgcctccgccggtgcatggacgtgtcagtgatgccctgggcggcgcggctgctggcggtggcgtgcctgtccctggcggcgaagatggaggagtaccgcgcgccggcgctgtccgagttccgcgcccacgacgactacgacttcagcagcgtctgcatccggcgcgtggagctgctggtgctgtcaacgctggggtggcgcatgggcggtgtcacgccgctggattacctcccctggctctcctccaggctacgccgaggcggcggcggcgggctcgttgccgccaaggccgccgcgcttatcttctccgccgcggaagctgccagtgtgctcgactaccggccgtccaccgtggccgtcgccgccgtcctggcggcggcccacggcgccatgacaaaggaagcgctggagtgcaatatgagcagcctcactccgtcctgcctgctcgacaaggacgacgtgcacgcctgctacagcacgatgctgagcgagagctcctcgcctacgccgagcaagctggcggacaagagaccgccgccatccagctccggctcgatgacgtacgagtcggccgacgcggcctcctcgttcgcggccacggcgggccggagcaagagggcgcggctggagatgccgagcattggcccatgagaagcaccgccggccgggacacgatcgtttttttttttttgccacttgtcctgtgctgtgcggctgtggcggcctgccggggctaatcttcttcgccaactgtagtttttttttcttcttccagctttgacttttcagttgtttgattgatcacgcggcgcgcgcgcagcacgctctgctggagaaacggtgacgcgcacgggcattgccccggcgttggagatggagggtttggttgcc

SEQ ID NO: 90083 - DNA, 489 bp, Zea Mays
atgacccgtgcggaagcgaaagctgctttcagcaacgatatggtttacatggagaaatacctggaaaatcctcgccacgtcgagattcaggtactggctgacggtcagggcaacgctatctatctggcggaacgtgactgctccatgcaacgccgccaccagaaagtggtcgaagaagcgccagcaccgggcattaccccggaactgcgtcgctacatcggcgaacgttgcgctaaagcgtgtgttgatatcggctatcgcggtgcaggtactttcgagttcctgttcgaaaacggcgagttctatttcatcgaaatagactataggagtcggatagaacgagaacttcagaaaaatctcagagggttacatgaacaaagaacggttcatattcggggccggtcacactttgtcgatcaagcaagaagaagttatcgcagcctccatatgcgggagcatcacaccaggacaggtgatctgaacttctga

SEQ ID NO: 90084 - DNA, 262 bp, Zea Mays
tggtgctcgaagttttccgggcccgctcctgaaatcggtcgtaacttgtgctaagtagcatgaatatcatttttgcatgcacggttttccaagtttcgagtgacctgcagttcaaatctgaattttccgaagaaattcaaataaacaaactaaatctaccagctatagaaaacacggttataattgtccaaaaatggtacatgtaggtctacatagtgtaggaacataccacaaaaagtttggtaaccaaaattaaaaaaaa

SEQ ID NO: 90085 - DNA, 4069 bp, Zea Mays
aattccccgtcgatcccgcgcaccatttcgaaaccccgcccccaaatccccgacgtccccgcccaatgccgcccgcgcgccgccgcccccgccgtggcgggactcccgctggcgccggggacgactccgtcccctcctcctccgccgacctcctcgcgcttgccgccacgctcatcccggccgccgccaccgccgcactcaaagccccgccccaactcaagcaactcgtgcactcgctccccgtctcccacccgctcctcatctctctcccgcaagcgctcaccctagccctcgctaccccctccgaccccgacgccggctccacttccgacgcacccccgcccccaccccctcctccacgccccgccgccgtcctcctccacctgctcgtcacacaccccacccacccgcctagatgggaagacctcgtctgcccgctcgcgctgctccacggtcgcctcgcgctcctcgccaccgccgacccaccgctcgcagcccttgccgccgcgtgcttcgagctcgcctggcgcgccgacgcgcctggacgcgaagccctagttgcgcagacgctgccctacctcgtggccctggcgctcacctccggcaccagcgccaggccgatcctccgccgcctcttcgcgctccgcgacgcgctgccgctgctcgactacgacgacgaccagagcatttctgatttcaagatgctcctgcttcgctgcttcgtctcgccgctcttcctcaaggccgaggaagggaggaagttcctcgcactcgtgctcggggtcagcgaggggatcgccagggatgggctggagctcatcagggcgcaggtggggatgaccggggccaagcgcgccgcggttgtagcctacggggaggtcgtcttcagggcatggaaggacgggggttgggtcaagggggaggtcggggaggcgttcctgcaggggatggtggagggcgccgtacacgcagggagcaaggaggtggccaaggcggccaggaagatcctgtcgcctttcgtggagcagagggcggttgctggggttgaaaagttggtgttccagcttgccgaacctgtgttgttccgttcgttgcaggttgcaaactccaatgttcgccataatgctttgcatcttctgttagatttgtttcccctcgaagatccagatgtgactaaggatgttaatgatcctctcctagagaagcagttcttcttgatagacaggctcctcatggatgaatacccagaaataagaacagttgcagttgaaggaatctctcgtattcttaaccaatactgggaaattgtccctgcccccactatttcaaaatttctgagtaaaattgttgatgacatgtccaaggattcttgcaatgaggttcggctatcaacacttaatggtctcatatacttgcttggcaatccacaaagtcacgaaatactgaaagttttacttccaagattaagcgatatgatctcagatactgctctgtctatcagggctgctgctgttgatcttcttttagctattcgagatcttcgatcattccaatacaataaggttgttggtctgggtactttattgtcttcacttgctaatgatcatccccgcattgctcaaaaaattacaaagctcctcattccttcttattttccatcaaagttgagcccaaaagaagcatgtgctcgctgcattgctctaatcaagaggtcaccaacagctggagcaagattttgtgaatttgctctgtctgaagggtcatccccaaggtccattgttgagctagtcaaatattcaattactctcgcattatcacaaacaggacttaactcagatcaaattgatggcctaattattgcttcagtcaatcttattaaaagcttatccaatgagcgctctagtttggctgctttgcgagaatttttggcaaatgggaagctaaggttggtccttcaagttgctgtttctgagcgtgcccgggctgcccttcttggcatagttccagttgttttacctgatgaactatctgtgcttcatgaggaatgcatggatatagttgtgaatgcagctaggatttcaaagcaagaagaatatcaggaaacggtgctggaagcacataagttgatagttttgggtggctggtctgatgaactgtttgaagcattgaccaatactctgcaatctaaagcctctgattttgctgagatttatggagttgaacctcctccatgtcccgttgcatcttcaaggaggaagaaaggcaagtcacttaagaaaatacctgtacgtgacaatgttgttggaaaggggtcatccaaatcaaaaatcagtaatgaagagcttgctgttgcagcgggggcagcatggcaggtcaatgaaatagtaaaaactaaagacttgagagatgcttttcttcaatcctcttattcagagattgtgttttcctccctgaagatcatttctcaagtgtacatcgagcagtgcctatatttggactctttagaccttgcacctgtattggcctatttgagtttggctacatgtaatgaccttccagatgtcaatcaaactggaagctgctttgagtcgtcaacggcaaatcagtcactggatcatctgctcaattgtttcgacaaacttctaaatggaactgttagcaatccaccatcgaaattgaacaagaatggaaaagctttacgatcaaaagaccagcagaaaggagcatctgaagcgaaaggcacatttaatgtgattatgctgggtgcttcaattctgaagtttatcattgacacaaatatgaagccactcaatgatgacaaaataaggtgcctcaaatttgcatcatcctacataaaatatgcagtatcatccataaaaaagcatcaggaacagagttcatgtttcaaggggggtgatctgaaggacgctttgttgcttgtacggagctcctttacatacgcttcgaagctacttcaattggttttatcaagctcccctgaggagtcatgccctccagaggaggccttcttccttgcaaatgatcttcttgatattgtgcccgctgtcgagtcctttgctggctcaagatttgcacccagcatagtttctgctctgaagcaatggctgcctgtgctcttgttgggtcttgtatgccggtggctaattggatcacataatgaaatggcacccaacgtattccactttgctgactctgtcttaccactgtgggtcactgccgtggcaaagaatgagcttgttgattccaaagagcctggccaggacgagcaaagcaatctgactgcggagggcgaggactcactgttatccagaaagctagcagaaatgatggcgatcctcttgaagaaaggaagccccagaatcctcgattgcgcgagtggagtccttctgtccactttccagttgacgctgcgaagatcagactatgacattgtcctgggcatgactcgtttcatttgtgacaagttgcttgggaacaactccctagcattggaaaagctgcagcttacccgtgactttcttcgtgagaatttcctcgagattgataggtatgtccgcgatgagcttgtccatgatgacgattcgaggcagcaactggagaaagcaaaagcgctgataagatcagttctcaccgatgtctgattgatgtacataccagttgtaagcaacaaaccgataagtttccaccggtgtctggagaaagcaaaagcgctgatagtagggctgattagtatcacgttgtgtcattgttcaacaaaggcactgcagtgaccatgtgtgattggatagaagatcatttccactgacaagtagagaccagaaatgaactgtttgaatcaacaatcaagctagagttataactgtgttgcattcaaatttgcagtctacttacaactgacacaggtacaaactgtgtaacaatcccacgttattgtaatccaccacatcccatttcataatagcaaatggacgctggtgtatacaagccacaaggtactatttgtaaggaaaaaataaaactaaatggacgactcaatatacagtttagt

SEQ ID NO: 90086 - DNA, 218 bp, Zea Mays
atgtagtcggattataaaactaatttgtcagccgaagattaaaagacgagacgaatctagtttagttggttgggtctatatttcatactcctatttaaaagtcaaacgcttgatgtgacccggactaaactttagcaggagcaaccaaacacccccttagaagtaaaaatagaaataataaaaaatgggcaaacaagctcaccggccggcccatcaag

SEQ ID NO: 90087 - DNA, 704 bp, Zea Mays
accaaaccagaccaaacataatacgatgctgcggcgccttgtcggcggagccgccgccgtgcgttcgccgctgccgccgccgttctgtcggctgcttcacaacggcggcggaggtggtgggtgtagctcgggggagccggagagcgtggcgtaccgcatgtcgatgctgcggcgcccctctaccgtcagcaagaaggggctcacctggaactggtgcagcctcatcggtcgcctcgccgcaccggtgaggccgatcgacactagctttcttgaagtccccagggcgtacaccttcctctccgtcaccctctcgtcgcccgcgccctcttcgagctcgtccaacataaatgtgacattgcagctgaatggtgagctggcaaatgttggcctaaagcatctgaagcatgatgacctcgtttatgtatctggtcatctgggctcttatcataaagtcagtccaagtggtgaacggcacattgtctataagatttatgtcagagagctgaattatgttgttgatcaaaataagaagcctcagaatgatgcagactcaacaagtccaccatcaatgacatctgtcacccgtcttctttgcgaacccatatgagtggtgggacaaccgacgatccaaaccatgggccaactaccctgatttcaagcacaaggacactcgtgagaaaatatggcttcgtccagatgaccct

SEQ ID NO: 90088 - DNA, 1213 bp, Zea Mays
accaaaccagaccaaacataatacgatgctgcggcgccttgtcggcggagccgccgccgtgcgttcgccgctgccgccgccgttctgtcggctgcttcacaacggcggcggaggtggtgggtgtagctcgggggagccggagagcgtggcgtaccgcatgtcgatgctgcggcgcccctctaccgtcagcaagaaggggctcacctggaactggtgcagcctcatcggtcgcctcgccgcaccggtgaggccgatcgacactagctttcttgaagtccccagggcgtacaccttcctctccgtcaccctctcgtcgcccgcgccctcttcgagctcgtccaacataaatgtgacattgcagctgaatggtgagctggcaaatgttggcctaaagcatctgaagcatgatgacctcgtttatgtatctggtcatctgggctcttatcataaagtcagtccaagtggtgaacggcacattgtctataagatttatgtcagagagctgaattatgttgttgatcaaaataagaagcctcagaatgatgcagactcaacaagtccaccatcaatgacatctgtcacccttcaaatgctaaaagagaatgaatgtataggcaggcttcgcttgtggcaggtcttctttgcgaacccatatgagtggtgggacaaccgacgatccaaaccatgggccaactaccctgatttcaagcacaaggacactcgtgagaaaatatggcttcgtccagatgaccctccttgggtacgaaagcagcttgaattatatgacctggaagtagcagagaatggccataggtgtaaaagtcgactgtcaaaaaaacaaaattggaaaacccaagattttgactactttgatgatgaagaagtacagcatttagcggaagcatgaataggacgcatggcattgtctgccaagaatgaagaaattcaccaggccatttgggtggtttgggggtgggggcggctgtttctttgctcagggatcgtactcaattgtatcgatgtatgtttggtaggatgtggatatgttgagtcttctagtttgtaattttatttatgcgtattttgagatgcaagtgtgagggaacctcgacagtcgacatattagcgaggccctatcaattaacatgcctcgaagtttgctaagtgatacttgggcctgtttggttcaacttttttctgaccagcttttctg

SEQ ID NO: 90089 - DNA, 1334 bp, Zea Mays
accaaaccagaccaaacataatacgatgctgcggcgccttgtcggcggagccgccgccgtgcgttcgccgctgccgccgccgttctgtcggctgcttcacaacggcggcggaggtggtgggtgtagctcgggggagccggagagcgtggcgtaccgcatgtcgatgctgcggcgcccctctaccgtcagcaagaaggggctcacctggaactggtgcagcctcatcggtcgcctcgccgcaccggtgaggccgatcgacactagctttcttgaagtccccagggcgtacaccttcctctccgtcaccctctcgtcgcccgcgccctcttcgagctcgtccaacataaatgtgacattgcagctgaatggtgagctggcaaatgttggcctaaagcatctgaagcatgatgacctcgtttatgtatctggtcatctgggctcttatcataaagtcagtccaagtggtgaacggcacattgtctataagatttatgtcagagagctgaattatgttgttgatcaaaataagaagcctcagaatgatgcagactcaacaagtccaccatcaatgacatctgtcacccgtcttctttgcgaacccatatgagtggtgggacaaccgacgatccaaaccatgggccaactaccctgatttcaagcacaaggacactcgtgagaaaatatggcttcgtccagatgaccctccttgggtacgaaagcagcttgaattatatgacctggaagtagcagagaatggccataggtgtaaaagtcgactgtcaaaaaaacaaaattggaaaacccaagattttgactactttgatgatgaagaagtacagcatttagcggaagcatgaataggacgcatggcattgtctgccaagaatgaagaaattcaccaggccatttgggtggtttgggggtgggggcggctgtttctttgctcagggatcgtactcaattgtatcgatgtatgtttggtaggatgtggatatgttgagtcttctagtttgtaattttatttatgcgtattttgagatgcaagtgtgagggaacctcgacagtcgacatattagcgaggccctatcaattaacatgcctcgaagtttgctaagtgatacttgggcctgtttggttcaacttttttctgaccagcttttctgaaaatctggctgtgtagagaatctggttgtgtagagaatctgagtatcattagaattatgtgcggagaaagataaaggtgtccataggactcgggatctaaaaagtgacgaattcctattattgcaatgactcaatcgattatatgtttatgttgattttgaatgattttt

SEQ ID NO: 90090 - DNA, 2037 bp, Zea Mays
gggagggagagggacagagcgaagagagagaaaactgaagaaacaacattttccgtttttcttgcttagtgaaaccagtggaagagggagagaaaagaagacgaagacgacaatataagtaaataaaaaaaaggcagcgagcgaggtggggaaaaaggggcgagttgatagagagaaagatagagagagaaggcgagggaggcagggatcacgaggtgtgcttcctcctccgcccaatcgggcccaaccaaatcccgccagcgccgcctcctttatactcccacctctttcccggagcttcttggatcacgggacgcgcgccgcgggccggtacgctgctggtgctggaccgctcgactctcgcctaccagctgctgctttggctggcgcgccggcgagagagagagagagagagggacgcgacggcgatggaccgggcggcgctcaccgtgggcccggggatggacatgcccataatgcacgacggcgaccgctacgagcttgtccgcgacatcggctccggcaacttcggcgtcgcgcgcctcatgcgcaaccgcgccgacggccagctcgtcgccgtcaagtacatcgaccgaggcgagaagattgacgagaacgtgcagcgggagatcatcaaccaccgctcgctgcgccaccccaacatcatccgcttcaaggaggtcatcctcaccccgacgcacctggccatcgtcatggagtacgcctccggcggcgagctcttcgagcgcatctgcaacgccggcagattcagcgaggacgaggcgcgtttctttttccaacaactcatatcaggggtcagctactgccattccatgcaagtatgccatcgtgacttgaagctagagaacaccctgttggacggcagcaccgcgcctcgcgtcaagatatgtgatttcggctactcaaagtcatcagttctacactctcagcccaaatctaccgtgggaactccagcatacattgctcctgaggttcttctgaagaaggaatacgatgggaaggttgccgacgtgtggtcgtgtggggtaaccctctacgtgatgctggtcggcgcgtatccattcgaggacccagacgagcctaagaatttcaggaagacgatccagagaatactgggcgtgcagtactcggttccagactacgtccacatatctccggaatgccaggacctaatctccaggatcttcgtcgccaacccgtccaccaggatcaccatgcccgagatacggagccacccttggttcctgaagaacctcccggccgacctggtggacgacagcgcgacgacgacgagcaagcagtacgaggagcccgagcagccgatgcagggcatggacgagatcatgcagatcctgggcgaggccaccattccggcggcggggtcccgcgggctcaaccagttcctgaacgacggcctggacctcgacgacgacatggaggacctggactcggacgccgacctcgacctggagagcagcggggagatcgtgtacgctatgtgacggcgccgagtgctcagcgacgaggcaatgtctcgttgcgctcgcaggttgccgagataactagagagacggagagggtgggtgtgtgctgctgctgcctgcagcctgcgtgtagttgtgtgctttcaggtctctgctgctcatgcctgatgccgtcgttcgtgatggcccctttttaccgtcctgttgtgtttggccgttgttatttggtgcgccttcagtgcagtgttttgcaacggtttagccatttggaatcgctactgctacaacctcgttcatccgagaggaccctttgtttctgcatccccagcgatgtacttgtattactacactgtatcatatgttatatttggtgtaggaaaataaaggaactccattgcccgttctctgtctgtccccatctttatttcatccgtatctcagttttgtgagaacccgctggagatctttctcgattttggtgtcttcttggctcatatatctcaagtcgtgcacaccctctatcagagcaaat

SEQ ID NO: 90091 - DNA, 1950 bp, Zea Mays
ccatccacccacgccacgcccttgcttccatacggctgctgcggctacctacataggcgtctctccttcaatcaatggccgccgcctcgtcctccaccgcgccgccggtggccgagatgcctgcaccgacctcgtccacctccgagccgctcccgtcagccccgcccgcactctctcgccgccgcagccgcatccgcgaggtgagctcacgctacctctccacgccgctcccagtcccgtcccctcgcctctcgacctcctcgttccactccgccacgccgctcccggccccggccccgtcccctcgcctctctacctcatcgtcccactccgccacgccactcccagccccgtcccctcgcctctcgacctcatcgtcccactcctccacgccgtccgcgcgcgcgcaccatcgcagcattcccgccgcccctaccgcctctgccctcgccgacgaaaaccacccgccgccgcctacaccaggctcacgcaagcgcggcgcagcgcgggacctgttcgaggaaacacaccgcccgcgcctgaaccctcctgctcctctcgccgctgctggagtcagtggaccctcagccacccccagtccgagaccgaggcgaatcctctgcccgtcgtccagagcctcttctaacaccaccacgacggcgcacgaacaccctaggggctgtatgcggccatcgacacgagtgcgcaccagcttcaccatctatagcgcttcgcatgagacctcggccgcagccatcgactcccggccagcagcttcctgccctcgacacgtcccgttccctgagcttaggacatcaccgccatggacaaggacaacagaggggcccggcagaccgccaaacccattctgctttcaggccctagcctcggcgctgccagatcgtcaagcaaaaacaccaccaccagctgcagtgaagccggcgccggtgcctgtgcctgcacggaagaaggtactggctaagaagggagcagcggcggcgatgggaggtagcaaagatgcggggaagcaggaggatgtgcacaggttgcggattctggacaattgctacatgcagtatagatttttgaatgcccatgcagaggctgcggcgatagccaagaaagatgttgctgagaaaacaatatatggactctcggagaggattgctaatatgcagaaatatgttgcacaaaagaaggctgaactggagtgtctaaagaggatggagaaggtgcactttgttgttgatagtcaggtgccttctttacaacaatggtgtgaacttgagagagaacatataagttgcctttcatcaggaacagttgccctctgtgatgctgcatcacgtgtaccgatcctagggaacattaaagccaacactggagaagtcaaattagctcttaactccgctatggagattatgaaacagttgtctccctgtgttgataagttgtcaagaaaggttggagaaactgaggatgtggcttctgaactcagtaatgtggtatcagacgagcaagtgctacttcaagagtgtgctgacctcttacatcaagcgcacgacatacaggcgatggaagacagcctcaagagccaagtgatgcagctgaccaaaaacaagacatgaaggcagtgatcttgtaggacagttgaccagtggaggtacataatggtttagcttgcagtgcatattggatgaggtgcagctgttcttggatattttggtataaggaacaaaatagttgttgatggtagttataatcaattttagctgatgtagaggggcgcatatcatattgatatacaagactgagaaagggattggccgatcaagaaatagtgatttggctgtggtagggcgtttgtcttgtctatagtatttgtagtgtagaagcacatgtagtttgctatataataaaagaataaatagcacagagatgtttatgtta

SEQ ID NO: 90092 - DNA, 2865 bp, Zea Mays
gaactaacgagctaagattcctcccctcaccggcgcttgttcccatggtctcccaacaccgagccgccaattattcccactgtcccctcaccacgagatgctgcccttgtgctctgcatgcagatgcaggtgctgccgaggaagaggaggcgctccgggtcctggcttctagacgttgtgaaccagatcttggtgcggttgcccgagtagtttactcgtctagaggaggggtttggttctcgacccgattcggtgggggcttcgccactgggatagggggacagtttggcctgctggatctttatcgccagttgttggttctgtcctttccattgggctggtactttcttgacggattggttaagcgctgtctgtggggttgttgtgctgctcctcccttcatctcgttttgtggtgattggtggggggaggaggaagagctaggaggattctctctcttgttcttgggtcagttcttggcacggcaggatgaagtatatgaagcttggatcaaagccggatgtccttcagacggaggggagcaatatcaggtttgtcgcgacagatttggcaacagacgttgttatattgattggggatgtcaagttttaccttcacaagttccctcttctatcaaagagttcacgcctgcaaagattagttgcttcaatcaatgaggagaaaaatgacgaagtggatatctctgacatccctggtgggccttcagcatttgaaatatgtgctaagttctgctatggcatgattgtgacactcaatgcgtataatgtcctcgccgcccggtgcgcagccgagtacctagagatgttcgagaccattgacaaaggaaacctcatatacaagatcgatgtgtttctgacatcaagtgtgttccgcacctggaaggactcgatcatagttctacagagcacaaggtcactggtaccttggtgtgaggatttgaaagtgatcagccactgcatcgactctatcgcgtcgaaggcgtcgattgatccatcagaggttgagtggtcatacacttacaacagaaagaaactcccgtctgagaacggtatcgattcgcattggaatggtgtcaggatgcaacctatggtccctactgactggtgggtagaggacctctgtgagcttgaagtggactcgtacaagcgggtgatcatgagcatcaaggcaaagggaagcacgccagctgttgtcgtcggagaagcattgagggcctacgcgtaccgacggctgcttggctccctggaagacgctgtgagcaatggagttgattgcgcaaagcctcgtgcagttcttgacgctattgtatctctcttgcccgctgaggaaggctcggtgtcatgtggttttcttcttaagctgctgggagctgcatgtttgctggaatctggtgagtcgtcccatcgcagtaacttgatcaagagaataggcgcacagttggacggtgcttcagtttcagaccttctcattataccaccaaatactgatgaaaacgatacatacagcatagatctggtcatggcaatagtggaggaatttcatgtcgttacagaatagcgacagtggcaaggagaaatttcaagatgatgaagagatcgtggagactgagaaacgtggcatcggtttccagcacgtcaaagctgggcagttgcaaagctgatcgatggatatcttgctgaggttgccaaaggatcccaaccttcctcttccgaagctgaccgcgcttgctgaaatgggtgtcttccctaccccggccaacgcatgacggcctctaccgtgccattgacatgtatctgaaggagcaccccagcctgtcgaagagcgagaagaagaaactatgcgggctgatggactgcaagcagctgtcgcacgatgcgtgcatgcacgccgtgcagaacgagcgtctccccttgcgtgtggtcgtgcaggttctcttcttcgagcaggtccgggcgtctgtcgcctctgcgaggagtgacccttcttcagctgagcttccatctgccgttcgctcgcttcttcccagagagaacggtaactctgttggcagctccaggtcagctgccacgacgacaacggaggaggacggatgtggggtcccgacgtcgagtgacgtcaactcgttgaggtcaacaaggctcgccaacaacagcggcggaagcgagaggagcagtggcagcagcgacatcaacaggagcgccgcggggaggggggcaagggggattctgatgccgaagaagatgctgagcaagctctggtctgggaaaacgaacgccggtgagaacagcagctcagacacgtcgcagagccctgggtccgtcaacaacccggaggaggtgaagtccacgcagtcaaggatcacaaggcgctcggtatcctagtcgcggaggggtaaccgcggtcacagcctagttttgttcttgctcttgatttttgccttcactggagagtagtggcaatctaaaaaatgtggagttactggagtaggtttggtcattgatgatgttttcagccatgttccatgggaactttttacatacaaagaaagtataggttgttataattgatgtatttttgctggcaaaatcatagtgttttagtttgctttttacggccaccggccaagcccggcacgattaatttcaagggctgaagacagagtgaagtaaatgctttatgatgtgattggatttgttagagcaactataaagagactctctctagcctttctaattgttaagaataaaaatattggtaaaagaatatactttagtaactttttaaatggttatctaaatatagtcatctttagttctgaatttgtcgctagtcaaaaataaaaaa

SEQ ID NO: 90093 - DNA, 1890 bp, Zea Mays
aaggcccagtttggcaattggagccctaaagcctgcagagtccccccctctcccagtccggtactccccaagtccccatcgggcatcggcgctgccacgccacggccgacgcttgagacgctccccgccgcctgccaggccgccaccgcgcgtgacttcgcctcatcctctccggagatggacttccaggtcgtcgtcctcgccggaggcacctccgagaaactctcgcccctcgtttccaaggacgttcccaaggcgttgctcccggtcgccaatcgccccgtactctcttacgcgctggacctccttgaggccagcgacctcaaggacctcatcgtggtggttgaggggcaggaggcagcgcagcttgtcgacgcttgggtatccagtgcgtacctggatcggcttcgagtggaggtagttgtggtttctgaagaccttggaagtgctggtgcattacgagctatttcaaagcgactgatggcaaacgatattttggtagttagcggtgacctggtaacagatgtgttgcctggggctgttgctgctactcatagaagaaatggtgctgctgttactgctttactatgttctgttcctgtcagtggtccttcagacacttcttcttctagtgggaaagataaagctaaaaagccaaatcgtttgaacatagtaggactggacaggagtaaacaattcttgttacatattgtgtcaggaactgatgttgaaaaagatattcaagttcataaaagaaaaatacaggctgttggtcagatggaaattcgaagtgacctaatggatgcacatctttatgcttttaagaggacaatattacaggacgtactggaacaaaaggaagcataccgtagcattagacttgaagtcctcccgtatttagttaggagtcaattgagatcaactccatcaggtggcagtggaacatcagttgacgaaattgagagtagtgcctttcagtccagtggtaatttgcagtgtttgtcgcagcatcgggtcattgcaccatctgctttcaagcaggatgtattatcaagatcaagtggtggacataggtgctgtgcttatattgctagtaaaagcaaatactgtcaccgcttgaactcaatccagtcatattgtgatatcaatcgagatgttataggggaagttagccacctgtctggttattcgttttctgcacaaaacaatattatccacccatcctctgttcttggatcaaagactacaataggaccacactgtattcttgctgagggttcacagcttggtgacaagtgtagtgtgaagcgatctgtgattggtcgtcattgccgaattggttccaatgtaaagatcgtcaactctgttgtgatgaatcatgttgttattgaagatggttgccacatccaaggttctgttgtatgtaataatgttcaactgcaagaacgggcagttctgaaagattgccaggttggagctggttatattgtgactgctggcagcgagcacaaagcagaatccctagcaagaaagtacagtgagctttgactggtttgttagatcctgaatgttttttttttgtgttcacttgagatgcaccccctcagaaaaaagggtagcagttgtccaaattttataaaatgtcattatgtacaacagcacagttcagtgcgaaaggtttggttgcttatctttcctaccaggcggcttgttagagcgaaaggtttggtcgcctatctatcctaccagctgcttgagcaagttgcatgctgtctgaggacgatgggttgatagttggggcatgtagttgggacctactattgtcggaaattctggattcggtttctcttccgccttgtgtttttgtgaggccaggtgattgcctcttat

SEQ ID NO: 90094 - DNA, 715 bp, Zea Mays
gcattctctgttcttggatcaaagactacagcaagtatgttgaactactagcatagcatcatgaaatggttacaatttctattttggcttattttattttatgtttgtttagataggaccacactgtattcttgctgagggttcacagcttggtgacaagtgtagtgtgaagcgatctgtgattggtcgtcattgccgaattggttccaatgtaaagatcgtcaactctgttgtgatgaatcatgttgttattgaagatggttgccacatccaaggttctgttgtatgtaataatgttcaactgcaagaacgggcagttctgaaagattgccaggttggagctggttatattgtgactgctggcagcgagcacaaagcagaatccctagcaagaaagtacagtgagctttgactggtttgttagatcctgaatgttttttttttgtgttcacttgagatgcaccccctcagaaaaaagggtagcagttgtccaaattttataaaatgtcattatgtacaacagcacagttcagtgcgaaaggtttggttgcttatctttcctaccaggcggcttgttagagcgaaaggtttggtcgcctatctatcctaccagctgcttgagcaagttgcatgctgtctgaggacgatgggttgatagttggggcatgtagttgggacctactattgtcggaaattctggattcggtttctcttc

SEQ ID NO: 90095 - DNA, 2130 bp, Zea Mays
gttgttgcgaaacggtgccgcttcgagccaggtgcgggagggaccgagggaggcggagcaagtgggagctctggagctggagcgggtggaagtgggctgggactgggagccctagcaaagggccatcgcatcccctcttgcatactctctctctctctctcgtgattctcccgtgccccggtctctctgtctctagtggcgacgactgcgctgcgccgccgccctacgcaggtgcccaagtgtctatcttcgggactgcgccggcgacgagcacccaccagaaattgttggacctgggtctgcccctggactcgagcttggggccaagctaattcgagctctgagcatttgatttctagcatcttacatgcaaaaagctagtacttggaatccgagcaagatctaacccagacagtgcagtggcaggtcttttcagttcagcgcagcatatcaagattgtctctgttaatttgtgtatgagatcagttaactgataaggatatgtaaagaaccaatgatcagtaatttttacactccagattgtagtatcctctaagatggacggaagagaatcagtcttatggtaaatcctggtgaatattcatgggaggtcagcaagttctggcctgactaagtctggtaaaaaaagttgcttcatctcagatcatcaatggtgagaatgaggttcccgaaacgttatctcatagtattgctgacattcatctgcacaaatgtttgctacattgagcgcgtgggtttctcgattgcttacactgttgcagccgatgccattggtgtgaatcaggccaacaagggcatgatactctctatgttctattatggttatgttttatcacagattcctggtggatgggcagcacagagaataggaggcagacgtgttctgctactgtcatttgtattgtggtctatgatatgtggtttaatcccactcgaccccaacagagtaaccattctggtcctttctcgcctatttgtcggtgtagcacaaggtttcatattccctgccattcacactgttctggcgcagtgggtgccaccgcaggagcgctctcgctcggtatctctcactacctcggggatgtatcttggtgcagctggtggcatgcttttcttcccaagtctggtgaagcacacgggaccccagtcagttttctttgtcgaagcagtgctgggagtagcatggtctgtcatatggttgaaattttccagcgacccacctcgtaccgatcttccaaaggtatcgatgccgaaagtggcatctcgggacatgattaaggcacaagcaggaggggttgttgcacctcgcacagtaaagatcccgtggcgaaggataatattcagtctacctgtttgggcaatcgttgtaaacaacttcaccttccactatgccctgtatgttcttatgaactggctccctacctattttgagcttggcctcaagcttagcctccaggacatgggttcctcaaagatgctcccttatttcaacatgttcattttctccaacatcggtggtgtgatcgccgatcacttgattacaaggaggattctgtctgttaccaagacgaggaagcttctgaacaccatcggattcatcgtctcagcatttgcactcatggcccttcctttattcagcacaccctcaggcactgtaacgtgttcggcgatatccctcggttttcttgccctgggaagagcagggtttgccgtaaaccacatggatgttgctccgaagtttgcagggatagtgatgggcgtctctaacacggcggggacactggctgggattattggcgtcggcctcactggtaatatcctggaggcggcgaaggcttctaacaaggatctaacagactcggaaacctggaaaacagtcttctttgttccggcatacctttgtatcttcagctctgtcatttttttaatcttttcgactggcgaaaagatattcgagtagatggtgattatattttttgtttctcatttacagtgaggcaggatagcagaacgggaatctcacatgtacccgtagcatttgttacaaaatttcatactgtatcatacacatgatctaaagctatgtcaggaaatctcacatttttcatt

SEQ ID NO: 90096 - DNA, 85 bp, Zea Mays
caatactcctcgtattcggtgtatcacacttatctgatgctgtagaacaacttatttttcttcttttcttcacatgtcttcattt

SEQ ID NO: 90097 - DNA, 1303 bp, Zea Mays
agcctccagctagcttcgtctatataagcaaccagccatcagccttccttctctcctagctagctactagtacctgtcctgctgtccttcacatacatctatccatcggtttctcagctgctgctgcatacacacctcggccgccgccatcgtcgtcgcctagctagctctgctcctgggtcgtgcgcctccatcgccgtacgttcgatcgagcacagcacggccggccggtgggcgcacgcgcacgcgttagcttatactacattaaacgtacgagactgcaggagctagcgagcaacggcgtgccgatcgatcgatcgacagagcggggcagatcgatgagctgcaacggctgccgcgtcctgcgcaagggctgcagcgacgcctgcgtgctccgccccagcatcgactggatccacggcgcgcagccgcaggccaacgccaccgtcttcgtcgccaagttcttcggccgcgccggcctcgtcgcctccctcgccgcagtcccgctgcaccaccgcccagccctcttccggtccctgctgtacgaggcctgcgggcggaccatcaacccggtgagcggcgccatcgggctcatgtggacgggcaactgggacctgtgccaggccgccgcggacgccgtgctccgcggcgagtcgctgcgcgcgctctccgccgtccccgccgcgttcacggaccgcgacatggacgggctctacggcagcgtcggcggcctggtcgccgccgccgccgccgccgcgtcgcccgagaactcctcctcctccgcgccgtccacaacgaagcgcaggaacgcgaacggcggctccagcaacaacgccgtccctgcggccgcggcctctcaccaccgcccgccgccgccggctgctgccgctgctgggctgctgctgcagtcgtcgtgccaccagctcgacctctgcctgacgccagcgctgtcgccgccgggcgccgggccgcggggctgcgccgccggcgcgtccgacgagtactcggccacgaccacgtgcgaggaccagaccggtgatcacggacacggagagcccaggcctcccccgccgctgctaaacctcttcaactgaactgactgactgacgggtgactgtgcagagagcgagggttcttcaggggcagggtgtacgtgtggtaattaagtaaagaagaaacccgtcaattagcgctgttaataggatggatttttttttatattttcggaggcgatcccatgattcgaattcgaacaccaagttataatttctgtgttttagctaaatgcaattttcagaagatg

SEQ ID NO: 90098 - DNA, 529 bp, Zea Mays
gctgccgcccgctcaccctcatcccccaggcctccacttctccgattggggcgacttcatggcgagcgggcacggatccgacatgggcgcctctgctccgacgaccgctctctcctctgcgcctccactgcccctctccctgttaggcggcgacaacaaggaggaggaggaagggtcggtcgggccaccgtcggcaccacgcgaggcacgagcgcaaccgcgcctatgagttccatcgatccgagccgtcgacgctaggcggcagtgccctcgtctgcttcctagctccgtctggacctgcccgagcccaggcagagccgccgccgacccgagatctgcctaggccgcccgcctgctctggatgaccaaggtcatctccgcggacgctgagcagctaagctcctcccgcaaaggcgtgaaccccgcccccagccgaggcactgagctccgccccgccccgctcgggcgcgcccctgcacaggctcagccgcctcgctcctgtttgccgccacggttccagtaacgacga

SEQ ID NO: 90099 - DNA, 1242 bp, Zea Mays
atgggcgcctctgctccgacgaccgctctctcctctgcgcctccactgcccctctccctgttaggcggcgacaacaaggaggaggaggaagggttccgaagagttcctggaactcatcaagagtgcacttcttacagccctagaagggagtacttcttacagcctgtttgtgttattttgcacttcttacagcctgtttgtgagcttggtattcctcctgaaaacatcactgcaaaccaattgttatttggcacattgagggactttttaattcttactagtgtgctaacctttgtttgtgttcaggaccatggctacaagacaattgttacgattggtgatggcgcaactgatctggaggatactcaggttttttgtttcttcagtcagatatcatacacgagtacaaatgagattaatgattggataggagctccgaacgcgagccatagacgggagttgatgccactgggcgatggatggtcgcatcctcaggacctcggcgtgcaacaacagcgactgtcatttttctcatcgcctacttcaatagcctacaacattagcagcgaaggatcgacaaaggtggcatctgaggcagcagatataggaagaccagccttgtttccagcttctggtttatcaaacacttttgggttcaaggttcaggacaagcaagggagaatgcaaagatttaactgtgaaatgagcagcttgacagacctgataactagcattcttcagagggtcggcgatgacattgacagaaaacacctgccacaaatttcgtatgaagatgaggaccatgataaggtcatattgtcgtcggacagtgaccttatagctgccatagaccacacaagacagatcggttggaagagcctaaggctgcacttggactacgcccgccagaagagaggggacggttcctcagacttcgagtacgctggcaaggatgcatgggcttctgcatactttggagtcatcaaacatctaacatttacacttgaactgtttggtgaaatgcttgggagaaagaggccagcaagaatggagtcatggaacatcggcaggaggggtgcagcagcggcaaccgatgtatcccttgaacaatctggttttgacaagatgcaaatcaatctagtgtacactgtattccacacttttacagattgtttggctaattacaagattatctcagtgttttggtttggatttagagtacacttatgtatgaaatattga

SEQ ID NO: 90100 - DNA, 122 bp, Zea Mays
tttttttgtctattttatttctttcagaaaaaattgctatagtctatgagttggttcttagccttctactcgaagaggtgagtaaatgcaaatcttttttaaatgattgtttattatcctcc

SEQ ID NO: 90101 - DNA, 151 bp, Zea Mays
ttttctcttattcgggtgtcgcgctttggggatttagaatttgtggaaaacattcaccagtatagcagtagagtggttggtcgggagctgtcgtgcaagcgagttgggccgtgaatcgcaatccggcccactaaccctcccctaaccctag

SEQ ID NO: 90102 - DNA, 385 bp, Zea Mays
tttccgttctgtgggattcttgcttgcggatcgccaccgtgatggcagcaggggccgtgaagtggacaactagtacatccgccaccgctcgccgtatgcgccactgatgagccgaccttcaaaaaggaaggacgataaggagcctagcgaggtctcaagcgatagcggctcggagtctggtgggcgcccacgagtgctgagggaggatgggggtcttggggtctgcagggatggaggtgcgttgccagcaagcaagaagaggaagcactcacctggattccacgatacgaatgtttcaaagctgcgggcaagagatgaggtgtggaggagaggacctgatgccatagctacggagctccctcttccttcgccgccccctatgtct

SEQ ID NO: 90103 - DNA, 971 bp, Zea Mays
ccgtatatgcatactacttattggtttgtaacaaagttgaactgcaaagggtaaaacagacaatcgccacagaccaccaactctcagcagacaagaatcagtttacttgccaaacggtttgaaaaatgattctaattctctaggagattcaggaggatcagctcctcaggaggatcaggatctggagctaaagaagcaggagctggagctttgccaaacggaccctaaatgtcaatgttggggtatttttttctcttcaactttgtatcatatttcaacccttactgtataaatatataatactaatcaatatattttttgtccagactgttttgaatatcgaggagttcgaacaacacagttcaaatccccagcccttctcaacatcagttcttaaagaacaactagaaccgacgcttcctccagatgaagttctgaaccaaataaaattgatcctggttcctatgctacgtcgtagtcattggaccctttatgcaatcaactttcaacttcgtcgaatagacattttagattcaaatccttatgggacattgcttggaggcactacctggaaacaaatccacaatgatcaattgttgataaatggaacgaagataccttggtccagattaataatgagaagacttagcattgcgttacatgaagctcgaccagatacaagtttaccaaagattggcaactacaagattgggcttcttcccaattgtccaaccatgttaccatggtcaaacgattgtggtttttttgtcgcaaacttcctccgatactacgattttgatgatggcgacttatcaaaattttatgtaccggatgaaccattggaccaacgcgcttttgttctacattgcctgacctttcatcgcaacaacagggtttaccccatcccggcagaactgctgcctttcaagtatgttccaaggaaacgacgttgtttgaaagccaagacttag

SEQ ID NO: 90104 - DNA, 1448 bp, Zea Mays
atggccgttccatacgctcggctccatacgctccctgcctccctggcccgcatccaatcgatctggtcccactgcgcagtacttataaaacctttctcctctgaagctgctcttctggccttcttcccgaccgagaggcgagagcccaaacccgcgcagtcaagatttctcgtcgtcgtcggcaatcggcagcgtcaagacaagaactcgaaccccttcgccgcttcccctctcttcctgttgctccccgccgcgccgtcgtacgatctcctgatccgccgggcgctcacgtcgaccacatttgcgcccgccaccgtgcaccgctgcctccagagcgtctcagactccaagaaagggttggttctttcagtgtggtttccaatggagaaaaaggggcctcaggccctcacagcaactgagctgaatgctgccgtgtacagatacctccaggaatcaggatttgtgcatacagcattcaatttcttctacgaggcaggcattggaaaaggcaacatacaggaaatgctcccgcaaggtgccttggtcagaatcatgcagaaaggtcttcagtccattgaacttgaagcaaattctgagattggcagcgatgaggagcaccacttttttgaatctctggacttaatgaccaatgatttagatgagctgacaaagaaaattaccagcagtgtgaagcatagttctgagcagaaaatcgatttagttgagactgacaaagcgcagaatattggtgctgctgagactaccacaacttataaggctgcacagaacagcaaacctgatgggacagctacgatggtcagaactcagccagtgaagcatacgaaggcaaaaaacatcagttctgctgagactatgcaaaagactggttctgttgagactaccacaagaccggggttgcctgtttcatggaaagtgaagaaatttagactcagaagacgaaaggattgaaagctagacaagtgaagggattgaagttagacattaaaatccgttgctgattcagagcgtggagatttgataaggatgcttaaaatactatcagaatatcaatacatcaaatttatgacagataccattcagtttctgatttagtaggcagtatatggaagtacatatggcatggctgcattttcacaggctaacaagcagttttacaactcgtatacctgggatggatgaatttgtgcttgccaatacgttagtaagcatgttaaaggataattgacaatgtgcaaagcctaaatgattactagtgcatttttttgatatttcatttgacagcagcattgtatggtaagattgtgtacttgtgtagtagtgcactgcttttgtaaatcagataggttctccttccccctcttgtagtatgagcactgtcgtgtaaccaaactttcgtaccttttataacttttttgagaatttttcat

SEQ ID NO: 90105 - DNA, 1314 bp, Zea Mays
caggcccacatccaatcgatctggtcccactgcgcagtacttataaaacctttctcctctgaagctgctcttctggccttcttttcccggccgagaggcgagagcccaaacccgcgcagacgcgcagtcaagatttctcgtcgtcgtcggcaatcggcaacggcaagacaagaactcgaaccccttcgccgcttcccctctcttcctgttgctccccgccgcgccgtcgtacgatctcctgagccgccgggcgctcacgtcgactacctttgcgcccgccaccgtgcaccgctgcctccagagcgtctcaggatttgtgcatacagcattcaatttcttctacgaggcaggcattggaaaaggcaacatacaggaaatgctcccacaaggtgccttgatcagaatcatgcagaaaggtcttgagtacattgaacttgaagcaaattctgagattggcagcgatgaggagcaccacttttttgaatctctggacttaatgaccaatgatttagatgatctgacaaagaaaattaccagcagtgggaagcatagttctgagaagaaaatcgatttagttgagactgacaaagcgcagaatattggttctgctgagactaccacaacttataaggctgcacagaacagcaaacctgatgagacagctacgatggtcagaactcagccagtgaagcatacgaaggcacaaaacatcagttctgctgagactatgcaaaagactggttctgttgaaactaccacaggaccggggttgcctgtttcatggatagggaagaaatctagacccagaagacgaaaggattgaaagctagacaagtgaagggattgaagttagacattaaaatccgttgctgattcagagtgtggagatttgataaggatgcttaaaatactaaatacatcaaatttatgacagataccattcagtttctgatttagtaggcagtatatggaagtacatatggtatggctgcattttcacacatgctaacaagcagttttacaactcgtatacctgggatggatgaatttgtgcttgccaatacgttagtaagcatgttaaaggataattgacaatgtgcatagcctaaatgattactggtgcattttttgaaacttgaaaggatatttcatttgacagcagcattgtatggtaagattgtgtacttgtgtagtagtgcactgcttttgtaaatcggataggttctccttccccctcttgtagtatcccctcttttggggagcactgtcttgtaatcaaactttcgtaccttttcataacttttttgagaattt

SEQ ID NO: 90106 - DNA, 1313 bp, Zea Mays
cgcgcagtcaagatttctcgtcgtcgtcggcaatcggcaacggcaagacaagaactcgaaccccttcgccgcttcccctctcttcctgttgctccccgccgcgccgtcgtacgatctcctgagccgccgggcgctcacgtcgactacctttgcgcccgccaccgtgcaccgctgcctccagagcgtctcagactccaagaaagggttggttctttcagtgtggtttccaatggagaaaaaggggcctcaggccctcacagcaactgagctgaatgctgccgtgtacagatacctccaggaatcaggatttgtgcatacagcattcaatttcttctacgaggcaggcattggaaaaggcaacatacaggaaatgctcccacaaggtgccttgatcagaatcatgcagaaaggtcttgagtacattgaacttgaagcaaattctgagattggcagcgatgaggagcaccacttttttgaatctctggacttaatgaccaatgatttagatgatctgacaaagaaaattaccagcagtgggaagcatagttctgagaagaaaatcgatttagttgagactgacaaagcgcagaatattggttctgctgagactaccacaacttataaggctgcacagaacagcaaacctgatgagacagctacgatggtcagaactcagccagtgaagcatacgaaggcacaaaacatcagttctgctgagactatgcaaaagactggttctgttgaaactaccacaggaccggggttgcctgtttcatggatagggaagaaatctagacccagaagacgaaaggattgaaagctagacaagtgaagggattgaagttagacattaaaatccgttgctgattcagagtgtggagatttgataaggatgcttaaaatactaaatacatcaaatttatgacagataccattcagtttctgatttagtaggcagtatatggaagtacatatggtatggctgcattttcacacatgctaacaagcagttttacaactcgtatacctgggatggatgaatttgtgcttgccaatacgttagtaagcatgttaaaggataattgacaatgtgcatagcctaaatgattactggtgcattttttgaaacttgaaaggatatttcatttgacagcagcattgtatggtaagattgtgtacttgtgtagtagtgcactgcttttgtaaatcggataggttctccttccccctcttgtagtatcccctcttttggggagcactgtcttgtaatcaaactttcgtaccttttcataacttttttgagaatttttcat

SEQ ID NO: 90107 - DNA, 1021 bp, Zea Mays
acctgcaactgcaactgcaagcgacgatcgagagccaacaaacaacatcagcaacagcagcagcaggcttcagtttgcacgcagggtttatcgggcatggacttggagcgtatggacgagacgtcgtcggtgaacgatcagagcgcggaacggcggcccacggtggccggcggcggcggcggcgccatgccgtggctcgacctcacgctggccgtgaccgcccctcgcgacgagttcccggcgacaacggacggggactcctcgtccgccgcctcagacggcgagccgccgcccaagcccgtgcccgtgccgtcctctcctcctcctcctcctccctccgcgcccgcgccgcacaaggtgttctcgtgcaacttctgcatgcgcaagttcttcagctcgcaggcgctgggcgggcaccagaacgcgcacaagcgggagcgcagcgcggccaagcgctcctccgcgccgtcgcccgcctaccagtaccagtaccaccacctccacgcggcgcagcggatggtcatggccggcctgccgctcgaggcgcacgccgccctggtgcgcgccgcgctgcgggtcagcccggccagcgcggtcatccaaaagggcgccgccagccaggagctcgccgccgcggcgcggaaggctgccggtgccggggcccccggcgccacgagcacggcccccaggttccacgacggcaacagcgccgccgccacctcgtgggcgccggcgctgctctacgagatcgaggagccggtcagctcgacgtggccggggagcttccgcatgaggacgcagcctgagccgccgagctcggaggagcaggcgtcggcgtcggagcagagtaagaagatagacttggatctcaggctgtgaaactgaagccgaaacatcgtcgtagttacatgttgcatacttgtagatgaggaggagctcgcgcgaccagactgtactttgatttctaactagtttcgattttcaccggtatatagttgtctgtcagctgcctaatccctcg

SEQ ID NO: 90108 - DNA, 77 bp, Zea Mays
atatatttctatgctacaattttagcttaggacccttatgtgtatcatttctacatagaaatattgtccaagaaatg

SEQ ID NO: 90109 - DNA, 1552 bp, Zea Mays
cacctcgatggccgccaaccacaacgctgatgatgccgctagagagcctgtcgcgagcgcctctccacccgcctctgaggccgagcaccgcgccctcctccgaccatcgtcgttcatctccgccatctcagacgacaatgaagggtgcaaggagcgggcgttcgagccatccgagaaggtcatcgtctccgtctccggcgaccccgaaggcgatgctagcgaagagcgcgccttctacgcctcggggggctgcatgccgcccttctcgtggcgcaagctgtgggcattctcggggcccggctttctgatgagcatcgcgttcgtagacccggggaacatcgagggcgacctgcaggccggtgccacagcgggcggcacgctgctctgggtgctcgtgtgggcgacggccatgggcctactcgtgcagcttcacgccgcgcgcctcggggtggccacagggaggcaccttgctgagctgtgccgtgacgagtacccggattgggcgcgccgcgcgctctggttgatggccgaggtcgccttggtcagcgctgacatccaggaggtcatcgggagcgccattgccatcaagatcctcagccacggcctgttgcctctctggggcggtgttgtcattaccgctttggattgctttatgattctttccctcgagaactatggggtgagaaagttggaagctctatttgcggttctaattacaacaatggcgtgctccttcgcatggatgtttgtagagaccgagcctagtggcaaagatctattcattggtattcttgtcccaaaactaagctcgagatcgataaaacaggccgttggccttgttggatgtgtcatcacaccccacaacgtgttcctccattccgctcttgtgcagtcaagaaagattgacccggacaaggaatacgaagtccgtgaagcgttgaggtactattccattgaatccaccctggcattggtagtgcccttgatgataaatttatttgtcacgacagtttttgcaaaggggttctatggtaccaaggaagcggatagtatcggccttgagaacgccgggaagtatctgcaggagaagtttgggggagactttttccctatcctttatatctggggtgttggactgttagccgccggcaccagtagcaccataactggaacttacgctgggcagtttataatgggtgggtttctgaactggcggctgaaaaaatggatcagggcattgatcactagaagctttgcgattgttccgacgataatcgtcgctttgtacttcaacaattctggctatgagctggatgttctcaatgagtggctcaatgtgctccagtcagttcagatccctttttctctcatcccactgataacactggtttcaaaggaggaagtcatgggggtgtacaagataggtccaagaatgaaatggtcagtggatggtcgagtcctcgtgacatggatctcccaaaagtcccctccatgggagatcgaatccccacatcgcggtcatgtctcagaagttcccccgagacacctgtaa

SEQ ID NO: 90110 - DNA, 5204 bp, Zea Mays
ctccggccaggcaaattcggctcagggtggcagccaaacaagcccctgatgccggagcagtctagatccggcgccccgatggagtggacgacggtgcagcacctggatctccgccactccggcggccgccgcggtgcctcggcccgccctatgcagccgcacgccgctgccttccgctcctcccaggccatcgtcgctgtggccatcggcacccacgtcgtcgagttcgatgctctgtcgggaagcaagatagcttctattgaccttggtgcccgtgttgttcgtatggcatatagccctacaactagtcatgttgtcattgctattcttgaggatgctacaatcagatcctgtgatttcgccacggagcagacacttgtgctgcattcgcctgagaaaaaaacagatcatgtttcaatagatactgaagtccatcttgcattgacacctcttgagcctattgtattttttggtttccacaaaagaatgagtgtaacagttgtagggactgttgatggagggagaccgccaacaaaaataaagactgatcttaaaaaacccattgttaacctggcttgccatccccgcctccctgtcttgtatgtagcttatgctgaaggcttgatacgcgcctacaatatccagacatatgctgtacactataccttacaacttgctgttgacagtacaattaagctaattggagctggtgcttttgggtttcacccgaccctagagtggatatttgttggtgatagaggtggtactctcctggcatgggatgtatcaactgagaggccaagtatgattggcattacacaggctggttcccatcctatcacatctgtatcctggcttcctacactgcggctgcttgttactatttcaaaggatggagcactccaagtgtggaagacacgagttataataaaccctaacagacaaccaatggaaactcatttctttgagcgtgcagctgttgaaacaatggatatcacaaaaatactaactcttcaaggtggagaagcagtgtacccattaccccgaattaaaaatttggcagtgcatcccaaattcaatttggctgcagtaatttttgcggatatgtctgggacagaagctgcaaagaacaaagctgcatacacaagagaagggaggagacaactttttgctcttcttcagggagctaggggatcaactgctgctgttttaaaggagaaactattagccttgggatcatctggaatattagcagagcatcaacttcaggcacaactacaagagcagcacttgaagggccagagccagctgactatttcagatgttgcaaggaaggcattccttcacagtcatttcatggaagggcatgctcaaagcggtccaatccctcgcctacctcttgttacaatttcagattctagcaaccttttgcgagatgttcctgtttgtcagccattccatctagagctgaatttcttcaacaaggaaacccgtgttgttcagtatccagttagagctttctatttggatggatttaacctgatggcccataacttatcatctggggctgacaatctctataagaagctttactcaacgattccttcgaatgtggaatgccatcccacgaatatgtcatacagcccaaaacagcatttatttcttgtcgtgtttgaattaagtggtacaaatggagtggtacatgaagttgttctttactgggagcagactgatctacagacagtgaacagcaaaggaagttccataagaggtcgagatgctgcttttttgggcccagatgataatcaatatgctattctggaggaagatagaactggtctgaatctctttagtctcaaagctgtagctacaaaggaagctcttgaaaataatgctgctgtgcttgaagaaaacacttttgctgataatgctgctagtgctacctcaacggaacgtcaaggtcctctacagtttacttttgaatcagaggttgatcgcatattttcttctcctctagaatcaaccttgttgtatgttatttctggaaagcatattggacttgcgaagcttctgcagggatataggctgtctgcagacaacgggctatccattacaacaaaaactgatgggaagaagtttattaagttgaaaccaaatgagactgttcttcaggcccactggcaaacaaccctaagaggtcctgtggtaggaatattgacaaatcagagggtgctaattgcttctgctgatcttgatatactatcaagcagctcaacaaagtttgatcgtggtctcccatcatatcggtcaatgttgtgggttggaccagcacttatcttctcaagcgcaactgcaataagtatgcttgggtgggacaacaaagtccgatcaatcctctccactagcttccctcgctcagtattacttggtgcattgaatgaccgcctactgcttgtaaatccgacggatataaacccaagacagaaaaagggagtggaaataagggcctgtttagttgggcttcttgaacctcttctcattggatttgctaccatgcagcaacacttcgagcaaaaacttgatctttcagaagtcctgtaccaaataacctcgaggtttgatagtttacggatcactccaaggtcattggacatattaactaaaggacctcctgtttgtggagaccttgctgtatcattatctcaagcaggacctcagtttacccaaatcatgcgctgcaattatgcaatcaaagctctccggttctctactgcgctgtcaattttgaaagatgagttcctgcgctccagagattatcctcaatgccctcccacttctcatctgttccagcgtttccgagaattgggatatgcatgtataaagtatggtcagtttgacagtgcaaaagaaacttttgaggttattacagatcacgagagcatgctggatctatttatttgtcacctgaacccaagtgcattgcgacgccttgcacaaaagttagaggaatctgctacagattctgagctgaggcgataccttgagagaatattaagagttcgttcgactggatggacacagggtgtattcgccaattttgctgctgaaagtatggttcctaaaggccctgaatgggcaggaggaaactgggagatcaaaacacctaccaacattaagaatatacctcagtgggagcttgcaggagaagtcatgccttatatgaagacaactgatgctggtatcccatctgttgttgcagatcatattggtgtgtacctgggtgtgatgaaaggaaggggtaatgttgtggaagtaagtgaaaagagtttggttaaagctatagctgcagctagcagtgagaacacacagccggtgtcttctgcatcagcagagaaaagtaaggcaattcctcgtggtgattcggttggtgatactttggcaaggcaactgggagtccagattgcatcttctgatgaacaggcaaaagctgccgaggacttcaagaagactttatatggtgttgttgatgatggaagtagtgatgaagacgagtcaacctcaaagactaaaaagatacatataaggatacgtgataaaccggctgcacctactgtagatgtcaacaaattgaaagaagccactaaacagctaggcttgggtcctccgctgagtaggacaaggtcattatcagggacacctcaagacttcaatcaggctcctacacaaccaggaggtccagccgcagctgtttccccagcaatgccaaattctgcgattgatttatttggaacaaatactttagtgcagccgcaagcaccctctagttccacaggtcctgttattgcaggcatgggagtgacggctgggccgatccctgaggacttcttccagaacactattccatcgcatcaacttgcggctcaactacctcctcctggaatagtcctgtcacggatggctcaacccgctcctggcattgaacaaggccgaccagtacctaatcaaatgatggctaatgttggtcttccagatgatggggtgccaccacaagcaccaccgcagcagtcccagtttcctccgcagcagtcccagtttcctcagcaaccaggcattcctatggattctattggcctgcctgatggtggtgtccccccacagagtcagccacttccttcacaaggccagtttcttccttcacaggcacagggctttcaacttggtattcctgctccatcacaaccaattgatctcagcgctctcgagggtcctggagcggcgaagcaagctgctcgccctccagcacctactgctgtgcggcctggccaggtaccacgcggggcccctgctgcagaatgctacaagatggctcttgctcatcttgagcagaatcagcttaccgatgcactatcttgtttggacgaagcattcttagcccttgcaaaggaccagtcacgtgaagccgacatcaaagcgcaggccaccatttgtgctcagtacaagatcgcagttgctctgctgcaggaaattgctcgtctgcaaagggttcaaggagctggtgctctcagtgcgaaggaggaaatggccaggctatctcggcaccttgcttccctgcccatccaggccaagcacaggatcaactgcatcaggaccgccatcaagcggaacatggaggtccagaactacgcctacgccaagcagatgctggacctcctctactccaaggcgcccccgacgaagcaggacgagctcaagagcctgatcgacatgtgcgtccagaggggcctgacgaacaaatccatcgacccgttcgaggacccctcgcagttctgctccgtgaccctcagccggctgtcgaccatcggccacgacgtgtgcgacctctgcggcgccaagttctcggcgctctccgcacccggttgcgtcatctgtggcatggggagcatcaagagatccgacgccctcgctggtgggcctggacccgtgccgtcacctttcggctgaaggtcgagtctgctcctttcgtcctccatcggtcctgatattgtatctatagtgttcagtttgcgttcattacattcgattcgttgcagcttgtattgtatgtagcctttttgacgtgtagcacgcttggtgttgagagcaatgtacacctgtactgttgggttggttgtgattatacacgcggttttttttggagctagcaa

SEQ ID NO: 90111 - DNA, 561 bp, Zea Mays
atgaatacaaagcagtccgggcacgagcgggcggcactcctctccctccctcactcactaagccaaagctgacagcagcatacaagcaccagcagagctcttgccgatggcggtggccaagcccccgcttcagacggccgcggtcctcctcctcctcctcctggtcgtcgcggccgcgtcgtggctccagaccgtcgacgccgcttcaggtacgtactactacctagtagtacctagctaggcggtcgccggccgtgtctgacgccggcgcatatatgctgcagggttctgctcgagcaagtgcagcgtccggtgcgggcgggcggcgagcgcgcgggcgcggggcgcgtgcatgaggtcctgcggcctctgctgcgaggagtgcaactgcgtgcccacgcggccgccgcgcgacgtcaacgagtgcccctgctaccgcgacatgctcaccgccggccccaggaagaggcccaagtgcccctgaggccggctcacacacggcgcaacccaagacacgtgctccatgggactgccactgctttgcctgcaactgcgatccga

SEQ ID NO: 90112 - DNA, 814 bp, Zea Mays
atgaatacaaagcagtccgggcacgagcgggcggcactcctctccctccctcactcactaagccaaagctgacagcagcatacaagcaccagcagagctcttgccgatggcggtggccaagcccccgcttcagacggccgcggtcctcctcctcctcctcctggtcgtcgcggccgcgtcgtggctccagaccgtcgacgccgcttcagggttctgctcgagcaagtgcagcgtccggtgcgggcgggcggcgagcgcgcgggcgcggggcgcgtgcatgaggtcctgcggcctctgctgcgaggagtgcaactgcgtgcccacgcggccgccgcgcgacgtcaacgagtgcccctgctaccgcgacatgctcaccgccggccccaggaagaggcccaagtgcccctgaggccggctcacacacggcgcaacccaagacacgtgctccatgggactgccactgctttgcctgcaactgcgatccgatccatgctgatgggccaggcaacctgttatgctatccctaccctactactacgtatttgtgtacgtacgtatctttgtatgcatcgcgcgtccgtgtgatctataatatataatctgctaccaggtcccgtcagatgtactgttagtgataagctgagcgactagagaggtactgaatcctcagtagttggtagaacgggctgttcctcgggacagtgtgtgtcatggttaggctgcctgtactaattaatgtacatgaactattgtgctatatatatatattgtcataaacgcattacgcatgtatgtaaaataccaatttttttta

SEQ ID NO: 90113 - DNA, 1096 bp, Zea Mays
agatatctcagataacctcttctccacgatccgtgatcgagccacctctatgcaaagcctcagcaccccatatatttcctcatttctagatcctactcaaccgacgtccagcctctcgcttccgtgtacgccgtcgcccagcacctctctttctcccacgactgttgttcccttagaaggaagaagaaatcatcagctcctcccctctcctctcctcccgtaactgttcctccactcgcgcggtgcacgtcgtggagagactagcaactgcccggcccgatgccttattcaaacccctccagaacgcccgctcgacctccactcctctccaagctgtgctctgcttcccctcgacgctcctggtcgcatgactcgcatcgctctgcgctcgaaaaaccgcccgcaggttggagctccattgcaccgccaagccaactctgcgtcgcgcttggaacaccgtcagtcgccacacgtcacttcctccggccacgctcgtctccggcggctgcgtcccagcactggcccgctcgtcgaagtccagccgtgtgtgggctggtgagccccgccgggtcccgtgctccatctgccgcgccgcttggtgcacccagccggcatgtcacctccggcgagcccctgcactgccacggccgtcccatccgtgcgttgaagagtctacgttcacgttctccactgcccgagggagccccgctgaagcttcgtccgtaggtgagcattcaagtgcattttatgcccaaggcaaggagagaaaagaaaccgcttggggtcccaccacttgcatgtgcccgcacatgccacaaaacacagtggactaggaaaccgtcctcgccacgtttcagcgactggttggccacaagatggcgatcttctatggctgagccctatatgatcgtccatggggctaagttttagccaatcagtttgcgccacgtcataataatccacgatttagtaatcattttatatattttgtgttaatttttcgttttgatccgttctagttgcgttagtttcataataatgtcttgtacatatttaaggttattaatttattgtagcccatgctttcgttaattaa

SEQ ID NO: 90114 - DNA, 2687 bp, Zea Mays
cttcctccacatcgatcccctcccccctccactcgtctccaaaatcgccagcgagagccatgccgcctcctcccctgccctcgccgagcctgaccgactgaccccacctcgccactgttctttcccttccacctgggccccacagcgcccccttaccgtcgccaccaaatccccaaatcccggaggcacgaggagggaattcgtcgcctgaccgatcggccgatccactgccgtcggcaccccaatccgccgctgccgccatgttcaacaagatcatcaagaggggaaaccgcaagggcgcgcgcggggacaacgcggaggccgccgcgcgccccgcagcgccctcctcgtcctccgggagcggcggcggcggcgcgggggcagccgcgcccgtcaccgtcaaccacgcctcccgggccacagcgccttcgccgtcctcgcccacttcgccgcacgtggcgccgtctgcgcttgcgaccaacccggcgggggcggcgtcgccgccactcctcgagccgctcccgctcctccgcgacgtcgccgccgcggatcgcccgggcctcttcctccgcaagctccgcatcgtcgccgcgctctttgacctttcggactcgctcaagcacccgcgggagaaggaggccaaacgccaggctctcctcgagctcgtcgattacgtgcaggctccagctcaggctgcgggcgccaacgcacccacgcgcctcccggaccacgtccaggaggcgctcgtcgccgccatctctgccaacatcttccgcccgctgccacccgcgctgcacgaatccgccgccgcgatcgaccccggcgccgcgcccgacgaggaggaggagccatacctcgacccctcctggccacacctccagctcgtctatgagctccttctccgatacgttgtttcgcccgacaccgacaccaaggtcgccaagcggtatgtggaccacgccttcgtcctccgtctcctcgacctctttgactccgaggatccgcgtgagcgcgagtacctcaagaccgtgctccaccgcatctatggcaagttcatggtacaccgaccattcattcgcaaggccatcaacaatgtgttctaccggttcatctttgaaacgcagcgccacaatggcataggggagctccttgagatccttggaagcatcattaatggctttgccttgccaatgaaggaggagcacaagctattccttgcccgtgctctcatccccctgcataagcccaaatctgttgcgatctaccatcagcagctgtcctattgtattgttcagttcgttgagaaggactacaaattagcagatactgtgattaggggtctgctcaaatactggccagtcacaaactgccagaaagaggtgttgtttctgggggagcttgaagaagtgctcgaggcaacacagcctgcagagttccagcggtgcatggtgccactgttcaagcagattggacgatgccttaacagttctcacttccaggttgctgaacgtgctttgttcttgtggaacaatgatcatattgtaagcttgatagcacaaaatcgtgttgttatatttccaattatatttgaagctcttgagaggaatatacagagccactggaatcaagcagttcatggtctcactgcaaatgtgcgcaagatgtttttggacatggacagtgaactatttgaagagtgccagcagcagtacatggagaaacaagcgaaagccaaagagatacaggaacaacgagaatcagcatggagacaattggaagctgttgttgctgccaaggctgctggagatgacatggttttggtcaactaggtaatataacctttcgcttcatttatttgttagtgcttgtgttcgtaagtttttctagtcttgtatcctaaaaccgtactactctgtttatgtcctcttgttcttgctttgttttagcatatctgtgagatgcattgccactttttgtactgctcaccttctgttttgacttggtcatggcagttcacaaaaagatggaatatatctgtaccaaagtttcaatttattatggacatttagttcttagtaatgtcaatcagaccaagcatccataagtatgcaaacatcgtttgaaaggatgtttatgctttctcagatgatagctgctcacttatttcatgagcgtcatgtgcgcttatcgaggcaacaaggtatcggtgctagttgcggtgctcttatatcaacattgttgacttgggactatcagatccatgttccttgcatcagtgcaaaaaaatgcggaccgagtttgaacacattggcggcagcgaaagccaattcatgcagaatttctttgcctagtgagatcctgctgtagttctgagcccttgctttattcagcccctccttttctgttgtgttaatttatgaataattggactcttgtgttaatccttcagtgtctgccctagttacggacccacaattgggaaaatccaagtagagaaaattactgagctagattgaaatcttttcaatttatttttccttttttacttcttttctccttgttgggagttaatttcagttcatgttgttgtatggaggtaacagcacaaatgcagataaaagctcatctgtagtaggaactgtttcgacgttgctgtggttgttttagcaatataatggctcactggt

SEQ ID NO: 90115 - DNA, 804 bp, Zea Mays
aattatatttgaagctcttgagaggaatatacagagccactggaatcaagcagttcatggtctcactgcaaatgtgcgcaagatgtttttggacatggacagtgaactatttgaagagtgccagcagcagtacatggagaaacaagcgaaagccaaagagatacaggaacaacgagaatcagcatggagacaattggaagctgttgttgctgccaaggctgctggagatgacatggttttggtcaactagatgatagctgctcacttatttcatgagcgtcatgtgcgcttatcgaggcaacaaggtatcggtgctagttgcggtgctcttatatcaacattgttgacttgggactatcagatccatgttccttgcatcagtgcaaaaaaatgcggaccgagtttgaacacattggcggcagcgaaagccaattcatgcagaatttctttgcctagtgagatcctgctgtagttctgagcccttgctttattcagcccctccttttctgttgtgttaatttatgaataattggactcttgtgttaatccttcagtgtctgccctagttacggacccacaattgggaaaatccaagtagagaaaattactgagctagattgaaatcttttcaatttatttttccttttttacttcttttctccttgttgggagttaatttcagttcatgttgttgtatggaggtaacagcacaaatgcagataaaagctcatctgtagtaggaactgtttcgacgttgctgtggttgttttagcaatataatggctcactggtacgcccgattaa

SEQ ID NO: 90116 - DNA, 521 bp, Zea Mays
caaagcaaaaaggccgacaagttttgctttcttttccccgtttcccaagagaaatttgacattatgaaacacgacgagtgcggcttcgacgaaatggaggctcaggagaggatttctccattatggaaaagctggacatagccaacactctaaaatggacatgactactctattaataggtttagagcagtattagtctcgttgaaaccgggtttcgtccccaagcgccgtcgccgtcagttttctgtcgctagatctcctccatccccgtcgcgttctcctccatctccgtcgtgttctcctccgtacccgtcgcgtcgctggacctggagctggatctcggagctgtccctccctccctcgcttcgctctgctctttcggctagtctaggcttgctccctgttgcttgctaggctaggctacccgcgcgtgcgaatacaccgtgccacgagctccgcgggtagaatcagctgagatcgttccggcgagccactagtggcgactgtggaagtgtggatcg

SEQ ID NO: 90117 - DNA, 1339 bp, Zea Mays
cctatgctcaagtgctcagtgctcaccgctctgcccctgcctcatcacacgcgcgcacggcgcacagataccttttctctcctctcccgtcccactctcctgggcaatcccggcccggcatggcgagcccgtcctcgtccccctcgcggaaggctctgagcaagatcgcctgcagccgcctgcagaaggagctcgcggagtggcaggtcaacccgcccgcgggcttcaagcacagggtcaccgacgacctccagaggtgcccctccgccatcgtcgcccttcctatcccctttcctcagcaggcaatccctgctgtgcggggtctcttagattcctttctccgtggctccgtgcttggctaccgttttcttgttcgcgagtctagcacgtccagcgccctggacgcgacgcgacgcgacgtgatacgtcgcgtgcgttttgggcttgtatacattggtttctttattattctctcgtcttctcttccaagggggtttcagcttgtatacattagaatctttcaagtgtttttgtgatcctggaagaaagaaaattttaagaaatgcaaaaataatggtggatgaaacaacaaaaaaaggtgggtcatcgatgtagcgggggcagcaggcacgctctacactggcgaaacctacaagttgcaggtggatttccccgagcattatccgatggaggcacctcaggttatatttctgcatccagcaccgatgcatccacacatttacagcaatggacacatctgtttagattggtccactggctatgccaagaaattcctagaaatattactaactaaccatgattccatgagatggcaactatcactggccccttaagatatactgtatgactcgtggtccccagcgatgactgtcagttctatctgtatcagcatattatctatgctgtccagctcgccagaaaaggttacatattttctctacatcaccttgttgaattggtgggtcttgcttttgactgcaatacattaccgattgcagcaacgcccagctgataatgatcgctatgtcaagaactgtcgcaatgggaggtctccgaaagagaccaggtggtggttccatgatgacaccgtgtgatcggtgttccgattattgttgtcctgtatgcatttagttgccagactatgggagatggacttatttcgaacgacccatttgaccagaaattaacatgctcttgtggtttgtagatgaatgtgcatcagcgtcaggcctgtactttctgattcttacaccgtcgatgatatatagaataatgtttgtatcttgtcaatttacggaacagacatgaaattcaatgc

SEQ ID NO: 90118 - DNA, 1286 bp, Zea Mays
cctatgctcaagtgctcagtgctcaccgctctgcccctgcctcatcacacgcgcgcacggcgcacagataccttttctctcctctcccgtcccactctcctgggcaatcccggcccggcatggcgagcccgtcctcgtccccctcgcggaaggctctgagcaagatcgcctgcagccgcctgcagaaggagctcgcggagtggcaggtcaacccgcccgcgggcttcaagcacagggtcaccgacgacctccagaggtgcccctccgccatcgtcgcccttcctatcccctttcctcagcaggcaatccctgctgtgcggggtctcttagattcctttctccgtggctccgtgcttggctaccgttttcttgttcgcgagtctagcacgtccagcgccctggacgcgacgcgacgcgacgtgatacgtcgcgtgcgttttgggcttgtatacattggtttctttattattctctcgtcttctcttccaagggggtttcagcttgtatacattagaatctttcaagtgtttttgtgatcctggaagaaagaaaattttaagaaatgcaaaaataatggtggatgaaacaacaaaaaaaggtgggtcatcgatgtagcgggggcagcaggcacgctctacactggcgaaacctacaagttgcaggtggatttccccgagcattatccgatggaggcacctcaggttatatttctgcatccagcaccgatgcatccacacatttacagcaatggacacatctgtttagattggtccactggctatgccaagaaattcctagaaatattactaactaaccatgattccatgagatggcaactatcactggccccttaagatatactgtatgactcgtggtccccagcgatgactgtcagttctatctgtatcagcatattatctatgctgtccagctcgccagaaaagcaacgcccagctgataatgatcgctatgtcaagaactgtcgcaatgggaggtctccgaaagagaccaggtggtggttccatgatgacaccgtgtgatcggtgttccgattattgttgtcctgtatgcatttagttgccagactatgggagatggacttatttcgaacgacccatttgaccagaaattaacatgctcttgtggtttgtagatgaatgtgcatcagcgtcaggcctgtactttctgattcttacaccgtcgatgatatatagaataatgtttgtatcttgtcaatttacggaacagacatgaaattcaatgcaggtcactggtttctgaatcct

SEQ ID NO: 90119 - DNA, 854 bp, Zea Mays
cctatgctcaagtgctcagtgctcaccgctctgcccctgcctcatcacacgcgcgcacggcgcacagataccttttctctcctctcccgtcccactctcctgggcaatcccggcccggcatggcgagcccgtcctcgtccccctcgcggaaggctctgagcaagatcgcctgcagccgcctgcagaaggagctcgcggagtggcaggtcaacccgcccgcgggcttcaagcacagggtcaccgacgacctccagaggtgggtcatcgatgtagcgggggcagcaggcacgctctacactggcgaaacctacaagttgcaggtggatttccccgagcattatccgatggaggcacctcaggttatatttctgcatccagcaccgatgcatccacacatttacagcaatggacacatctgtttagatatactgtatgactcgtggtccccagcgatgactgtcagttctatctgtatcagcatattatctatgctgtccagctcgccagaaaagcaacgcccagctgataatgatcgctatgtcaagaactgtcgcaatgggaggtctccgaaagagaccaggtggtggttccatgatgacaccgtgtgatcggtgttccgattattgttgtcctgtatgcatttagttgccagactatgggagatggacttatttcgaacgacccatttgaccagaaattaacatgctcttgtggtttgtagatgaatgtgcatcagcgtcaggcctgtactttctgattcttacaccgtcgatgatatatagaataatgtttgtatcttgtcaatttacggaacagacatgaaattcaatgcaggtcactggtttctgaatcct

SEQ ID NO: 90120 - DNA, 258 bp, Zea Mays
atggcgctcaaggtagggagagccaagcagatggcgctcagcctcagcgagctgaggagcgagggtatcggcagcagtgtattcatgctcccaagcaagggcagcgacacattcatgctcccaggcagcatccatagcggcattggccgccgtgagggccacagtgaggttggagtgggcagccacaacatcaatggtgggaaggcaatgggtaaaggcgcaaagtggaaacctagggcgaaggaggaggcaccatga

SEQ ID NO: 90121 - DNA, 2852 bp, Zea Mays
gagcagagctccatcccatccagacctgccaagttgagtacagtaggtttaaaccccgcaacgcaaacccccacccccaccgaataatccctccacgacaataatcaaccatcaccagcggtccactccgggcagcaaacaataatcaaagcagagacggaggaggaggaggaggaggagggcagaaacagcttttcttctagcaggccctccgactacttttatattgggtgctggtgtttgttgcagctagtgggtggtggtgcaggaattttttattccgggggcaggaagaaggaggacgaggaggaggaacaagcgagagatagagagagcgctctcctatcttcttttgcttttgagtgattctgcagaagtattcattctactggcgtgctgagcaggtgcaggagctctaataagcctagtgcgcacttcagtcatcagccaagtgattgaaaagggcaagtcagctgaaatattggttccgagggctctgtagttgcttatccacgctcgcctatgcctttgcgctgatcttgacaactcaaagcttggatatggctacttattactcgagccctggcagtgaaagagattcacaaacaatgtactcagcagagtcaggcaatgtatcatatcccgtgccatcagccctagggaactttctttatacgaacaatgcatcttctggaccttatacagaatttagtggaattgtccagcctcagcagaatttcatggaacttactggccatccttcagcaatgtcacatgattcgtcatccaatgaagctaccaacatgggcagttcactcactgaacagcgctcttttggtcctttgaaagatatgagaaatgagatgttgatgcatttgatggatggagcacacagcagtggcagtgatctcatccacaatgatgctcatagcactgtacagctcgaatttggcatgttaaacaaccacaactcaacaagtgttccattagcaccaggccaagggctgtctctgagcctcaatacacatatcttggcgccttcctatccacactggtctgcaaagcaagacttactaacaccaaattcttaccagggtgatgacaacagaatgaagaatatgcagtctgaggcctcacaggcaatccggaactctaagtatctgaaggcagcacaggagttacttgatgagattgtcagtgtttggaagtgtgttaaacagaaaacagataaaggccctgctgaagcaggaaaggctgatggaaaagagactgatggggggattaaaagtgagggggtatcttccaatccgcaagagtctggtgccaatgcagcagctgagctttcaactgctgagaaacaagagctccagaataagatggcaaaacttatgactatgttggacgaggtggataggaagtacaaacactattatcatcagatgcaacttgtaatgtcatcgtttaatatggttgctggtgctggagctgccaagccttatactgcagttgccctccagacaatctcacggcatttccgatgtctaaaggatgctatcaatgatcaaattagtgttatccggaagaaacttggagaggatgacaatacatccggcaaagagggcaaactaacccgccttcgttatattgatcagcaaataaggcaacagcgagctttccaacagtatggtatgctacagcaaaacgcttggaggccacagagaggactacctgaaaattcagtctcgattctccgggcttggctttttgaacatttccttcacccgtatccaaaagattctgaaaagctaatgttatcgagacaaactgggttgacaagaagtcagatttcaaactggttcatcaatgcccgtgtccggctgtggaagccaatgatcgaagacatgtacaaagaagagattggtgaagcggagctagactccaactcttcctccgacaacgggcagcgaaacaaggacaaagcaccatctcccgaagaaaatgaggacctgcagaccccaacaagccaggcttgccaaaccagccagctcggccagtccaaagccatcgttggtggagtgatgggctttagtggagtgctagccggcggcttccacaccgaggccaaccccgacgacagcttcatgagcctgatgctaaaggcccagagacctggtgaaaccgaaggcaccggtctcctccacgatgccgtcgctcaccactcggacgacggcgcccggttcatggcctaccacctggcagagttcgggaggtacgggaacagcagcaacgtctcactgacgctgggcttgcagcacgccgagaacagcctcgcagtcccaccaaacactcagccaggcttccccggcgtcagagaccaagacatgtacaacgccacggctcctcctctcaacgtcgcctccacatcttcagagtatgattcggcgagccaaattgatcagcaacagcaacggcagcggttcgagccgtcacctctgatgcatgatttcgtggcctgaatttcagctcgcccactggaaaacgtgggggaaaactactgccaatttgtagtgtgtgccaggacgaataacttgcctggactgaattttcaggcgtgggactgttagctgtagttaacgattggggatttggggggtacagtacaggaggtatatagcgtaaatgtgatgtaaatttagtgggggtgatagcggtaaagaaatcctgtaaagatggaatgcatttatacgtgtatttaagggccatgctgtaaaaatagatttacctgtaatgagtacttatgatccagtatatatactgtgcacgttgttgaaaccaaaaaaaaaaaaagaaga

SEQ ID NO: 90122 - DNA, 2952 bp, Zea Mays
ataatcaaccatcaccagcggtccactccgggcagcaaacaataatcaaagcagagacggaggaggaggaggaggaggagggcagaaacagcttttcttctagcaggccctccgactacttttatattgggtgctggtgtttgttgcagctagtgggtggtggtgcaggaattttttattccgggggcaggaagaaggaggacgaggaggaggaacaagcgagagatagagagagcgctctcctatcttcttttgcttttggtattgttatcttgggatctgattttgtccccatacataccgagcgggagggaagggggcttgggttttctttctcctctcttctcttcttctcccctctcaccctcttctcctcccaaggctgactggccgtcggctcgggtctggggacagcaatccctgccgtcttgccatgctccccacgaggagcacaccgtcagagtgattctgcagaagtattcattctactggcgtgctgagcaggtgcaggagctctaataagcctagtgcgcacttcagtcatcagccaagtgattgaaaagggcaagtcagctgaaatattggttccgagggctctgtagttgcttatccacgctcgcctatgcctttgcgctgatcttgacaactcaaagcttggatatggctacttattactcgagccctggcagtgaaagagattcacaaacaatgtactcagcagagtcaggcaatgtatcatatcccgtgccatcagccctagggaactttctttatacgaacaatgcatcttctggaccttatacagaatttagtggaattgtccagcctcagcagaatttcatggaacttactggccatccttcagcaatgtcacatgattcgtcatccaatgaagctaccaacatgggcagttcactcactgaacagcgctcttttggtcctttgaaagatatgagaaatgagatgttgatgcatttgatggatggagcacacagcagtggcagtgatctcatccacaatgatgctcatagcactgtacagctcgaatttggcatgttaaacaaccacaactcaacaagtgttccattagcaccaggccaagggctgtctctgagcctcaatacacatatcttggcgccttcctatccacactggtctgcaaagcaagacttactaacaccaaattcttaccagggtgatgacaacagaatgaagaatatgcagtctgaggcctcacaggcaatccggaactctaagtatctgaaggcagcacaggagttacttgatgagattgtcagtgtttggaagtgtgttaaacagaaaacagataaaggccctgctgaagcaggaaaggctgatggaaaagagactgatggggggattaaaagtgagggggtatcttccaatccgcaagagtctggtgccaatgcagcagctgagctttcaactgctgagaaacaagagctccagaataagatggcaaaacttatgactatgttggacgaggtggataggaagtacaaacactattatcatcagatgcaacttgtaatgtcatcgtttaatatggttgctggtgctggagctgccaagccttatactgcagttgccctccagacaatctcacggcatttccgatgtctaaaggatgctatcaatgatcaaattagtgttatccggaagaaacttggagaggatgacaatacatccggcaaagagggcaaactaacccgccttcgttatattgatcagcaaataaggcaacagcgagctttccaacagtatggtatgctacagcaaaacgcttggaggccacagagaggactacctgaaaattcagtctcgattctccgggcttggctttttgaacatttccttcacccgtatccaaaagattctgaaaagctaatgttatcgagacaaactgggttgacaagaagtcagatttcaaactggttcatcaatgcccgtgtccggctgtggaagccaatgatcgaagacatgtacaaagaagagattggtgaagcggagctagactccaactcttcctccgacaacgggcagcgaaacaaggacaaagcaccatctcccgaagaaaatgaggacctgcagaccccaacaagccaggcttgccaaaccagccagctcggccagtccaaagccatcgttggtggagtgatgggctttagtggagtgctagccggcggcttccacaccgaggccaaccccgacgacagcttcatgagcctgatgctaaaggcccagagacctggtgaaaccgaaggcaccggtctcctccacgatgccgtcgctcaccactcggacgacggcgcccggttcatggcctaccacctggcagagttcgggaggtacgggaacagcagcaacgtctcactgacgctgggcttgcagcacgccgagaacagcctcgcagtcccaccaaacactcagccaggcttccccggcgtcagagaccaagacatgtacaacgccacggctcctcctctcaacgtcgcctccacatcttcagagtatgattcggcgagccaaattgatcagcaacagcaacggcagcggttcgagccgtcacctctgatgcatgatttcgtggcctgaatttcagctcgcccactggaaaacgtgggggaaaactactgccaatttgtagtgtgtgccaggacgaataacttgcctggactgaattttcaggcgtgggactgttagctgtagttaacgattggggatttggggggtacagtacaggaggtatatagcgtaaatgtgatgtaaatttagtgggggtgatagcggtaaagaaatcctgtaaagatggaatgcatttatacgtgtatttaagggccatgctgtaaaaatagatttacctgtaatgagtacttatgatccagtatatatactgtgcacgttgttgaaaccaaaaaaaaaaaaagaaga

SEQ ID NO: 90123 - DNA, 1366 bp, Zea Mays
gcacccggatagatgtggttagttgctctactgtttatgataactttctgccgtttaggatgtctgtgggtaccagttcataaataggcgtgcgtgccgtggaccttggtgttgctacttgctaccaatggtcatggcgaagcagcaccatgacaaggggttgccgaagcaagctcgcaatgagcccgcgccgttccggctcgagcagtgttgccgctgcgacgatgcccaccgtcaggccgacgacgagtccatggatgctgctgggtctgctggcccgctgcacctgactctcggcccgctcggctcggccgccggcccccgttgctcgtggcggtgtcgcgccggcgccggcgccggcggcgcccgcaacggtggccgtcctccgcgggtcccggtacatgaggccggcgcaggagctgctgggcgaggctgtgcgcgtggccgacctggcggctgccgacgacgaagacgaggaccaggcggcggagcggctcgagggcggcggtcaccgggcggcgcgtcgggcggccgggaacgacggcgacggcgtccaggccaagctcctctacctgctcagcgagctggagagcaggcgggagcgctacttcggcgagctggagcgcgtggtgtcgtcgttcgagccggcgctgggcggcggcgcggcggcggcgtacacaaccctgatggcgcgggccatgggccgccacttcggcaacctgcgccgcgccatactgcgcaggctcaggctccaagccgccgctgcggcgaggaggtctctgcggcgcggcggcgaggaccaggacgacgacgacgacgacgacggcgacggcgacggcgaggtgaccgaggagctggtggacaggttggctcggcggacgaagctggccgcggcggcgcgggcggagcaagcgtggcggccgctgcgtggtctgccggatggctccgtggccgtgctccgggcgtggctcttcgaccatttcctccacccgtaccccaacgacggcgagaagctgaggctggcggtgaccaccggcttgagcaggcgccagatatccaactggttcatcaacgcgcgcgtgcggctgtggaagcccatgatcgaggagatgtacaaggacgagttctccgacggttccgccgtctccagctacgacgacgccagcgccagcggcgcctcctcatcctcctgagtcttgaccacctcgccctcgagagcgtttatctagctaattcatcactcggttgattggtcctgttgctttgggattatattaatttatttatatccatgcttaatcatgtgcctctcttgtattttttttagaaaaggacatactccttcaaaatctagcgacttttcgaa

SEQ ID NO: 90124 - DNA, 441 bp, Zea Mays
atgtcggtgttgtatccgacgaggcactgggggatgcgggtgcgaccaatgtgcatggaggatttgtcgaggatggtgcaggcaaagatgacgcggatggtaagagtgtggctgtgcatctggggttgtagctggtcgacggtggtgaagaccggcttgcgcacggtcttggcgccatctgcgggatccgcagccagctcctactggatgccgccagagggtgttgtagctgaggtagaggccggccaggggcggacccatgggagggcaggtggagcgtgccggcgagatacttcccctgcagcgagatgttggcggcggcgcaacgggcatcgcacgcgacgccctcaaatctcctgtaaggtgctaacacacatggggcgtggtcaggcgtccacgatgggtgctggtggcccgtccgttccagcacgcggcccgtag

SEQ ID NO: 90125 - DNA, 675 bp, Zea Mays
agccgaggccgttccaatggccatacacatgcacgacaggctccatcagctgttgctcgggtccgaggacgtggacgtggtcgtggcatgaatatatgccatactgcaaatgctactatggttaatggactgacttcacaacgatcggctaagaaccctgtagactcacagatgttgaatgtgagcttcccaatgaatttgcatcagcttatagtgatgtagttcaggaggtttctccatcggttggtaatggcaataaaagacctcggtttgtcttaggaaaaccagctaagaaaacaaaggttggcactacgattgttatgcaagaacaagtgacaaggattgcgaattctgctgatgcgcttgctgcaaagaaactaggagaggtcactatcaaacaagtaatggatttagttgtatcctgtggggcaaggattggtagtaatgagcatttcattggtaccaagctatttatcaagaaggagcaaagggagatgttcatgaccctagatactgatgagagtaggtttctttggcttactaggcactataatgagcagtacaatgcataaaaagctttttcggcaatctgttagacacttttatgtattagaataatcttttgtaatatactatactattcgagttatgtccagtttcattttgctcacaaaa

SEQ ID NO: 90126 - DNA, 732 bp, Zea Mays
tggagagatacctttgcaattgcaagacaaactcccatacaccatctcgacttgtgtagccctcattgttccgacgcatggaagcaactcatggccaccaaactacagcccatacagttacaagttaaatgtaattcgcaggattcttttcaacagcaacaacatcctttgtgacatgaaaaaatgactattctcattccgatagctctggccagagtgttgcagggcatctgattttggctgtggcaaaatgctcacgaaccacgacaatgccatactaagatgccaggatcactcatcgccatctccagttttttgcttcttccatttgtaagcagcttctaggatcttcaggtttggtgctagagcaacttcatcagggaaaatgtaatctatatactcctcatatgctatagtggagccatcttctgtagggattggtctcttccgcttgacttttcttggtgccttcttttgcactaagctgacatctccaagatcaccaaagttcacctccttattaagccattcttcaagaagcatagctctttcctccttcaactctggggcactggttctgaagtaatcaaatgccctttcaaagacagctgatcatcaaaacacaaggtgttaattttagtctgcaacgagtcaataaatgcaaaaacatatatggtcgtacaaagtaagatagatctctaactcattatctacctctacatttttgaaccc

SEQ ID NO: 90127 - DNA, 1503 bp, Zea Mays
accttcccagttcccacgtcccaacaacaaccaccccaggatatgagaatactatgatccccatccctcccctcccctcccctgactctactactcctcccccactgccttgccttcgtcgtcacatgcgcacaagaaagaacccgcgccgcccctgaccctggcccctcctctcctccagcgcgcagccaagacgtcgccgcgcccgcttccatgaccctcgtccccacctcgcgatgagcgacattgcgccgtggtggcgcctgccttttcgttcttgaccgcccgtcgagctgctacgagaaagggagggaggccgggcgatggccgccgcgaggaggctctcggagctgctgcaggagcagcaggagccgttcctcgtcgaggccgccagggcgaggcggccccgacgcgtccgtggcgcgagcggggcggcggcggaggaagcgggaggaggaggtgggctgggctgctgccccaccgcggcgtgccggcggctgctcaggctctgcagccacgggttcaagaagaggagcgccggcgccctcaggtcggcgctgaccaaggtgctgtgcagcagggccatgcgccgggtgctgcgctgggacggcctcggcggaggctgcctctcgggcgccggcgcatgcggcgccagcgagttccgccgcctgcgccgctcactgggggacagcggcgagtgtgaccctcgcgccatggtgtttcccggcgatggtggggacgaggagcgggtggggtggaaggccgacatggacgtcgactcgtcgcggcagctcagcccggtctccgtcctggacctgcactccgacgatgacgacgacgagtcgctggcgcattcttactggggcgacgagaagccgtccacctccgggagctcacctccgtccgagcctttcctcgggccgacctctccgtgcttcagctactacagccacagccacatcctgcacgacaagttccgcgagatggaggtggacgagggcgaggaggagacggcccggaccggcaggtccgtcgaggagcagatctcgtcgtgggagaagatcgcgggtgacatctccaggatccccgcgatggtggagctggacctggcgcggtccgcgcggcagtggcgggagccgaggctggaggccagggaggtcggcgccaggatagagaccctcatcttcgatgacatcaggagggagaccgtgtgcgacatgctcgcctcgcattgtagatcggcggcggcggcggcggcagcagcaacgtcttgttgatcgaggtagtaggaggaggaggggttgttgtgttggtcagaagctatgcagcggatacgggtacatttatcgacagttttcaaaaataaaatggagaataaatagcgtatatatgttgaaaaggttaacaatgaagcgttgttaggttctgttcttacaacacagcaggtctccgatcgagtctcctcaacacttaaattcttaaatatagtagtctcaagttaat

SEQ ID NO: 90128 - DNA, 808 bp, Zea Mays
actactcctcccccactgccttgccttcgtcgtcacatgcgcacaagaaagaacccgcgccgcccctgaccctggcccctcctctcctccagcgcgcagccaagacgtcgccgcgcccgcttccatgaccctcgtccccacctcgcgatgagcgacattgcgccgtggtggcgcctgccttttcgttcttgaccgccgcctgcgccgctcactgggggacagcggcgagtgtgaccctcgcgccatggtgtttcccggcgatggtggggacgaggagcgggtggggtggaaggccgacatggacgtcgactcgtcgcggcagctcagcccggtctccgtcctggacctgcactccgacgatgacgacgacgagtcgctggcgcattcttactggggcgacgagaagccgtccacctccgggagctcacctccgtccgagcctttcctcgggccgacctctccgtgcttcagctactacagccacagccacatcctgcacgacaagttccgcgagatggaggtggacgagggcgaggaggagacggcccggaccggcaggtccgtcgaggagcagatctcgtcgtgggagaagatcgcgggtgacatctccaggatccccgcgatggtggagctggacctggcgcggtccgcgcggcagtggcgggagccgaggctggaggccagggaggtcggcgccaggatagagaccctcatcttcgatgacatcaggagggagaccgtgtgcgacatgctcgcctcgcattgtagatcggcggcggcggcggcggcagcagcaacgtcttgttga

SEQ ID NO: 90129 - DNA, 846 bp, Zea Mays
atgccgccgctgcgcggagccaagcgccaccggaaggcggcgttggagaagaaggtggcagcggtcgcaatgtcgtctgccgccgcgggcgaccctcccggtgactggtgggaagccttctgcatccggatgtcagagatggcttcagctggtgtagccccatctgggtacaaaaacagcagcagcactagcattggtgccgagaagttgcaagatcagatgaacgagctaaagattagagatgataaggaagttgaagcaaccataattaatgggaaagggactgaaactgggcacataattgtcaccactatggcaagaatgacagtgagctacatggctgagcgcattgtaggtcaaggttcttttgggattgtcttccaggctaagtgtttggagacgagtgagactgttgccataaagaaggttcttcaggataagcgttacaagaaccatgggattgtgattagttacttcattgcaaaaaaatttaggaacattactaatgtgtggagggaggtcaagaagcctaagaagcccaaggtgaagaagctaaaggtgacgatcgccgaggccgctgtcctgatcgacgccaagaacctcgcaacgcacctctttgagatctcgcctgagtgcggctccacgcccctacagacccacgacgacggcttggagatccagtccacctccgacgacctcgacctatctgcaacttgtggacaacctgcagaaacagctcgtattggaggtggcctcaggtctggtggtaatgcttatgtgattggtgattctgcaaagcctcagcagaagtggcacgcctactatgccactactgagcacccctga

SEQ ID NO: 90130 - DNA, 1143 bp, Zea Mays
gctcacgggtgccgcagatcgcgcgcacacgtttttttttcttcctgccgcgttgctagttgctacagccttctgctctcttggtctccgtggttttctctgtgtcatcccttcggcgcgtcgcgtttctgctgctggcctagcttgatcgctcgcgttcgatcggtcgagctagctccaggagtttcggacgccaacgacatgaatctggaagcagtggcggcgtccaagtccggcagcagcacggtggccttctcttgggagcacgagcccggagtgtccaaacagagccacttgggggccaacaagcccaccaccgccggcggcgcgccccgcgcggaggctgtaagcaggaggacgccggcgagcgctaagaagcaggctcctgcgcctgcgcctgcgacgacgcaccggcaccgcctgcgcgtgccgccacctccaggagtgccgagcgcgccgggcgcctcgcccccaatgacgagaaggccgaggagccgcggcgtcaggccggcggaggacccgttccttgcagcctacctggcctgcacggaggacggcgcccgcggcaggagagacgacagggggggccagaagctggttggctgggccgggcttaggctcggcctcggtcttgggctgcgtgggcgcgggctctcttgcaagagctcgtgtggggccgtggaggagtgcgtcgtcaggcttgctaagatccctggactccacgaggattgaatctatgtttttttttctttccttctttccaatttccaagaatccaaagagactagcaagactaagtactagtggagtagtaaagaagaacgagtagtgctggcatccttcattgtaattgtacaccgtaagctaaagttgctggttaattaccgtcttgctttgctatcttgattgtatgatatatgccgatagcttcaccgtctgaatctagtgtccagataagatgatcgaaccctatgacacaatgaaaactataagatgaagtatgttttccgacttctaaattgcaggtcagctcagatttcactgttacactacgaccccatgtaacagacaccaccggaattgaacaaattgatcctctaacctgtcaagaatgtggcgttctattctacaaaaacaataaaa

SEQ ID NO: 90131 - DNA, 723 bp, Zea Mays
agtcccagaggctacggcggctaccttctcacttctaggttcgctctgaatccagcggcgcgaagagcaccgcgctcctttccggctcgcaccgaagccctaataccgtcttcttccgtccggcgcggactgctgggttcccgttcccgcatcgcggactgctgggttcgccgtttctgcacggtgcggacgccatgtcgggtgtcggcccacccccgtgaagcggttttgccgcccatgatcccggaaaaaacccaatcgaggcgtcaagtcgatccctgtccccaggcgatcggcggcggcggatcgtttccgttgcagacagcaggtcctagagcgtcaacggctggcctctggatgcgatgtcccaagaatgacgtactcccctcacctacgttttacgggggccaccctgctgcgttgatttcctccggctgaaattttggaggactgattggagggattcagcgtcatggcgctgtgtggaggaaatgctcttgtggtggctgccaccccaggctttcaacatcgtgtccgagttcggctcattttccggtgtgggacctaacttatctggtttgttctgctgcttcagttgagtgagcagggacaaggtgggctgactgttcttcgtcgaactaagcagcaaagactcgtcgtccgtcgatatgatgctaaaacaaggagatgactctggtggtatttacctgtttaagctatctg

SEQ ID NO: 90132 - DNA, 751 bp, Zea Mays
atgggccgcgaacgattacctctactggcccgacttcggcgtcttccattgaggaattgcccgtcctttgagttgacttctcttgcagattctactcttaggaaaattcattgtctgtgcttcagacattatatctttgaacttgcttatcgaagtgctttgatcaactgccatattgaacattggaaactacatctatttgagcttgaagaggagctgaagactaatcctctgaccaagtatgtgttgtatcagcttcataatgaatctcataagcaagatgagaggagcaagaattggcgagtccaagctgtcgcagttggtcctgacaggttcgagagccggaaggctctgtcagaaaagtggaggggcatgagagacgatggactttcagcagaaaccaacattcctggctgtgtgtttgtccatatgagtggcttcattgggagcaacaagatcaacgagggagcattggaaatcacaagagctactctgaaatgttgattcaaccaccatctatcagttacccatgttgccatagtctcagtagaagcacatgatgcaattgcgactttggtccatgttatcattcacccatcgcagctgaaattgattcttacatttgatttatgtcatccttatcttgcagaattggtcatttgatacttttttcttggatctggtaatgcatagaatgtgacaatttattattagaaaggacaaatgatggaacttattaggctatcagccc

SEQ ID NO: 90133 - DNA, 2787 bp, Zea Mays
caactactcctactgctataaccatcctccccagcgccccgcccgccctccgtgcccctctccacttcgatcgccttcctcgacagttcattgccatcggcagcgcgttgccgccgctcgactcgacttgactccactctgctcgagggttttgctggagtcgagttcggtcggcattgttggattgagctttcggcttgggggaactattgtaaggggtactgacataatcatgaagcttttcatatttcgatgacaggattgttggatctcatatacgtgttttagaaagagatgaaagtcggcggtctcctgacctctgctggaatcaacatcggtctctgtgtactttttctgtcactgtactccattctaaggaagcagccacagaatgttaaggtctattttggaagaaggattgctgaggagcacaaccggctccgtgatgcttttatcttggagagatttgtcccttcccctagctggattgtgaaaagtctgcggtgcacagaggaagaaatcttggctactgctgggttggatgctgttgttttcaatagaattctagtattcagcatacgcatcttctccttagctgccattctttgtgtatttggtgtccttccgctgaattattttggacaagatatgcatcatgtccggattccttcagcatcattagagacatttacaataggaaatgtggaagaaagatcaagatggctctgggtccattgcgtcgtactgtacatcatctctgctgtagcttgcattcttctatacttggagtacaagcacattgccaggctgaggttatatcacatttctagagcaacaagcaatcctagccattttactatccttgtccgaggaattccaaaatcaagtacagagtcattcagcaggacagttgaaagtttctttaccaagtaccatgcatcaagttacctatctcatcaagtcgtttacaaagttgggaaagttcagaagatagtgagtggtgcaaagaaggtttacaggaagttcagacatttcaagggtgcgacagttgatcggagatgcagacccattagatttcaatgctgtttttgtggagcttcttctaattcattccagttgttgcctagtgattacgagcaagagagtgaaaagtctgatgtgaatgaatcaagctcgagcttacctgatgaggaatgtggtgctgcttttgtgtttttcaaaactcggtatgcagcgctagttgtagccaaaattctgcagacatcgaaccctatgagatgggtcactactttggctcctgagcctgatgacatatattggtctaatctttggttaccctacaagcaactctggattcggcacatagtcacacttatgtgttctatcgttttcatggttgtattccttataccagtgacatttatacaaggtttaactcagctggagcaactgcagcaaaggctcccttttctgagaggaatattgaaaaagaaatacatgacccagctgataactggatatctccccagtgtcatcttgcaaatatttttatatactgttcccccgaccatgatgtttttttctactttggaggggcctatctctcacagtgaaagaaagaaaagtgcctgctgtaaagtattatacttcaccatttggaatgtcttctttgtcaatgtcttatcgggttcagcaattagccaactgaatgctttatcaagcccaaaggacattcctatgcagcttgctaaagcagtacctgtgcaggctacattctttactacctatgttcttacttcaggatgggctagtctatcatcagaacttatgcaactctttggtcttacatggaactttttaagaagatatcttctgagaattaaggaggatagtgattttctttactcatttccctatcacactgaaatgccaaaagttctgctgtttggactgctgggtttcacatgctctgtactagcacctctaatcttgccctttttactgctgtacttttttcttggctacgtcgtctaccgcaaccagttcctcaatgtttactgcacaaaatacgacacaggcggtcaatattggccaattgcgcacaatactacaatattctctctaatcctcactcagatcatctgtcttggtgtgtttggccttaaagaatcccctgtagctgctggcttcactgtcccgcttatcatctttactcttctattcaatcagtattgcagaaagcgtcatctcccattgttcaagactttccctgcacagaatttgattgacatggacaaggaagatcagcaatcagacacaacggaggaccttcatgaacgacttcattctgcctactttcagttccctgataccgacgaggtacctttggaaagagttcgcgttagtgtcggcagagacgaagacgggagcggcagttcaggtgaatcaagccgcaaggaaagcgccgaagacgaacacaagagtggcctctcccacccgacgctggatgggctcccggttagtcggttacgcaacgcggtgagatcacttgggtccgttttgagaccgcagaggagacagttaccagtatagcacatttcctttaaccgcccatgtaaattcaaggtcgacagaccacacacacagatcattgatagcgcgtacagggagaggaaggtacacagacagaaatggaagagagtataccacccgtttgcaagggtagaaaattttgatgtgtcaattgatacttgatgaatggcttttcaggtcattccttttcaattg

SEQ ID NO: 90134 - DNA, 2710 bp, Zea Mays
caactactcctactgctataaccatcctccccagcgccccgcccgccctccgtgcccctctccacttcgatcgccttcctcgacagttcattgccatcggcagcgcgttgccgccgctcgactcgacttgactccactctgctcgagggttttgctggagtcgagttcggtcggcattgttggattgagctttcggcttgggggaactattaaagagatgaaagtcggcggtctcctgacctctgctggaatcaacatcggtctctgtgtactttttctgtcactgtactccattctaaggaagcagccacagaatgttaaggtctattttggaagaaggattgctgaggagcacaaccggctccgtgatgcttttatcttggagagatttgtcccttcccctagctggattgtgaaaagtctgcggtgcacagaggaagaaatcttggctactgctgggttggatgctgttgttttcaatagaattctagtattcagcatacgcatcttctccttagctgccattctttgtgtatttggtgtccttccgctgaattattttggacaagatatgcatcatgtccggattccttcagcatcattagagacatttacaataggaaatgtggaagaaagatcaagatggctctgggtccattgcgtcgtactgtacatcatctctgctgtagcttgcattcttctatacttggagtacaagcacattgccaggctgaggttatatcacatttctagagcaacaagcaatcctagccattttactatccttgtccgaggaattccaaaatcaagtacagagtcattcagcaggacagttgaaagtttctttaccaagtaccatgcatcaagttacctatctcatcaagtcgtttacaaagttgggaaagttcagaagatagtgagtggtgcaaagaaggtttacaggaagttcagacatttcaagggtgcgacagttgatcggagatgcagacccattagatttcaatgctgtttttgtggagcttcttctaattcattccagttgttgcctagtgattacgagcaagagagtgaaaagtctgatgtgaatgaatcaagctcgagcttacctgatgaggaatgtggtgctgcttttgtgtttttcaaaactcggtatgcagcgctagttgtagccaaaattctgcagacatcgaaccctatgagatgggtcactactttggctcctgagcctgatgacatatattggtctaatctttggttaccctacaagcaactctggattcggcacatagtcacacttatgtgttctatcgttttcatggttgtattccttataccagtgacatttatacaaggtttaactcagctggagcaactgcagcaaaggctcccttttctgagaggaatattgaaaaagaaatacatgacccagctgataactggatatctccccagtgtcatcttgcaaatatttttatatactgttcccccgaccatgatgtttttttctactttggaggggcctatctctcacagtgaaagaaagaaaagtgcctgctgtaaagtattatacttcaccatttggaatgtcttctttgtcaatgtcttatcgggttcagcaattagccaactgaatgctttatcaagcccaaaggacattcctatgcagcttgctaaagcagtacctgtgcaggctacattctttactacctatgttcttacttcaggatgggctagtctatcatcagaacttatgcaactctttggtcttacatggaactttttaagaagatatcttctgagaattaaggaggatagtgattttctttactcatttccctatcacactgaaatgccaaaagttctgctgtttggactgctgggtttcacatgctctgtactagcacctctaatcttgccctttttactgctgtacttttttcttggctacgtcgtctaccgcaaccagttcctcaatgtttactgcacaaaatacgacacaggcggtcaatattggccaattgcgcacaatactacaatattctctctaatcctcactcagatcatctgtcttggtgtgtttggccttaaagaatcccctgtagctgctggcttcactgtcccgcttatcatctttactcttctattcaatcagtattgcagaaagcgtcatctcccattgttcaagactttccctgcacagaatttgattgacatggacaaggaagatcagcaatcagacacaacggaggaccttcatgaacgacttcattctgcctactttcagttccctgataccgacgaggtacctttggaaagagttcgcgttagtgtcggcagagacgaagacgggagcggcagttcaggtgaatcaagccgcaaggaaagcgccgaagacgaacacaagagtggcctctcccacccgacgctggatgggctcccggttagtcggttacgcaacgcggtgagatcacttgggtccgttttgagaccgcagaggagacagttaccagtatagcacatttcctttaaccgcccatgtaaattcaaggtcgacagaccacacacacagatcattgatagcgcgtacagggagaggaaggtacacagacagaaatggaagagagtataccacccgtttgcaagggtagaaaattttgatgtgtcaattgatacttgatgaatggcttttcaggtcattccttttcaattg

SEQ ID NO: 90135 - DNA, 4430 bp, Zea Mays
caactactcctactgctataaccatcctccccagcgccccgcccgccctccgtgcccctctccacttcgatcgccttcctcgacagttcattgccatcggcagcgcgttgccgccgctcgactcgacttgactccactctgctcgagggttttgctggagtcgagttcggtcggcattgttggattgagctttcggcttgggggaactattaaagagatgaaagtcggcggtctcctgacctctgctggaatcaacatcggtctctgtgtactttttctgtcactgtactccattctaaggaagcagccacagaatgttaaggtctattttggaagaaggattgctgaggagcacaaccggctccgtgatgcttttatcttggagagatttgtcccttcccctagctggattgtgaaaagtctgcggtgcacagaggaagaaatcttggctactgctgggttggatgctgttgttttcaatagaattctagtattcagcatacgcatcttctccttagctgccattctttgtgtatttggtgtccttccgctgaattattttggacaagatatgcatcatgtccggattccttcagcatcattagagacatttacaataggaaatgtggaagaaagatcaagatggctctgggtccattgcgtcgtactgtacatcatctctgctgtagcttgcattcttctatacttggagtacaagcacattgccaggctgaggttatatcacatttctagagcaacaagcaatcctagccattttactatccttgtccgaggaattccaaaatcaagtacagagtcattcagcaggacagttgaaagtttctttaccaagtaccatgcatcaagttacctatctcatcaagtcgtttacaaagttgggaaagttcagaagatagtgagtggtgcaaagaaggtttacaggaagttcagacatttcaagggtgcgacagttgatcggagatgcagacccattagatttcaatgctgtttttgtggagcttcttctaattcattccagttgttgcctagtgattacgagcaagagagtgaaaagtctgatgtgaatgaatcaagctcgagcttacctgatgaggaatgtggtgctgcttttgtgtttttcaaaactcggtatgcagcgctagttgtagccaaaattctgcagacatcgaaccctatgagatgggtcactactttggctcctgagcctgatgacatatattggtctaatctttggttaccctacaagcaactctggattcggcacatagtcacacttatgtgttctatcgttttcatggttgtattccttataccagtgacatttatacaaggtttaactcagctggagcaactgcagcaaaggctcccttttctgagaggaatattgaaaaagaaatacatgacccagctgataactggatatctccccagtgtcatcttgcaaatatttttatatactgttcccccgaccatgatgtttttttctactttggaggggcctatctctcacagtgaaagaaagaaaagtgcctgctgtaaagtattatacttcaccatttggaatgtcttctttgtcaatgtcttatcgggttcagcaattagccaactgaatgctttatcaagcccaaaggacattcctatgcagcttgctaaagcagtacctgtgcaggctacattctttactacctatgttcttacttcaggatgggctagtctatcatcagaacttatgcaactctttggtcttacatggaactttttaagaagatatcttctgagaattaaggaggatagtgattttctttactcatttccctatcacactgaaatgccaaaagttctgctgtttggactgctgggtttcacatgctctgtactagcacctctaatcttgccctttttactgctgtacttttttcttggctacgtcgtctaccgcaaccagttcctcaatgtttactgcacaaaatacgacacaggcggtcaatattggccaattgcgcacaatactacaatattctctctaatcctcactcagatcatctgtcttggtgtgtttggccttaaagaatcccctgtagctgctggcttcactgtcccgcttatcatctttactcttctattcaatcagtattgcagaaagcgtcatctcccattgttcaagactttccctgcacagaatttgattgacatggacaaggaagatcagcaatcagacacaacggaggaccttcatgaacgacttcattctgcctactttcagttccctgataccgacgaggtacctttggaaagagttcgcgttagtgtcggcagagacgaagacgggagcggcagttcaggtgaatcaagccgcaaggaaagcgccgaagacgaacacaagagtggcctctcccacccgacgctggatgggctcccggttagtcggttacgcaacgcggtgagatcacttgggtccgttttgagaccgcagaggagacagttaccagtatagcacatttcctttaaccgcccatgtaaattcaaggtcgacagaccacacacacagatcattgatagcgcgtacagggagaggaaggtacacagacagaaatggaagagagtataccacccgtttgcaagggtagaaaattttgatgtgtcaattgatacttgatgaatggcttttcaggtcattccttttcaattgatcgattcttgaaatattcaggctggcccctctggtgatatgtaccccttcgccttttaaaagacttgctggaaacagcggcgatgcaccattattctttcccaccatcacacaacaaaatgataagtatttttttcgagctcgcaagagaagtattgtatttagagattaggaaaaaagagcaaaaaaaagagagacaaatataaccgtacacaatcgcacatcccctacaccagaggtaacatgcgcgggctcaaatcacaggatggtgcagacagacgtggacgaaggcccctccgcggcggccgccttgtcgccggccggggcaacgcccggccaatcgcggcaggcgcagtgctggccctggggaatctggcggtgcacggaggcgacgtggcggccgcagcccgcccacgtggacttgccgcacgacccgcacttcacctggtagcacatggctgatggctcccgctggcttcgcccctctagctgaagcttccccctcgactcgaagtcgaagcgaaggtatctgaagaaatctgggtcgatgtggacgatgtctccgaggccggcggagctggttaccttttgacctgcaaaaccgatgcttggagagggggcctagtcgcctagggaagataacgatccggctggcctatgctgtattgccgtcacatgagatgtgaggcacagctcatcgcttacctcacccaagcagtgagccaaattggcttatctttcattctattatattttagtttctaacttactaaataataaaattaaaatttttgtatttagtaattttaagattaaaatagaatgagatagagaaactaaaaattaaaccctaaaaatcaaacaccgtacccttaccgccgtaaaccttatcgacactcgtgtaagtgcgttgaccttcgaagacaaatggcccgtcctgcgattactgatccgatcaaagtctttcaagtccggcaacctctaccatcgatccatcgtccaaccaaaacgtgtcgacaactcaaaattggacccaacccgatcgatctatacgaaattttttgacccgactattaatttttgatccacgacaatctatagcgggtatgaaccatgattttgatccaaaacccgactcaaatccggaaaaaaaaagatcaaaagccaaaaatccactcagacccgaaaaacacgacccaacggggattgatatgctcaaacggggcaacgatggatgaccacacgttcgttcgacacggcgggttccgatcctcagggaacagaacaccacgcggtgggcggcgcgaacctcactgcgcagcgccgccctgcgcgggagtggaggcggcggtgccggagtccttcccagcgtcgtcagcggcgctggcggccttcttgacgccggccggggcggtggcggggtcgacgccgggccagtcgcggcaggcgcagtgctggccctccgagatctgcgcgtgcaccgacgcgacgtggcggccgcacccggcccacgtggtcttgccgcaggtgccgcacctcacctggtagcacatggcgtcggacggtggcttcgctgagagactctcgactctgcctctgctcctgatggggtccggtccggatgggaagctcgatgggttgtggtggtcaggtgctgtggctgcctgccttgtgggtggatgacggttggaactgatcatttatagaaggcccattgccg

SEQ ID NO: 90136 - DNA, 4507 bp, Zea Mays
caactactcctactgctataaccatcctccccagcgccccgcccgccctccgtgcccctctccacttcgatcgccttcctcgacagttcattgccatcggcagcgcgttgccgccgctcgactcgacttgactccactctgctcgagggttttgctggagtcgagttcggtcggcattgttggattgagctttcggcttgggggaactattgtaaggggtactgacataatcatgaagcttttcatatttcgatgacaggattgttggatctcatatacgtgttttagaaagagatgaaagtcggcggtctcctgacctctgctggaatcaacatcggtctctgtgtactttttctgtcactgtactccattctaaggaagcagccacagaatgttaaggtctattttggaagaaggattgctgaggagcacaaccggctccgtgatgcttttatcttggagagatttgtcccttcccctagctggattgtgaaaagtctgcggtgcacagaggaagaaatcttggctactgctgggttggatgctgttgttttcaatagaattctagtattcagcatacgcatcttctccttagctgccattctttgtgtatttggtgtccttccgctgaattattttggacaagatatgcatcatgtccggattccttcagcatcattagagacatttacaataggaaatgtggaagaaagatcaagatggctctgggtccattgcgtcgtactgtacatcatctctgctgtagcttgcattcttctatacttggagtacaagcacattgccaggctgaggttatatcacatttctagagcaacaagcaatcctagccattttactatccttgtccgaggaattccaaaatcaagtacagagtcattcagcaggacagttgaaagtttctttaccaagtaccatgcatcaagttacctatctcatcaagtcgtttacaaagttgggaaagttcagaagatagtgagtggtgcaaagaaggtttacaggaagttcagacatttcaagggtgcgacagttgatcggagatgcagacccattagatttcaatgctgtttttgtggagcttcttctaattcattccagttgttgcctagtgattacgagcaagagagtgaaaagtctgatgtgaatgaatcaagctcgagcttacctgatgaggaatgtggtgctgcttttgtgtttttcaaaactcggtatgcagcgctagttgtagccaaaattctgcagacatcgaaccctatgagatgggtcactactttggctcctgagcctgatgacatatattggtctaatctttggttaccctacaagcaactctggattcggcacatagtcacacttatgtgttctatcgttttcatggttgtattccttataccagtgacatttatacaaggtttaactcagctggagcaactgcagcaaaggctcccttttctgagaggaatattgaaaaagaaatacatgacccagctgataactggatatctccccagtgtcatcttgcaaatatttttatatactgttcccccgaccatgatgtttttttctactttggaggggcctatctctcacagtgaaagaaagaaaagtgcctgctgtaaagtattatacttcaccatttggaatgtcttctttgtcaatgtcttatcgggttcagcaattagccaactgaatgctttatcaagcccaaaggacattcctatgcagcttgctaaagcagtacctgtgcaggctacattctttactacctatgttcttacttcaggatgggctagtctatcatcagaacttatgcaactctttggtcttacatggaactttttaagaagatatcttctgagaattaaggaggatagtgattttctttactcatttccctatcacactgaaatgccaaaagttctgctgtttggactgctgggtttcacatgctctgtactagcacctctaatcttgccctttttactgctgtacttttttcttggctacgtcgtctaccgcaaccagttcctcaatgtttactgcacaaaatacgacacaggcggtcaatattggccaattgcgcacaatactacaatattctctctaatcctcactcagatcatctgtcttggtgtgtttggccttaaagaatcccctgtagctgctggcttcactgtcccgcttatcatctttactcttctattcaatcagtattgcagaaagcgtcatctcccattgttcaagactttccctgcacagaatttgattgacatggacaaggaagatcagcaatcagacacaacggaggaccttcatgaacgacttcattctgcctactttcagttccctgataccgacgaggtacctttggaaagagttcgcgttagtgtcggcagagacgaagacgggagcggcagttcaggtgaatcaagccgcaaggaaagcgccgaagacgaacacaagagtggcctctcccacccgacgctggatgggctcccggttagtcggttacgcaacgcggtgagatcacttgggtccgttttgagaccgcagaggagacagttaccagtatagcacatttcctttaaccgcccatgtaaattcaaggtcgacagaccacacacacagatcattgatagcgcgtacagggagaggaaggtacacagacagaaatggaagagagtataccacccgtttgcaagggtagaaaattttgatgtgtcaattgatacttgatgaatggcttttcaggtcattccttttcaattgatcgattcttgaaatattcaggctggcccctctggtgatatgtaccccttcgccttttaaaagacttgctggaaacagcggcgatgcaccattattctttcccaccatcacacaacaaaatgataagtatttttttcgagctcgcaagagaagtattgtatttagagattaggaaaaaagagcaaaaaaaagagagacaaatataaccgtacacaatcgcacatcccctacaccagaggtaacatgcgcgggctcaaatcacaggatggtgcagacagacgtggacgaaggcccctccgcggcggccgccttgtcgccggccggggcaacgcccggccaatcgcggcaggcgcagtgctggccctggggaatctggcggtgcacggaggcgacgtggcggccgcagcccgcccacgtggacttgccgcacgacccgcacttcacctggtagcacatggctgatggctcccgctggcttcgcccctctagctgaagcttccccctcgactcgaagtcgaagcgaaggtatctgaagaaatctgggtcgatgtggacgatgtctccgaggccggcggagctggttaccttttgacctgcaaaaccgatgcttggagagggggcctagtcgcctagggaagataacgatccggctggcctatgctgtattgccgtcacatgagatgtgaggcacagctcatcgcttacctcacccaagcagtgagccaaattggcttatctttcattctattatattttagtttctaacttactaaataataaaattaaaatttttgtatttagtaattttaagattaaaatagaatgagatagagaaactaaaaattaaaccctaaaaatcaaacaccgtacccttaccgccgtaaaccttatcgacactcgtgtaagtgcgttgaccttcgaagacaaatggcccgtcctgcgattactgatccgatcaaagtctttcaagtccggcaacctctaccatcgatccatcgtccaaccaaaacgtgtcgacaactcaaaattggacccaacccgatcgatctatacgaaattttttgacccgactattaatttttgatccacgacaatctatagcgggtatgaaccatgattttgatccaaaacccgactcaaatccggaaaaaaaaagatcaaaagccaaaaatccactcagacccgaaaaacacgacccaacggggattgatatgctcaaacggggcaacgatggatgaccacacgttcgttcgacacggcgggttccgatcctcagggaacagaacaccacgcggtgggcggcgcgaacctcactgcgcagcgccgccctgcgcgggagtggaggcggcggtgccggagtccttcccagcgtcgtcagcggcgctggcggccttcttgacgccggccggggcggtggcggggtcgacgccgggccagtcgcggcaggcgcagtgctggccctccgagatctgcgcgtgcaccgacgcgacgtggcggccgcacccggcccacgtggtcttgccgcaggtgccgcacctcacctggtagcacatggcgtcggacggtggcttcgctgagagactctcgactctgcctctgctcctgatggggtccggtccggatgggaagctcgatgggttgtggtggtcaggtgctgtggctgcctgccttgtgggtggatgacggttggaactgatcatttatagaaggcccattgccg

SEQ ID NO: 90137 - DNA, 1551 bp, Zea Mays
tgataagtatttttttcgagctcgcaagagaagtattgtatttagagattaggaaaaaagagcaaaaaaaagagagacaaatataaccgtacacaatcgcacatcccctacaccagaggtaacatgcgcgggctcaaatcacaggatggtgcagacagacgtggacgaaggcccctccgcggcggccgccttgtcgccggccggggcaacgcccggccaatcgcggcaggcgcagtgctggccctggggaatctggcggtgcacggaggcgacgtggcggccgcagcccgcccacgtggacttgccgcacgacccgcacttcacctggtagcacatggctgatggctcccgctggcttcgcccctctagctgaagcttccccctcgactcgaagtcgaagcgaaggtatctgaagaaatctgggtcgatgtggacgatgtctccgaggccggcggagctggttaccttttgacctgcaaaaccgatgcttggagagggggcctagtcgcctagggaagataacgatccggctggcctatgctgtattgccgtcacatgagatgtgaggcacagctcatcgcttacctcacccaagcagtgagccaaattggcttatctttcattctattatattttagtttctaacttactaaataataaaattaaaatttttgtatttagtaattttaagattaaaatagaatgagatagagaaactaaaaattaaaccctaaaaatcaaacaccgtacccttaccgccgtaaaccttatcgacactcgtgtaagtgcgttgaccttcgaagacaaatggcccgtcctgcgattactgatccgatcaaagtctttcaagtccggcaacctctaccatcgatccatcgtccaaccaaaacgtgtcgacaactcaaaattggacccaacccgatcgatctatacgaaattttttgacccgactattaatttttgatccacgacaatctatagcgggtatgaaccatgattttgatccaaaacccgactcaaatccggaaaaaaaaagatcaaaagccaaaaatccactcagacccgaaaaacacgacccaacggggattgatatgctcaaacggggcaacgatggatgaccacacgttcgttcgacacggcgggttccgatcctcagggaacagaacaccacgcggtgggcggcgcgaacctcactgcgcagcgccgccctgcgcgggagtggaggcggcggtgccggagtccttcccagcgtcgtcagcggcgctggcggccttcttgacgccggccggggcggtggcggggtcgacgccgggccagtcgcggcaggcgcagtgctggccctccgagatctgcgcgtgcaccgacgcgacgtggcggccgcacccggcccacgtggtcttgccgcaggtgccgcacctcacctggtagcacatggcgtcggacggtggcttcgctgagagactctcgactctgcctctgctcctgatggggtccggtccggatgggaagctcgatgggttgtggtggtcaggtgctgtggctgcctgcctt

SEQ ID NO: 90138 - DNA, 1536 bp, Zea Mays
cggaatcgaaggcaaaccaatagacatccttattaacttggcctgatgcactcctccattcctcagacaatcaaatatccccagatagctaggtggttggcacgcatggagaagcagctgcctgctcttaccggtggctcaaaggcggccaccacgacgcccttctacctcgccttagatcacagagccgccgccacgtcgtcttcaccgccggcggaggcgccaacactgccgccgtctgctgcggctgtctcagatccttctagacagtccaacagcgataggggatccgagataatcaaagccaagatcatgtctcaccctctctatccggctctcttgagagccttcatagattgccggaaggtacgcgtgcgcagatttccaagagatgcaattctacagctaatttcgtgagagatgaaaggcatggtttcttgatttttatgcgctctccgtcctcatatgttctccaattttcacgaggaaaatctcttttgcgtttttgtttctcgaggttggagcgccgctcgagattgtcggtcggctttctgccctcgctgatgacgtcgaaacgaattcagacggcagacaagaagaacaaccagcagacccagagctcgatcagttcatggagatctactgtcacatgttggtaaggtacagacaggagctcacaaggccaatccaggaagcggacgaattcttcaaaagcatggaggcccagatcgactcattttcattagatgacaatggctatgaagaaggaggcggttcctccgacgaagatgagcaagaaaccgtcgacttgggcggccttccggtccctgagaccggcagcccgtccggagagggcaaggagctgaagaaccacctcctgaacaagtacagcggctacctgagcagcctctggagggagctctcgaggaagaagaagaaaggcaagctgccgagggacgcccgccagaagctcctccactggtggcagctgcactacagatggccctatccctcggagctggagaaggcggcgctggcggagtcgacggggctcgacgcgaagcagatcaacaactggttcatcaaccagcggaagcgccactggaagccggcgccgccgacgatggcgctaggcacaccagattacaggatgggccagcacggcggcggtgcttctagcagctcggcctccgctggtctccgcgtgcaggggcagtacttcaccggcggaagctcgtatccccgtggcccgtgacgatgcatgcgtcgcctgcaggctgagcgcgtgaggtgtcgacatggattgttgccgtgcatgcatgcatatcagcatacgtatacatacatacgtgatcattatttgggtatagatggtgtggacgtgtcgtgtttcctatacagaaatttgattgtctccttacttgcattgctcatacgcatacatatctacatatatgcagctgatgacagagttataaagttgtaactatatattattattatttgtcttactaacatgagagcagttgtacacgt

SEQ ID NO: 90139 - DNA, 1416 bp, Zea Mays
cggaatcgaaggcaaaccaatagacatccttattaacttggcctgatgcactcctccattcctcagacaatcaaatatccccagatagctaggtggttggcacgcatggagaagcagctgcctgctcttaccggtggctcaaaggcggccaccacgacgcccttctacctcgccttagatcacagagccgccgccacgtcgtcttcaccgccggcggaggcgccaacactgccgccgtctgctgcggctgtctcagatccttctagacagtccaacagcgataggggatccgagataatcaaagccaagatcatgtctcaccctctctatccggctctcttgagagccttcatagattgccggaaggttggagcgccgctcgagattgtcggtcggctttctgccctcgctgatgacgtcgaaacgaattcagacggcagacaagaagaacaaccagcagacccagagctcgatcagttcatggagatctactgtcacatgttggtaaggtacagacaggagctcacaaggccaatccaggaagcggacgaattcttcaaaagcatggaggcccagatcgactcattttcattagatgacaatggctatgaagaaggaggcggttcctccgacgaagatgagcaagaaaccgtcgacttgggcggccttccggtccctgagaccggcagcccgtccggagagggcaaggagctgaagaaccacctcctgaacaagtacagcggctacctgagcagcctctggagggagctctcgaggaagaagaagaaaggcaagctgccgagggacgcccgccagaagctcctccactggtggcagctgcactacagatggccctatccctcggagctggagaaggcggcgctggcggagtcgacggggctcgacgcgaagcagatcaacaactggttcatcaaccagcggaagcgccactggaagccggcgccgccgacgatggcgctaggcacaccagattacaggatgggccagcacggcggcggtgcttctagcagctcggcctccgctggtctccgcgtgcaggggcagtacttcaccggcggaagctcgtatccccgtggcccgtgacgatgcatgcgtcgcctgcaggctgagcgcgtgaggtgtcgacatggattgttgccgtgcatgcatgcatatcagcatacgtatacatacatacgtgatcattatttgggtatagatggtgtggacgtgtcgtgtttcctatacagaaatttgattgtctccttacttgcattgctcatacgcatacatatctacatatatgcagctgatgacagagttataaagttgtaactatatattattattatttgtcttactaacatgagagcagttgtacacgtatatcagcatgaatgcatggatgttccttct

SEQ ID NO: 90140 - DNA, 2163 bp, Zea Mays
cacacatttcccacacgtcagcacccaagccgcccagtaggcatcaccgcatcagcttgccaggtcggaccacatgtcataccctgcgagctgccgtcctccagcttggggcagctcaactactcgcacaactgcacaaaagcacaagcctccctcccggctccccacctcgcagcgtccgccggcacaccacctctgactcctctccctccgcggcctccgtttcttccctcattctccgcaaaccctaatcccaatggctgcctccgccaggactaccagctcgttgccctacctagtcgccgtctcctcccccgcggctcaccgccacggggccagccacccgatccgcgcctcggtgggggaggcgacaatggacgtggtgtcggaggcggagctgcgggagaaagggttcttggggatgcggaaaacgaaactggtgtgcacggtggggcccgcctgcgtcgaggcgctgccggcgctggcgcgcggcgggatgggcgtggcgcggatcaacctctgccacggtggccgggagtggcatcgtgccgccatgcgctctgtgcggaggctcaacgaggagggaggattctgcgtgacgcttatggtcgacaccgagggttcccagctcctcgtcgcggaccacggaggcgccacctcagtcaaggccgaggatgggtcagagtggatatttacaaacaaaaaagctgatgaagcccatcagttcacaatgcatgtgaattttgataagttttctgaaggcattttggttggtgatgagcttgtaatagatggtggaatggcaacatttgaagttactgagaaaataggaaatgatttgcgctgtaagtgcacggacccaggtttgcttcttcctcgagccaaattgtcattctggaggaacggaaaaatagttcaaaggaactttggccttcctacattgtcaacaaaggattgggctgacatcgaatttgggatagctgaaggagttgattgcattgctctatcatttgtaaatgatgctaatgatataaagcagttgaaagcttacctctctagaagatcgttagagcacatcaaagtatttgcaaagattgagagtctagaatctctcaagaacctgaaagacatcatagaggcatctgatggagttatggtagcacgaggggatcttggagttcagattcctcttgaacagatcccagccattcaagaatcaattgttaaactatgtagacacctgaacaagcctgtgatagttgcttctcagcttctcgaatcaatggttgaatacccaacaccaactcgagcagaggtggccgatgtttccgaagcagtgcggcaatatgcagacgctgtgatgctatcagcagagtcagctataggtgcatatccccaaaaagcgctatctgtacttcgtgcagccagtgaaaggatggaatcatggagccgtgaggaaaacatgcagaaacttcttccacggcatcagcttgcaattgcattgcctgaccggatctcagagcagatttgcagctgtgctgtagaaatggcaaacaaccttgctgtggatgccatatttgtctacacaaagcatggtcacatggcatcacttctatcgcgcaaccgacccaaccctcccatattcgcgttcactgataatgccaattcaagaaagagcatgaacctctactggggagtgattccacttcatctaccattgtcaaatagcatggaggataacttcaacaaaaccatcagcctgatgaggtcgaagggttcagtgaaacccggagacacggtcttggtggtatcagattctgatctaaaccaaccttgtgctgccacctcggtgttccaatccattcaggtccggctagtggagtaggttccatgagatgagatcctactagccgtttggttggctaaaatgtaacgtaaccaactactactatgcgttaccattgcaaaccattcccaccgtctataattagatcctatttccatctccaaataaagattgaaccactgcgattacagtggtgtctgatttcatttccttcgtgtcaccgttcattgaatcaaacaccgtctagtttcagtactgggttgctgcaaatgtctcgttgaaccaaacacgaattaaagccagctgtttctatattc

SEQ ID NO: 90141 - DNA, 1837 bp, Zea Mays
cacaactgcacaaaagcacaagcctccctcccggctccccacctcgcagcgtccgccggcacaccacctctgactcctctccctccgcggcctccgtttcttccctcattctccgcaaaccctaatcccaatggctgcctccgccaggactaccagctcgttgccctacctagtcgccgtctcctcccccgcggctcaccgccacggggccagccacccgatccgcgcctcggtgggggaggcgacaatggacgtggtgtcggaggcggagctgcgggagaaagggttcttggggatgcggaaaacgaaactggtgtgcacggtggggcccgcctgcgtcgaggcgctgccggcgctggcgcgcggcgggatgggcgtggcgcggatcaacctctgccacggtggccgggagtggcatcgtgccgccatgcgctctgtgcggaggctcaacgaggagggaggattctgcgtgacgcttatggtcgacaccgagggttcccagctcctcgtcgcggaccacggaggcgccacctcagtcaaggccgaggatgggtcagagtggatatttacaaacaaaaaagctgatgaagcccatcagttcacaatgcatgtgaattttgataagttttctgaaggcattttggttggtgatgagcttgtaatagatggtggaatggcaacatttgaagttactgagaaaataggaaatgatttgcgctgtaagtgcacggacccaggattgggctgacatcgaatttgggatagctgaaggagttgattgcattgctctatcatttgtaaatgatgctaatgatataaagcagttgaaagcttacctctctagaagatcgttagagcacatcaaagtatttgcaaagattgagagtctagaatctctcaagaacctgaaagacatcatagaggcatctgatggagttatggtagcacgaggggatcttggagttcagattcctcttgaacagatcccagccattcaagaatcaattgttaaactatgtagacacctgaacaagcctgtgatagttgcttctcagcttctcgaatcaatggttgaatacccaacaccaactcgagcagaggtggccgatgtttccgaagcagtgcggcaatatgcagacgctgtgatgctatcagcagagtcagctataggtgcatatccccaaaaagcgctatctgtacttcgtgcagccagtgaaaggatggaatcatggagccgtgaggaaaacatgcagaaacttcttccacggcatcagcttgcaattgcattgcctgaccggatctcagagcagatttgcagctgtgctgtagaaatggcaaacaaccttgctgtggatgccatatttgtctacacaaagcatggtcacatggcatcacttctatcgcgcaaccgacccaaccctcccatattcgcgttcactgataatgccaattcaagaaagagcatgaacctctactggggagtgattccacttcatctaccattgtcaaatagcatggaggataacttcaacaaaaccatcagcctgatgaggtcgaagggttcagtgaaacccggagacacggtcttggtggtatcagattctgatctaaaccaaccttgtgctgccacctcggtgttccaatccattcaggtccggctagtggagtaggttccatgagatgagatcctactagccgtttggttggctaaaatgtaacgtaaccaactactactatgcgttaccattgcaaaccattcccaccgtctataattagatcctatttccatctccaaataaagattgaaccactgcgattacagtggtgtctgatttca

SEQ ID NO: 90142 - DNA, 909 bp, Zea Mays
aatccacctgagccttaaaactagactttggatcccctaatatctagcaacattactgctactggtgtttttttatatctcatttgttttctcctttttgttggtgcgtttggggctaaaaggcttggatcgttctatctaaccatttcctgttcacttccttatgaaggtggccgatgtttccgaagcagtgcggcaatatgcagacgctgtgatgctatcagcagagtcagctataggtgcatatccccaaaaagcgctatctgtacttcgtgcagccagtgaaaggatggaatcatggagccgtgaggaaaacatgcagaaacttcttccacggcatcagcttgcaattgcattgcctgaccggatctcagagcagatttgcagctgtgctgtagaaatggcaaacaaccttgctgtggatgccatatttgtctacacaaagcatggtcacatggcatcacttctatcgcgcaaccgacccaaccctcccatattcgcgttcactgataatgccaattcaagaaagagcatgaacctctactggggagtgattccacttcatctaccattgtcaaatagcatggaggataacttcaacaaaaccatcagcctgatgaggtcgaagggttcagtgaaacccggagacacggtcttggtggtatcagattctgatctaaaccaaccttgtgctgccacctcggtgttccaatccattcaggtccggctagtggagtaggttccatgagatgagatcctactagccgtttggttggctaaaatgtaacgtaaccaactactactatgcgttaccattgcaaaccattcccaccgtctataattagatcctatttccatctccaaataaagattgaaccactgcgattacagtggtgtctgatttcattt

SEQ ID NO: 90143 - DNA, 309 bp, Zea Mays
tactctctttcagcttcgagtgtatttgagaaccaatggcttgaccaaatggtccaagcagtaggtgcttcagctagccttagagttatcgaaagggttgatcagacactacaagagctagaggtgaatttgaagcctaagatcccaacgaaagtagtttgcatagaacatattgaatcatggaatgagctactcacattgcttaacctacaaaagcagttgcaaaataaagaggctgaagtttcagctgaccaggaaagttcttcacagaggcaccaagcacacctaagccgcgttgattcagcatga

SEQ ID NO: 90144 - DNA, 639 bp, Zea Mays
taactgcaaaaatcgggggacagagaagcgttcgcctgactcgcccccactcccgagtggccgaagccccgaccggcgaccccgcagatctgtccaagcgttcgcctgactcgcccccactcccgagtggccgaagccccgaccggcgaccccgcagatctgtcccattgttctccgtcctccccgtcgtgtcctccttgatccttcttcgagtggcaagtgctgacctcgcctcctattcctccggtagccctactggggcgccgggcgcacagatctgctcacccctggacgctaggcgctgcccagctcttccctgccagccggtcgcggcggctgcaagccagcacggcagggctgctggtgcctgctcttgtcctccggcacagcgcagggtgtcggggtcgctcccagctggccatcctctcggcccccttgttgcacagcgagtcaatttggtgaatcccccctcccctctcacgctccaccactgatcatggggctactcagcattatccgcaagatcaagcgcaaggagaaggagatgcgcatcctcatggtgtaggctccctctggcctccttttctgtttgatcacatatgcacttgttcccccatggttcttggtttccttcagatc

SEQ ID NO: 90145 - DNA, 1300 bp, Zea Mays
taactgcaaaaatcgggggacagagaagcgttcgcctgactcgcccccactcccgagtggccgaagccccgaccggcgaccccgcagatctgtccaagcgttcgcctgactcgcccccactcccgagtggccgaagccccgaccggcgaccccgcagatctgtcccattgttctccgtcctccccgtcgtgtcctccttgatccttcttcgagtggcaagtgctgacctcgcctcctattcctccggtagccctactggggcgccgggcgcacagatctgctcacccctggacgctaggcgctgcccagctcttccctgccagccggtcgcggcggctgcaagccagcacggcagggctgctggtgcctgctcttgtcctccggcacagcgcagggtgtcggggtcgctcccagctggccatcctctcggcccccttgttgcacagcgagtcaatttggtgaatcccccctcccctctcacgctccaccactgatcatggggctactcagcattatccgcaagatcaagcgcaaggagaaggagatgcgcatcctcatggttggcctggacaactcggggaagacaaccatcgttctcaagatcaatggggaggacaccagcatcattagcccaacccttggattcaacatcaagaccatcaagtaccacaaatactctttgaacatatgggatgttggaggacagaagacaatcaggtcttactggagaaactactttgagcagactgatggattagtttgggttgttgatagttcagacataaggaggcttgatgattgccgtgctgaactccacaatctcttgaaagaagagagactagttggagcttcattgttggtttttgcaaataagcaagacatacagggagctctaaaaccagatgaaattgcgaaggttctgaatctggaagtgatggacagaagcaggcactggaagattgtgggctgcagcgcttacacgggagaggggcttctcgagggcttcgactggctggtccaggacgtcgcttctcggatctacgtcctagactgatgctatttgccgcgtcagtcatcctagactgatgctatttgtcgcgttggtgctacttgagcatcattagagtttggtgcgtgcattaaagcctgtactaaggccctgtttgtttagggtttatggttttagggtttagggatttgtgttcactcttactcgcttcggatttgcggtggtatttgtttgcttgtgttacattgaggtaaatctaaacgatcatgagttcatttctctttatttaca

SEQ ID NO: 90146 - DNA, 1298 bp, Zea Mays
taactgcaaaaatcgggggacagagaagcgttcgcctgactcgcccccactcccgagtggccgaagccccgaccggcgaccccgcagatctgtccaagcgttcgcctgactcgcccccactcccgagtggccgaagccccgaccggcgaccccgcagatctgtcccattgttctccgtcctccccgtcgtgtcctccttgatccttcttcgagtggcaagtgctgacctcgcctcctattcctccggtagccctactggggcgccgggcgcacagatctgctcacccctggacgctaggcgctgcccagctcttccctgccagccggtcgcggcggctgcaagccagcacggcagggctgctggtgcctgctcttgtcctccggcacagcgcagggtgtcggggtcgctcccagctggccatcctctcggcccccttgttgcacagcgagtcaatttggtgaatcccccctcccctctcacgctccaccactgatcatggggctactcagcattatccgcaagatcaagcgcaaggagaaggagatgcgcatcctcatgtggcctggacaactcggggaagacaaccatcgttctcaagatcaatggggaggacaccagcatcattagcccaacccttggattcaacatcaagaccatcaagtaccacaaatactctttgaacatatgggatgttggaggacagaagacaatcaggtcttactggagaaactactttgagcagactgatggattagtttgggttgttgatagttcagacataaggaggcttgatgattgccgtgctgaactccacaatctcttgaaagaagagagactagttggagcttcattgttggtttttgcaaataagcaagacatacagggagctctaaaaccagatgaaattgcgaaggttctgaatctggaagtgatggacagaagcaggcactggaagattgtgggctgcagcgcttacacgggagaggggcttctcgagggcttcgactggctggtccaggacgtcgcttctcggatctacgtcctagactgatgctatttgccgcgtcagtcatcctagactgatgctatttgtcgcgttggtgctacttgagcatcattagagtttggtgcgtgcattaaagcctgtactaaggccctgtttgtttagggtttatggttttagggtttagggatttgtgttcactcttactcgcttcggatttgcggtggtatttgtttgcttgtgttacattgaggtaaatctaaacgatcatgagttcatttctctttatttaca

SEQ ID NO: 90147 - DNA, 1316 bp, Zea Mays
taactgcaaaaatcgggggacagagaagcgttcgcctgactcgcccccactcccgagtggccgaagccccgaccggcgaccccgcagatctgtccaagcgttcgcctgactcgcccccactcccgagtggccgaagccccgaccggcgaccccgcagatctgtcccattgttctccgtcctccccgtcgtgtcctccttgatccttcttcgagtggcaagtgctgacctcgcctcctattcctccggtagccctactggggcgccgggcgcacagatctgctcacccctggacgctaggcgctgcccagctcttccctgccagccggtcgcggcggctgcaagccagcacggcagggctgctggtgcctgctcttgtcctccggcacagcgcagggtgtcggggtcgctcccagctggccatcctctcggcccccttgttgcacagcgaatttggtgaatcccccctcccctctcacgctccaccactgatcatggggctactcagcattatccgcaagatcaagcgcaaggagaaggagatgcgcatcctcatggttggcctggacaactcggggaagacaaccatcgttctcaagatcaatggggaggacaccagcatcattagcccaacccttggattcaacatcaagaccatcaagtaccacaaatactctttgaacatatgggatgttggaggacagaagacaatcaggtcttactggagaaactactttgagcagactgatggattagtttgggttgttgatagttcagacataaggaggcttgatgattgccgtgctgaactccacaatctcttgaaagaagagagactagttggagcttcattgttggtttttgcaaataagcaagacatacagggagctctaaaaccagatgaaattgcgaaggttctgaatctggaagtgatggacagaagcaggcactggaagattgtgggctgcagcgcttacacgggagaggggcttctcgagggcttcgactggctggtccaggacgtcgcttctcggatctacgtcctagactgatgctatttgccgcgtcagtcatcctagactgatgctatttgtcgcgttggtgctacttgagcatcattagagtttggtgcgtgcattaaagcctgtactaaggccctgtttgtttagggtttatggttttagggtttagggatttgtgttcactcttactcgcttcggatttgcggtggtatttgtttgcttgtgttacattgaggtaaatctaaacgatcatgagttcatttctctttatttacatgtcagattaagtttttccc

SEQ ID NO: 90148 - DNA, 119 bp, Zea Mays
cttacttttttctttgtttttgcttcaaaagtgcaccattagttcatctaacagttacaaacttacttcatgcaaagatgccacttttttgattgtttactaatttatacgctttaaat

SEQ ID NO: 90149 - DNA, 254 bp, Zea Mays
cttacttttttctttgtttttgcttcaaaagtgcaccattagttcatctaacagttacaaacttacttcatgcaaagatgccactttttttattgtttactaatttatatgctttaaatgccttttcaagccgaaaataaataaataaataccaaatattgtcagaaaatagtgaaacttggtatggagtcataatttggtcctagctacttgagataaatagatcatgaggttatgcaaaagtgtcaatatag

SEQ ID NO: 90150 - DNA, 2109 bp, Zea Mays
cccagtccctgcactcgtgttcctgtagccgccaccccagcccctggacgctcggctcgatcccccccccccccctcaccacccgttctcctctagtcatcctcctcgccagtcgccaggtgtcggccgccggttgtgctccccgtcaggcgtcagcgtgatcccatcggtcgtcgcagaaacacagtcgctgctcgccgtcaccactcgccaggcgccggttcttctccaatccacgactcatcggctctccagtcctccgtccgttaccgaatttaaagtgcaacgtgccgattctttatatgtacttctgaatgcttggacctggtgtgactacatagcctggtattcatttcataaatgatggaaagaagattgggacggcgtgtatatttgattcccagaacccttccctttatgcaactcaatgctatgtcctcattctcagctggccatggacgccgacccaagaagaaggtatatcaccgtgaacctggtcttgacagggccatggatcttcaaaagaagcctgcccttctccttcgtctgcgtgacctcattttggcacaaaagacaggatcactacttgtgcgtgaccttgaaaaggaggttggttttgtccaaaaatggaactttctttcacttatcgagcgtcaccccaatatcttccatgtctctggtggaagtgcttcccgagagcccatttctgtcacacttacggagaaggccagaaagatatccagtgaagaggctgaagcgcgagagctaatggagccaatcttggtgagaaaccttaggaagttactgatgatgtcgatggactgccagattcctctggataagattgaactaatccagtctgaactgggcttacctaacaacttcaagagcaacatgattccaaggtaccctgattttttttcaatccgtgatgtgaagggactggaccatttgtgtctggagaattgggactcttcactagcagtcacaatacgagaagaaaaaatgaactttgagggtttccagataggctgtagagggattcctaaagatggaaatgtcttgggtccttttgctttcaagttgaagtatccaacaggatttaggccaaaccggaagtaccttgaggaggttgtcaggtggcagaagatggcatttccttcgccttatttgaatgctagacgagtcgagtctgcaacaccacagtctcgaaagcgtgccattgctgttctgcatgagattttgagccttacaatggagagacgattgacatctgataagctagacatatttcacaacgagtacaggcttccatgcaagttacttctttgtttagtgaaaaatcatggcatcttttacatcactaacaagggagcaagaagcacagtcttcctcaaggaggcttatgaaaactgtaacctaattgataagtgtcctttactgaaattctatgatcagtttgcatcattgattggccgaccgtgctccaactcagacaacatgctggcagtataattggagtgtggatttactgatcaggagacaagctaaagtcggtgcatctattttgttgaaactcagatcagctcattgcacatgcaactacaatttaaattcagtggaaagttgctgtttgtttcagctcagtagctaaagagaactaaagaattgaaaaagtcagtgtctcatcttcaaatgtgaagccatctgagaagtgaagtagcagccctgcaaactagacaaaataatgcttataccagaagtcaaagatcaggactggtttagtggtgagagttgtctcactgagtcactaggtcacatgtttgaagcagcctctccgcattcgaggggggaaggcttgctttgctttatccctttcccaaaccttacttatatatgggagcctccgctattgggtcagtctgatacttgtaccagaagtcacatctttattctcagtttctcacagttgtaggtttggatcctaggacaccatatgattgaattaggaatgttctaggattagctcctttatgcagcttatatctcaaaacaatgttatttctatattattaaagccggtccaaatcggcgaagacgggtctatcc

SEQ ID NO: 90151 - DNA, 641 bp, Zea Mays
gacattttatttggatatcgctggtatgctttatattgtacttttgactctggtttgcataagttttatgatgtctgtggtctttctgacctgcattctcttgaccatcatcacctaatgttgctccacatgaatcagtgtaggtcatgccctccaataatttctacccgatgtcgctccacattattctgatatggagcatgattaacagctttgtgattaagcattgccatgcttcgagccatcacgttcatcaaatcaacttgcaagttacagattgtgctactacatcattccatgatcctattccatgcctcttcatcactgcttaaagaatcaaacaagaaccactacgcatcatagactctacaagccaaaaaggccaccaagaatgatgcatgcgaccacaagaaaaccacattttcagcacttatctgcagtgtcccatcttttgctatcaatcttaaacatatgtacataacccctcaaccaagctagtcaactatacaggcaactgaagcactacaactttgtttattttggataaggccccgcttaaatatggcataaaacaacggatgtcatcattttgtaacttgatataatatcttctacctaaaaagtgaatgatggatgcaata

SEQ ID NO: 90152 - DNA, 1873 bp, Zea Mays
gacattttatttggatatcgctggtatgctttatattgtacttttgactctggtttgcataagttttatgatgtctgtggtctttctgacctgcattctcttgaccatcatcacctaatgttgctccacatgaatcagtgtaggtcatgccctccaataatttctacccgatgtcgctccacattattctgatatggagcatgattaacagctttgtgattaagcattgccatgcttcgagccatcacgttcatcaaatcaacttgcaagttacagattgtgctactacatcattccatgatcctattccatgcctcttcatcactgcttaaagtaccaaagtggctgtccacaacgcgcaaggaatgcctcggtgggagatgcatcaccctgatgttctcgagactcaactgcaacgctaaacggagctttcagtgggatctgttggaataataaccagatgggcatattctgagtaaagatcaaccgacaagattatgaatggtgtggacacattgaggtgaaatcatgctagctggctgccgctcggtttatagcccatgaaagcgaggagcatatacggggtgtgcagcgatcgggaccaggttgtgcagacaccacaagagggcacctatagtagtggtcatgagcctggtcagatgcaataaaaagctagattttgatgggagttagtggctgatagtttaggcaagcctatcctgaagtcatccgaacgaagaaaaggatggagactaggcgcccttttagtatcctgcttttttccttctggcctccagtgctgcaagtgggttgcttctagcatgagcttccgtgccgtactcctagttgcgagtttgcttctggagctttcttggggtgtttctttctctgtcctgtatgtttgcagcaattagagagacgctgatggtgggtgggatggaagggccgccgcatagatccagggaaagagagacgcgtttgtggtccatccatatgactggagagcctgaccctgacgccaacggcaagcagcagtggcggcatccagatcctggcgcaccgactgcacccgcccgtccggcaccttctttcggcggcagcggcactccgcgcgacacggggccgtgtccgtgtgggatgggatgggatggaatggaacagtaggctttttggcatttgcgaggacgcccaggcctgactcctctgaggccatctccatctccagcaggccgtataaacggctgtcgtttaggcatgcattaaccagagtatgagatttatgggagcaccttgagtggctcatggatcccctggactagcgtgcgcggtccatcacgcggtgtctgtttctgaattgagggtacgagggagcaataatggagcagccatggagatttcacccaacaacaacaacaaagaaaaaagaaataaaaagaggagatgaataagaatggtttacctatcacattccaacttccctttcattatcaacattccaacttccttttcattatcaacattccaactccttgccctgtgacagaggctgaaagcaggagcgatgattccgatccatcgccacccagtggagtggatgtaacatcacattttatctgcacctctcatcctccgctttgcgtggtcctactacataaacatagacacgcatgtccatgttctctgccgccatggccgccatagcagctgggcctgcttctgctgctgctgctgccaccacctaatgtgaaaggttgctagtgtgccttaaagcacaaggctttattagcttcttttttcccaggtggttacttcagagtcacagagcatttggtaataaagccgtaccgtgtatatgcatatgcatggtcatctc

SEQ ID NO: 90153 - DNA, 351 bp, Zea Mays
gcaggtaaatactatcttgtcgattcgggttatccaaatagaaaggggtaccttgcaccttataagggtcagaagtaccacattacagaatggcaaaatgcgaggcaacctattgggagcaaagaagtattcaactatgcgcactcatctctacgaaatgttattgagcgatcatttggggtgctcaaaatgaagtggagaattctattaagtctcccttcattttcgcttgagaaacaatccaagataattattgcatgtatgacattgcataacttcattagagatagtgctctacacgatagagattttgatgaagtaggagctaatagcctaagtcatgatgtacct

SEQ ID NO: 90154 - DNA, 1702 bp, Zea Mays
acggaaacaacatctgctatatctactttactccataatactatgtacgtgataaaccacggcacaaataatccggcgcggtatacctgctaaatcaaaacatataaaaataaaaaacaaacttcttttcaaaaggcctcggattatttgccttttttatcgttatttccggcagcagccagcgccataaatacgagcgccgctccctattttgcgtccaagactccaagcccgccctccctcctttgtcgccacctccgcgagcctcttccccgaggcgagaggctgctgtgacgtcccaggcagcgccacccgcgtcgccatctccaccaggcacccaccaccacgccttggccgccgggccctccatgcttggcttggcattcgctcgtcgacacaggacaggaggatatatattgccgtgctcgcccgccttcttcttttaggaatcgtacgtactcctacataagagaggacgcggacgcatcttcttcttccctcccggaacctgagggcaagggcgttgccgcccagccgtgccacccacgatcgggtgcgtagccatggccgtcgaagcgcatcgcctcctcttggcaggaggacacaggcagcagcaacagcagcagcagctcgccagcgcggggtggccttgggccggcgccgacgaagataggtgcgcgacgacggcgagaccgagccaacatcatcaccatcaacaacaacagccgcagcaggagttgaggctccacaacgcctcgtgcgtgggcgtcctggctccacgggtctcgacgatcgctgccggcggacagatgttcctgggcgacgcggcggagagcgacgtcacgttcggaggaggaggagctgcggcgcggcaggaggtgacggcagtggcgccggcgcccaagaggcggaagcgcgccgagcagcagcagacgccgccggtgttccaggtctgcgcggccgacgatgtggcggcgcagtttcagcagcatatcgtcgacgtcaaccgcctcgtgttccaacaaaccgccaacatgtgggcggcgctcacggagctgcggcggcggcaggcccgccaggtcgtggccgccgtggaggcagcggcggcgacgcggctgcgcgccagggaggaggaggtccagcggacggcgcgcatcaacggcacgctcgaggagcgggccaggagcctctacgtggaggcgcagctgtggcgtgacctggcgcgggccaacgaggccacggccaacgagctccgcgccgagctgcagcaggcgctcgacgaccagcggacgcgcggcgcacctggcgccggcgccgacgccgacgacgccgggtcgtgctgccgcgggggggaggacggcgggacgggtacgtcgttggcgaggacgtgcgcggtgtgcggcctgagcgcggccgacgtgctgctgctcccgtgccggcacctgtgcgcgtgcgcgccgtgcgccggtgcggccagggcgtgccccgcgtgcgggtgcgccaagaacggcagcgtctgcgtcaacttttcgtgatggctggttggttgtcaaaccgataggataggattgctggattagagtagtagtagtagtagtaggtttttttgggggtcttgtttatggcagcgacggttcagtgatgcggatatgagacggatgcatcttttgactttgttttccacaaaaaaaaaagaaaaaaa

SEQ ID NO: 90155 - DNA, 1147 bp, Zea Mays
atttccgtacgccgtacttccccagacacactcaaccaggggttttgctagggttctcatcctgccgccacagcgatggccgctgccgccgccggcgaggacgacgcggcgtgggagcgcgccatctccgccgccaccaagtccacctcggcgcccaagaccctcaccctcgacggcgccgtcaagtcctccacgggcggcctcccctccgccgcgctcctcgagcgcttcgccgcctccctcgaggagctctccgtcgcgggggcgcgcctctcctcgctcgcgggcctgccccgcctcccggcgctccggcgcctctccctccccgacaaccgcctctcgggggccgccgccctcgccgccgtcgccgaggcatgcggcgccacgctgcgccacctcgacctagggaacaaccggttcgcggaggtccaggagctcgcgccactcgccggggtccgggtcgagtcgctcgacctgttccagtgccccgtcaccaaggtcaaggggtacagggatgaggtcttcgcgctgattcccagcctcaagtacctcgatggcgctgacgctgagggcaacgagcgtttggagacggatgacgacgacgacgaggaggaggacgacgaggagggagaagaagggccggagggagaggaggagggcgatgaggatgatggagaggaagaagatgatgaggacggtgaaggggacgacgaagaagaaggtgatgaggaggctgaggacgaagacggcgaagctgaggatgacgagcttgacgcagacgcagaagacaaggagaacatcgaaagcaaggcaggatcttccctgccaaataagaggaaaaggaataacgaggatgatgccaatggatacaagtaaaacggtgagggaaagtagtattttcctgaacttcggaaacgttcctgtgcactgattattatttgtatgcttttcgagtcttttttttcccgcacttgtaatagactagagcatagttttttttaggcggttccacttctgaagtatcgtttggattctggaagttgtctgactctgaaaccatgagtaggatgtgtccccagcacgtatatacgctttgtttggtgtgctttgtttggtgtgacttcctgatgctactaatcgagatccc

SEQ ID NO: 90156 - DNA, 824 bp, Zea Mays
caagtccacctcggcgcccaagaccctcaccctcgacgccgtcgccgaggcatgcggcgccacgctgcgccacctcgacctagggaacaaccggttcgcggaggtccaggagctcgcgccactcgccggggtccgggtcgagtcgctcgacctgttccagtgccccgtcaccaaggtcaaggggtacagggatgaggtcttcgcgctgattcccagcctcaagtacctcgatggcgctgacgctgagggcaacgagcgtttggagacggatgacgacgacgacgaggaggaggacgacgaggagggagaagaagggccggagggagaggaggagggcgatgaggatgatggagaggaagaagatgatgaggacggtgaaggggacgacgaagaagaaggtgatgaggaggctgaggacgaagacggcgaagctgaggatgacgagcttgacgcagacgcagaagacaaggagaacatcgaaagcaaggcaggatcttccctgccaaataagaggaaaaggaataacgaggatgatgccaatggatacaagtaaaacggtgagggaaagtagtattttcctgaacttcggaaacgttcctgtgcactgattattatttgtatgcttttcgagtcttttttttcccgcacttgtaatagactagagcatagttttttttaggcggttccacttctgaagtatcgtttggattctggaagttgtctgactctgaaaccatgagtaggatgtgtccccagcacgtatatacgctttgtttggtgtgctttgtttggtgtgacttcctgatgctactaatcgagatccc

SEQ ID NO: 90157 - DNA, 1456 bp, Zea Mays
acttgggttctcggaggtgagcgtggcggacgcccggaagtcgcagttccacggttgccgcccggccgcctggtacagctggttcatggcgtacgctgcgtgggcgtgcaccgtgttgggctcgaagcacgcgccgccgggctggatggcgccgcagtcgacgcccacctgcgagcacgcgtagtccaggtccgcctgcagctccgcgtccgaagcgccgtcccgcgccacgcaccacccgcccgccttgggctgcgccggcgccgcagtacctgtacctcccccggcgttggagttggaggtcagcccggcgtcgtacgccatggtcaggtccgtgtggtacagcccgaacgagcgctccgacgtcggccccggcttgaggtcctcgtcgtacagcgcgaacaggtacgtgtccaccgacctccccggcatcagcggcgtgccggcgccggaccgcaggtgcgccaccaggttggacacgtaggccctggcgttctccaccgtggcgccgggctccccggcgtcgcccctggtcggccaccccgtctcggccaccacgatgtccacgcccccgtatccggcgcgcaccagcgccgacttcacggcgtccagctgcgcgtcgaacatgttggcgtacctgaccttggacccgccgtccacgcgcccggcgttgggctggaacaggcagaaggccagcgtctccggccgcgggtccgactggtacgcgaaccacgggtaggggttgaccatgaagggcgcgccggtcttgctcaggaatcccaggatctgctgcagctgcggcgcgacgtccgggtggaacgcgcccgcggacggcggctccgactgcgccatcacgcccatggtgttcacggtggagaaccggatccccgcggcgccgtcccccgcggccgccgccgcggcgcggaggttctgcatggccgggaggagcgcggcggccagcgcggcgtccccggactccagcacctcgttgcccacggccacggcggagatggtggtcgccgggacgaagggcagcacgttggcggccagccaccgcgacgccgcggccgggtcggcggccagcgtggggatctcgccgttggccacacccaccaccacggagatgccggaccccgccagcgcgcggatcagccccgcgtccacgccgtacagccgcaccttggagatggacgtcgacttgagcagcctcgccgtcttgtccggcgacggcaggttgtccgctacctcgccgtagttcacgccgatgtacggctgcgctcctgcacgcgcgcaatacgagacagagccagattggcagcagagcggcggcgggcttcctcgccgcggcacccatgggactcgtcacctgtcagaggccagaggatgtggtttggagaagaagattggggcaaaagggacgagctgcagcagaacgaggccaagtgtgagtggagcc

SEQ ID NO: 90158 - DNA, 717 bp, Zea Mays
atggtgtggaagcaaatgtggggaagggagagaatggagcagaaaaccattgatgtcgtggatgaccgtgtactcgggaaggcccctcgccgagacctttcaccggccgagcgccccgagctgcgccgcggcgacggcgaggtccaccctgtcgccccaggcacgcgggctggtggccagcacggagaggtacccgaggagggcctcagcctagagcgcgcgcctggcgaaggccgcgtccaccgctgccccgggcgcgccatcacggacgccgacgtgctgggcacgctcctcgtgcagaacccatctctacgcgtcctctccatgggcgccccgacgctagcgccgccgccgaagacgccgcgcgtcctctcacctgcccggccgtcgttgcacagctcgaacacgcccctgttctcctgctggtccaggatcgcctgcgcgagggaagggacgggcgtgaggacacgacaggacgccgagacgcaatgcacaattactcagggacgcgcgcacgacacagcaggatttcgtgcggcgaggtgtccttggggatgtgaatccgtgcccgaggctggcgtggtgagggcggtcatctccctgtcgccggtggtgatgcagtgcgagaggacgacggcctccatcctcgggcagaccgccatgagcgcctccaggccacgccagccgacgccgctagcccgtgtgaggcgcacctag

SEQ ID NO: 90159 - DNA, 95 bp, Zea Mays
cgctgtgaaagcgaggtgctcgatgttgtcggggagcgggctggagaaggtgtcgtaggagaggttgagggatcgggtggtgtcgtaggaggcag

SEQ ID NO: 90160 - DNA, 716 bp, Zea Mays
atgcgcggccacgctgctcctgggatccgccgccgccttgccgcgtcccggtttcgcggctacagcgccgttcgcgtcccaatggagacgtcgccagatcaccctgattacacgattaatggagaggagaaacttttctttggacaagtgaaattgctattccagttcatcccacaaatgctgtcgagaagggagaaggcaacaaacttcaaaccagactatgatattgatatccatatgaaggtcctagctatgagtgtgcaagaatccagtattcttacaggctacaaaatgaaggttcgcactattaaagtggaaaagaggatcaatgagattgtgaaccgcttgaataagacaaaggtggaacggaaacctgatttaaaggctgaaagagaggctattagtgctgctgaaaaggcagaaagaaaggcacaacttagagacaagaaacgtagggaagagatggagaggcttgacaaagagaagcaggctgatatcaggagctacaagggtctaatggtccaagagaagatgacttccaacaagcaaatcgcttctggcagcaagaccctgcaggaacttgaagaagacttcatgtgaggggtggacattataaatgccatgctgaagatttccttgaactgcttctgtcgaagacagaaggggtaccacaggcttgagatactggatctaaatgactcatgggcaggccatgg

SEQ ID NO: 90161 - DNA, 987 bp, Zea Mays
tcccctcgtggctttgtgcctttgtcgtcctctacacgacttttctccccatctcccacagccaagtccccaacccacctccacctccgcgccgaggaatccacacttgcaattgcaactacgagcccaccaaatcgagccgagccccgacggcaccaaatcgtgcggcctcggagatccagcagggtctagaagaaccaggagagacaccgtcagaagaggagggtcagcagcagccagaagaggagggccaacagcaggcaggcggtggcggcgaaatcgtcagcggctgccggggtatctgcgatgataacccggtcgaagctggtggagcagctgcgcgactaccagatccgatcccagcacaagcgtgacattatcggagctatatcgtggggcttgctgtgtagttttctgataatatcttcgtacatgatgttgtacttcaggcacttttggcttagtgctattattatctcactgggtattcttttccctgccggcctgtatattttgaggcaaagaaagctggctaagaaacgagagagaagactgttgttgcctctctctatgtaaggttgtttgtaggtttcttgttttttgcgcctattcttgtcttgatagaatccacattcttgtcttgtggcttgtctagcacacatccaactttttatacatctctgcccccccctaatacagatccttgttcttcagcgttttcctaagttttacaggagaaatgatagttttgcaagtattcaccagttgtgttgtcagctacaactttcagttttttttttatttgtttggtcgatgcgccctcagaccgaagtagcaacccgacatgtcataatacgttgggtgttgccatacctgtgtatgcagatactgattcgtacttctgatgggctatgctagttgcattcttcgctagctcatttgctaagtgagtttctggttaaaatgagcacacttgatgattttcgg

SEQ ID NO: 90162 - DNA, 432 bp, Zea Mays
ctgcgcttgccgcccttgccatctgatcacctcacattgcagtcctgccatcttcttgccggtccccaggcctgctgtgctgcctgttcacggaatcacagcacaggtcacggcttcaactgcttgaagctaagtttacatgaaagtccaatgtcttctatggagatctttaagtatgttcggcaaatggattcatatccaaatatttcaatcgtttaccggatattatttactgtgcttgtaactgttgcatcagctgagagaagcttttcaaagttgaaattgttgaagaactatttaaggtcaacaatgtctcaagaacggctcaacggattggccactttatgtattgagaagaaattattggacaaggttgatagcaacaatattatcaacgacttcgcatcaagaaatgttagaagaaatttttga

SEQ ID NO: 90163 - DNA, 160 bp, Zea Mays
taacggcatagaggtttctgattgcaaaaggttgacaacttattacagtcctgcattgtggagatacaaaatatcacttcatctaatcatctttgcttctgtgaacagaacgtacctattaacacgtggattgtattatattgccatgaagtattcagtc

SEQ ID NO: 90164 - DNA, 1504 bp, Zea Mays
ccctacaacagccgtagtcagaccatagctaagctgagagcaaagatgtcttggcggcgaaaccagctacgtgcgtttctcgttctcgccgtcatcctcctcatcaccgcagctacctaccgagccaatgcgcagccggcgcctccagcagacccaacgccagccgctgacacctgcgccgaccccagcgtggaaggggcgtgccgcaacgtcccgaaggcgctgcgcctgaagctgatcgccatcccgacgatcctcgtctccagcgtgatcggcgtgtgcctgccgctcttgtcccgctctgtgcccgcgctccgccccgaccgcaacctcttcgtcatcgtcaaggccttcgcctcaggcgtcatcctcgcgacgggctacatgcacgtgctcccggactccttcagcaacctcacctcgccgtgcctgccgcggaagccgtgggccgatttctccttcaccaccttcgtcgccatgctcgccgccctgttcacgctcatggtggactcgctcatgctcagcttctacaaccggaggaagggtggcaacacctccggccgacgcactagcggcgcggtcgccgaccacgagagcccggcgcatgagcaccactggcacagccacggccatggacatggacatggacatgctgggggcatcgtggtggctgacaagcccgaggacgatgaggccagccaggtgcagctccgccggaaccgcgttgtcgttcaggtcctggagatgggcatcgtcgtgcactcggtggtgatcgggctgggcatgggagcgtcgcagaacgtgtgcaccatccggccgctggtgacggcgatgtgcttccaccagctcttcgagggcatgggactcggcggctgcatcctgcaggcggagtacggcgcgaagatgaaggcggggctggtgttcttcttctccacgacgacgccgttcgggatcgcgctggggctggcgctcaccaaggtgtacagggagaacagccccacggcgctcatcgtggtgggcctgctcaacgcggcctcggcggggctgctccactacatggcgctcgtggagctcctggccgccgacttcatggggcccaagctgcagagcagcgtcaggctccagctcctctgcttcctcgccgtcctcctcggcgccggcggcatgtccatcatggccaagtgggcgtgatcgtattcgtatctgagacgacatgacacagtactgttacaccaacactgcctgcagtctagctatctgcaagactgcatcgctgcatgcatgttcctcctatagctggctgttgtatcatttcgcgtgcttcgttgctccgtgcgcttccgtgtcgccatcaggaagctaggtatatattagacgcagatagcgttgttgtcatgactattcaacgtccacggtacaatacaaaagtagtactctatctatgtattaactatgttcttaaatatttgtcgtggtaaataaaaaaacaatataaatagtactc

SEQ ID NO: 90165 - DNA, 2887 bp, Zea Mays
gcatacagtcaacctaacacacccgagcatatcacagtgacagacacgatggtgagcgccagaattgttgtcctcctcgccaccctcctatgcgctgccgccgcagtcgcgtcgtcctgggaggacgacaaccaccaccaccacgggggccacaagtccgggcaatgcgtgcggcggtgcgaggaccggccctggcaccagcgcccccggtgcctggagcagtgcagggaggaggagcgggagaagcggcaagagcggagcaggcacgaggccgacgaccgcagcggcgagggctcgtcggaggatgagcgagagcaggagaaggagaaacagaaggaccggcggccgtacgtgttcgaccggcgcagctttcgtcgcgtggtccggagcgagcaggggtccctgagggtgctccggcccttcgacgaggtgtccaggctcctccgcggcatccgggactaccgcgtggcggtcctggaggcgaacccgcgctcgttcgtggtgcccagccacaccgacgcgcactgcatctgctacgtggcggaaggcgagggagtggtgacgacgatcgagaacggcgagaggcggtcatacaccatcaagcaaggccacgtcttcgtggcgccggccggggcggtcacctacctgggccaacaccgacggccggaagaaactggtcatcgccaagatcctccataccatctccgtgcctggcgagttccagttcttcttcggccccggcgggaggaacccggaatcgttcctgtcgagcttcagcaagagcatccagagagctgcatacaagacctcgagcgaccgtctggagaggctgttcgggaggcatgggcaggacaaggggatcatcgtgcgcgccacggaggagcagacccgcgagctgcggcgccacgcctcggagggcggccacggcccgcactggcccctgccgccgttcggcgagtcgcgcggcccctacagcctcctggaccagcggcccagcatcgccaaccagcacgggcagctctacgaggccgacgcgcgcagcttccacgacctcgccgagcacgacgtcagcgtctccttcgccaacatcaccgcggggtccatgagcgcgccattgttcaacacccgttcgttcaagatcgcctacgtgccgaacggcaagggctacgccgagatcgtgtgcccgcaccgccagtcgcagggcggcgagagcgagcgcgagcgcgacaagggcaggaggagcgaagaagaagaagaagaatcgtctgaggagcaggaggaggccgggcaggggtaccacaccatccgggcgcggctgtcaccgggcacggcgttcgtggtgcccgcgggccacccgttcgtcgcggtggcgtcccgggacagcaacctccagatcgtgtgcttcgaggtccacgccgacaggaacgagaaggtgttcctggccggcgccgacaacgtgctgcagaagctcgaccgggtcgccaaggcgctgtcattcgcctccaaggcggaggaggtggacgaggtgctcggctcgcggcgcgagaaggggttccttcctggccccaaggagagcggcggccacgaggagcgggagcaagaggaggaggaggaacgcgaagaacgccacggcggccgtggggagagggaacgccacggacgtgaggagcgggagaaagaggaggaggaacgcgaaggacgccacggccgcgggcgccgcgaggaggtggcggagacgctcatgaggatggttaccgccaggatgtgaggccgccgcgctcgccaaaacgagcaagaagcaacaagagggtggcgcgcgaccgacgtgcgtacgtagcatgagcctgagtggagacgttggacgtgtatgtatatacctctctgcgtgttaactatgtacgtaagcggcaggcagtgcaataagtgtggctctgtagtatgtacgtgcggatacgatgctgtatgctactgaggcaagtcccataaataaataatgacacgtgcgtgttctataatctcttcgcttcttcagtgtccccttgcggagtttggcatccattgatgccgttacactgagaacataacggacacagtagacgaaccacttgagttcttgtatgaaattctgacccttttttttgaaggatcaggagggggaaacccctactggcctggtccttttacaatcaataaaaagaaaagaaaaagaaagaaaaaggaagagctatttctatatttgccacaaatttagccagttcgggattgaggtgtcgaattctccccgtgctctgtgaatgattagtcgcaattctctactaaattcctgagtacagcggagcacggagggatctctgtttgaaaacaaccactcgtttcggcttttccagatgctccaagtcataagaatagtgatctccatagagaagggaacgttgagctggtgtttgaggttcacagatgcctcttcagggttggaaattctgggtggggtaatgccaattgagttccagcaggctttcgcgaagttgcatctgaggaaaagatgataaagggtctcctctctttgccaaaggcagttttcgcaagagtaggaatctagctccatgtttctccttctcaacatatttctggtgtttagcctgttcttaagccacagccaatagaagactctatgcttaggctgacacttacttttccaaactagtttgtagataggatgagtttgcatctggcccatgaaagatctgtaagctttttgggacgagaatttgtccgatccccaaatgtacttcaagcggtcatgaacatcattaagaataatttgctcccaagaccccttgagcaccagaaattgatcaaacgcttgatcagagacaggtaaatgaaa

SEQ ID NO: 90166 - DNA, 1972 bp, Zea Mays
agtcaacctaacacacccgagcatatcacagtgacagacacgatggtgagcgccagaattgttgtcctcctcgccaccctcctatgcgctgccgccgcagtcgcgtcgtcctgggaggacgacaaccaccaccaccacgggggccacaagtccgggcaatgcgtgcggcggtgcgaggaccggccctggcaccagcgcccccggtgcctggagcagtgcagggaggaggagcgggagaagcggcaagagcggagcaggcacgaggccgacgaccgcagcggcgagggctcgtcggaggatgagcgagagcaggagaaggagaaacagaaggaccggcggccgtacgtgttcgaccggcgcagctttcgtcgcgtggtccggagcgagcaggggtccctgagggtgctccggcccttcgacgaggtgtccaggctcctccgcggcatccgggactaccgcgtggcggtcctggaggcgaacccgcgctcgttcgtggtgcccagccacaccgacgcgcactgcatctgctacgtggcggaaggcgagggagtggtgacgacgatcgagaacggcgagaggcggtcatacaccatcaagcaaggccacgtcttcgtggcgccggccggggcggtcacctacctgggccaacaccgacggccggaagaaactggtcatcgccaagatcctccataccatctccgtgcctggcgagttccagttcttcttcggccccggcgggaggaacccggaatcgttcctgtcgagcttcagcaagagcatccagagagctgcatacaagacctcgagcgaccgtctggagaggctgttcgggaggcatgggcaggacaaggggatcatcgtgcgcgccacggaggagcagacccgcgagctgcggcgccacgcctcggagggcggccacggcccgcactggcccctgccgccgttcggcgagtcgcgcggcccctacagcctcctggaccagcggcccagcatcgccaaccagcacgggcagctctacgaggccgacgcgcgcagcttccacgacctcgccgagcacgacgtcagcgtctccttcgccaacatcaccgcggggtccatgagcgcgccattgttcaacacccgttcgttcaagatcgcctacgtgccgaacggcaagggctacgccgagatcgtgtgcccgcaccgccagtcgcagggcggcgagagcgagcgcgagcgcgacaagggcaggaggagcgaagaagaagaagaagaatcgtctgaggagcaggaggaggccgggcaggggtaccacaccatccgggcgcggctgtcaccgggcacggcgttcgtggtgcccgcgggccacccgttcgtcgcggtggcgtcccgggacagcaacctccagatcgtgtgcttcgaggtccacgccgacaggaacgagaaggtgttcctggccggcgccgacaacgtgctgcagaagctcgaccgggtcgccaaggcgctgtcattcgcctccaaggcggaggaggtggacgaggtgctcggctcgcggcgcgagaaggggttccttcctggccccaaggagagcggcggccacgaggagcgggagcaagaggaggaggaggaacgcgaagaacgccacggcggccgtggggagagggaacgccacggacgtgaggagcgggagaaagaggaggaggaacgcgaaggacgccacggccgcgggcgccgcgaggaggtggcggagacgctcatgaggatggttaccgccaggatgtgaggccgccgcgctcgccaaaacgagcaagaagcaacaagagggtggcgcgcgaccgacgtgcgtacgtagcatgagcctgagtggagacgttggacgtgtatgtatatacctctctgcgtgttaactatgtacgtaagcggcaggcagtgcaataagtgtggctctgtagtatgtacgtgcggatacgatgctgtatgctactgaggcaag

SEQ ID NO: 90167 - DNA, 561 bp, Zea Mays
atggcggcgtgtgatgggagggcggcggtgacgacagatgtagatggggccacggttgcggacggggccgagctgacggcggcgcggcagcggacaggggcgaggcggtggcgtggtggcgggcggacgggggagcgccttcggccgcggatggcggcgttgtggtggacggacgggcccgcggcggcggatgtggatgggcccccggcggcggcgacggacgggaggccgggattaggtatgcagattagggttcaacaggttattaaacctcgtcctgatgttctttctgttaatagttgtgtgcttgagatggcgcagaagatcgatgttgccgacaaggcaatctcaatcatgcaggagtctgctaagcgtgtcctaaagttggatgctgccaataaggttgatgtggaggatgatttcagctcggtgtctagtttcacttggccacaatctccgcgtgaaccacaccctgacgacttcatgtccattgaagagcactttgaaaaatccgagggcgttgaatacgactcggaccagatgcctagttactcggactag

SEQ ID NO: 90168 - DNA, 612 bp, Zea Mays
atgagcccatggcgcggccctcgttgcattacatcaggacaccaaaagcaagaaccaaactcctttttttcttctccttcttctttctcccgtagtaaatcgggacacgcagatggttatgattcaacaaaactagctgtgcaaatgttcctagcaacaatctcacgctcggaaagcattgatctcctcgagtatctattctgcacgctgaagacggcacggcgtaggagttgggggcgtcaatggcatgcaggacagcagcagcaagagtccaggcgccaggtgcacagaaacgcatggcgaaaggagtcacatctgctagctaccaaacattccgatttccgaccgatggaactgaaccttgggagaaacgaacccccagtcagtcagtcagtcggtcgtcagaaggcctgccctgccactcatcaggtagcgaggaatgtctgtctgcaactcttggctggctgctggccccgtcctccccgtcgagacgatgaccggtcagtagaagtttatgtccatgtaactgcgtggataagtctggtacggtggcagctcgtccagccccaggagagacgcggaacgagtgatgccgccgaagtgagcagctga

SEQ ID NO: 90169 - DNA, 101 bp, Zea Mays
cgttttgtgctttactagattattatatagatactccctccagtgcagtaaaggtagtcgtttaggacatgattgtgcataccaaggagtgattaattatc

SEQ ID NO: 90170 - DNA, 357 bp, Zea Mays
ccatggagaggagaggatttcacactgatgcaagcgctcatcaaggcagatttctggattctgtttttctctcttctgctgggctctggatctggtctcaccgtgattgataatcttgggcaaatgagccagtcattgggttatgaggaaactcacatctctgtgtcaatgattagcatctggaactttcttggacgcatcggtggagggtacttctcagagatcattttcaaagactatgtgtatccaaggacaatcgcgctaggaatagcccaagtcctgatggcgatcgggcacttcaacttcgcgatggcgtggcccgggacaatgtacatcggcacactgctcgtgggggta

SEQ ID NO: 90171 - DNA, 1342 bp, Zea Mays
caatcttggcgccgaggtggctccactatggcgtgactgcgtgagcatagctccactatagagttaaagtactatttagaagtataagataacttataaatatcattatagagaagatgattttgagaatacggtaagagaagtctgttaaaaagagtgttataataggggaaaaaaactcccctcgctccttcaccggcgcttcctcccgagctgcctccgctccgccgccagctgtcccctccccagcgcgtcatccgtctgcacgccaccgcctatccactcgcctgcacatcgccgccctagcagagacgtctgcacatcggcgcctggaggacgagaagcgaggaagaagacccacactctcctggaaaacgcatcacaagacttcagcctccctttccggccggagatccgactcgcgtctccgcgacagatccgggcaaacggcggctgatgcagttcttcggcggttcgtcgctgacgtcgatcgcgccggaggcgaccccagccccggcggcgccccccggcacgggcacgggcgccagcgcgcaggtcctctacgtcttcaaccgtaacggcgtctgcctgctctaccgcgagtggcatcgcccgctccgcacgctcgatcccacccaggaccacaagctcatgttcggactcctcttctcccttcgctccttcaccgccaagatcgacccaaccacggctgaaaagggaaatcttggagtgccactgctgccaggccaaggttgctcgttttatagcttcaagacaaacacatacaaactgaacttcatggagagcccttctggtataaagcttatattaattacacatccaaggactggtgatcagcgagactcgctaaagcatatatacaatctatatgtggaatatgttgtaaaaaatcctctgtatgctcctggaacaccaatcaagtgtgaacttttcaataaacatctcgatcaatacgtgaaaacattaatttgatgccattgagctagcttttgaaaggtgcaggcttttgacttctgggagcttaaacctttttggacctcctaaaagctagcagtccaaaagtggctagaagctgaaacatgtcggcggtgtattctattttttagtactctgtcagagagccatgaagagtgaaacataagtatttgctatgttaagagtcttggttacctgttaggtaacaaatcagttttctttgctcgattccttgaatttataatgcggtcttcatctctactatataaaacaccagtttttcaggttttcacgtatacatggccgctcaacgtaaccttcccattttataaaaaataaaataaaa

SEQ ID NO: 90172 - DNA, 1651 bp, Zea Mays
gattttgagaatacggtaagagaagtctgttaaaaagagtgttataataggggaaaaaaactcccctcgctccttcaccggcgcttcctcccgagctgcctccgctccgccgccagctgtcccctccccagcgcgtcatccgtctgcacgccaccgcctatccactcgcctgcacatcgccgccctagcagagacgtctgcacatcggcgcctggaggacgagaagcgaggaagaagacccacactctcctggaaaacgcatcacaagacttcagcctccctttccggccggagatccgactcgcgtctccgcgacagatccgggcaaacggcggctgatgcagttcttcggcggttcgtcgctgacgtcgatcgcgccggaggcgaccccagccccggcggcgccccccggcacgggcacgggcgccagcgcgcaggtcctctacgtcttcaaccgtaacggcgtctgcctgctctaccgcgagtggcatcgcccgctccgcacgctcgatcccacccaggaccacaagctcatgttcggactcctcttctcccttcgctccttcaccgccaagatcgacccaaccacggctgaaaagggaaatcttggagtgccactgctgccaggccaaggttgctcgttttatagcttcaagacaaacacatacaaactgaacttcatggagagcccttctggtataaagcttatattaattacacatccaaggactggtgatcagcgagactcgctaaagcatatatacaatctatatgtggaatatgttgtaaaaaatcctctgtatgctcctggaacaccaatcaagtgtgaacttttcaataaacatctcgatcaatacgtgaaaacattaatttgatgccattgaggtatcttctatcactggcgtttcttacaacgcctcaaatagttctttgaatgctcaacaatctgttgtgctgtacagcgctgcatatgtatttttttttgcatcaatgtttggcaatctttttatatgtgattatatagttggggctctttgttcgttcccatttgtttcgtgtgaaccttgtgtaaagaaattctattgagttgacaaaaaatcccggctaaaaatatttcagatgcttttattatgtttatctgatctgacctattatcatctggaaactgagttttaaatgtctgtatcatcagaatgttgatagctttacttgctcctaaggatctgtcagtaacataggacatgtttatctgatctgaccttctggccattttttttttttgcacagctagcttttgaaaggtgcaggcttttgacttctgggagcttaaacctttttggacctcctaaaagctagcagtccaaaagtggctagaagctgaaacatgtcggcggtgtattctattttttagtactctgtcagagagccatgaagagtgaaacataagtatttgctatgttaagagtcttggttacctgttaggtaacaaatcagttttctttgctcgattccttgaatttataatgcggtcttcatctctactatataaaacaccagtttttcaggttttcacgtatacatggccgctcaacgtaaccttcccattttataaaaaataaaataaaattatgcacaagtggtcatttgaacc

SEQ ID NO: 90173 - DNA, 1184 bp, Zea Mays
atcaagtttggcagcgtaaatcggatccagtgcattatttgcgtatagcactcctatttaggatttagcagacgagcgtatacatgccatgccagcaagacaaagctacgactcgctatccgtttttccttgccaaactcgtggaagctcggcgagaaaactgtagcacgcaaatgttgaattcttcacactaccacagctatatatagacatcatcactactcagcagcaagacagttggagggggtaattcggagcagctagcagacagacagacgaaatggcttccgtcctccaccacctcttcccgctcgtcgtcgtcctcctcctcgcggccgctgccgacgcggccaccttcaccgtgaccaacaactgcccgtacaccgtgtgggcggccgccgtgccgggcggcgggcagcagctggacaacgggcagacgtggagcatcgacgtgccggcgggcacgacgggcgggcgcgtgtgggcgcgcacgggctgctccttcgacggcagcggcaacgggcagtgccagacgggcgactgcggcggcgtgctgcagtgcgcgcagtacgggcaggcgcccaacacgctggccgagttcgggctcaacaagttcgacggcctcgacttcttcgacatctccctggtggacggcttcaacgtgcccatggacttcctgcccgccggcgacggctccgggtgccccaagggcgggccgcgctgcgacgccgacgtcacgtcgcagtgccccgccgcgctgcaggcccccggcggatgcgacaacccctgcaccgtgttcaagacggaccagtactgctgcaccggctcggcgacggacaactgcgggcccaccgactactccaagttcttcaaggggctctgcccggacgcctacagctatcccaaggacgacgccaccagcacctacacttgccccggcggcaccaactacaacgtcgtcttctgcccatgagctccatcgagctgctcaaacatacgtacctatatagttgatccaggagacacgtacgtgagaaacaaataaactaaactagcacacaaatgatgaaatgaataagttattatgaataacttgtgcaagaacacattacattattgttcttctagcttcaaggttgggaattgaattatgtgaaataatggtatcagatacgttgtgtacc

SEQ ID NO: 90174 - DNA, 1370 bp, Zea Mays
tggaaagctccaaccgcccgccgtgcgagcaaccaccgccaccaccacacccgcaagcgcaaggcgatctctgaaccgagctaaggaacgcggagcagagcaccgtcaccgccagggccaccaccttcccggcgaccaggccgacgaggacgatggcgaccagaactagagcaggagaccggatccctgcctgctcctcctcctcctcctcgattagcttcttggagctggcgagcagcttcttccaggacttcttcttcgccttcggcctcaggttgcttgattcgtccaggacgccgccgctttcttcgacgagcagcatgcggccgtcgctttccctgtcggaatccgagcagcagctcggccgcgacggctcggtcgccgcgtcaacctcccggatcggcgagacgcgcccgcggccgtccagggcaagccgcctctcggtcaccaccgcccggggccgccgcctggggagcgaggacgacctcacggactcgagcaggtagagtgagaaggaggccacggtaacggccgcaaccaccttgctccagatcacgaggagtgcgagggacgccaccacgccgctgaccgccaggaagcccaggcccaggcccaggcccgggccaaagccactgcctttgccgcggcgtgggggctgggccggcggaaggtcgggcctgggccgatccgacggtgagactgcgtcggcggtcgtcggtggaggcggagactcagccggcgggaacagcgatggcgaggtgggggtggatggggaaggcaaaggcgaaggcgaaggcgaagcggcggcgccgcgcttggaggacggggagggatgcttcttgaggcgaccatggttcttgacgacgaggtcggcgagagaggtgggaaagccggtctggacggggaggggcccggcgcgggaggggcggagcgcggcgaggaggcggataagacggccggatgggcgttccttcggcaggactgagcgtcggcggcccttcccgtcgccggcgacggcgagcataggaggacgccggcgcgcgggccgggggtgttggcttttcggtgcggtttggtgctctctctctgggttcgttgccttgggtagccaagttgtatccgcactacgcagtccgtttttgccatttgggacgtgcagagaccgtgggagagtaggaaggagcacgtcgcgcgagcgcgagcgcgagtgggtttttattttctttccaacttttctttgtttcattattactttccttttttttattcggacaacaaatattcaaaaatagacgaagcacatactaacacaatatccgtgtatataaattatttgataatacattgtgatgatatataaaataacaaga

SEQ ID NO: 90175 - DNA, 1417 bp, Zea Mays
gacccttttttatcactcgctcgctccctcctcgtcctctgccctgctcgcccacgcacctcctctctctcccctcctgcgctagcactactactgctaccagcgagtgcacgacacacacatcctcctccccccttcgtctctctctccctctctctctctgcctgcgcgcctgagagctgccaccgccaaggcgaaacggccgtcgccgcatgctgcggctgagctagagacgagaggcgagatggcggccgaggcgctggggttcatggcgcggggagccaccggcgggagggcggcggagctcgtcaccagggacttcctcggcgggtgcgccgccgccgaagacgacgccagggacgcgtccgccaggaatgacgccgtgcccgcgagggtgcaccagcagaagcacgcgtgcccggcggcgccgagggacctgaacctgttcccggtagccgccaccacgaagccctgcgccgcgacggcggcagcggcagcggcaccagcggtcgcgggcggcgccacggctacgtaccacagcgtgtgcacgatcgagaaggtgaagacggccctggagcggttcgagcgcggcaggcagcaccagtccccgcacccgcaccagcagcagcagcacagcggcgcgggcgcgtccccgtcgtcgtcttccgtgaccacgtcctccgtgaagcgccgcggcggcggcggcggcggcggcggcggcgtggagcagggcgacggctgcgactcgccctccggcggcgggatggtggccgcggcgtgccccaggtgcttcctgtacgtgctaatctcccggagcgacccgcggtgcccgcgctgcgagtcccacgtcccgggccccgccggcgccagcgccggccgcgagcaagaagccgcggatcgacctcaacgtcggctacctgggcacatagcttgtggtttaggcatatggggcgatggcgtagcctcctagatggagcggctgccgtctcctaccgtaccgtacgtgacgccataaattttgcttaggctcgtgtaatgtgatgacccacggaccgagtcgggtacgtaggagtacgtagacaggggaggggggcgccgttttttgaactgaaacagaaatgcatgccctcccctgtcaggaaatttatggccgatcagacaccgcatacaagaacatgaatgaatggtgacactgctttctgttcctgctcctgtagaaccagacaatcccgcagccacaattggtcaaagctgctatacttgtcgatctagcatgttcgagctccgtggtggtggtggtggtggagatgtttgcaaattgtaagcttggatgtgccgccgccgccgccgccgccgccgccgtcccatgggcgcatggcctagtgtccctagtcgccgtcggtcgcagcggtgccaa

SEQ ID NO: 90176 - DNA, 339 bp, Zea Mays
cagcagctagcgatggtgtcgtggaagaagaagcgcggcggcggcggggagtcgcagtcgcccatccggggcgcggccgagcaggagaaggtcccgagagggcacgtcccgatgctggccgccggcgaggacgacgacgcggtagacgtcggcgagcgggtgctggggccggtgacgcttctcagcgacccttccgtcgcggagctgctggacatggcggcgcagcggtacgggtacggccagccgggcgtgctgcgggtgccctgcgacgcgggccgcttccgccaggtcctccacggcgccatgcaccgacgcggcatcatcagctcgtcagcctga

SEQ ID NO: 90177 - DNA, 621 bp, Zea Mays
acattccctagctgctagctccactccccaccagctctatgccgcagtgtgcgcaagcgcaagcaaacccagagccccacctgccgctgtgccgccactccgggtaaccgcgcgtggggatgaggcagctggcgcggcggctcactcgcgtcgcggactcctcagcgtccccggcggaggagcggcggggcgtcgagaaggctccgcaagcggcggcagtgcccgagggccacgtgccggtgcacgtcggggagcggtcggacggcgaggcggagcgcttcctcgtgcgggctgagctgctgggccgcccggcgctggcccacctcctgggccgtgctgcccaagagtacgggtacggccaccagggcccgctcaggatcccgtgctcccccgccgccttccgccgggcgctcgcggccctcgagccttgacagcgccgctgccgcagtgccgcctgccgccgagccgacgggcaagctatttgggctcccttctttctacttgtgttgtatttgtcacctataaaatacgtcctaaacaggaggcgtacgtatgtatgatcaaaacaattcaacgaacctggtacctattagaataatagaaatatagaatgagttatta

SEQ ID NO: 90178 - DNA, 1970 bp, Zea Mays
aaaacaatttcaaacctcgcgtcggccgccgagcccatttcaaacccggacgccccctccccaagcgcaccgaggaagcagcaaggccagcggtggtccctttcccctccactgcagtctccagagtctagagacctccaccgtccactccaaagacgagcagcgggcaaacccaagcacccgcccaatccggttcgccttccttctcaccccgcccggactctgcggagagatctggcagcggtggctatgccattgggcgacgacgcggcggcggacttcgcgctgccggacgagctcctggcggcgctgccgcgggacccctacgagcagctggatctggcgcgccgcatcaccgcgctggcggtggcggggcgggtgtccgggctggagcgggaggcggggcgcctgcgcgcggaggccgcggggaaggaccgcgagagcgccgagctccgggagcgggtggcgctgctcgacgccgcgcttcaggagaccaacgccaggctccgcgccgcgctcgaggacaatattaagctcagcaaggagcgggactcgctggcgcagacgtccaagaagctggcacgcgacctgcacaagctggagtcattcaagaggcatctgatgcagtcattgcgtgatgatagttcatcaacacaggaaacagttgacattacaacgtgtgatcagccagtagcatcgaaagcatcatccagtgcaggttatagatatggtggatctgtcagcaaccctgcaacgaatatatttactgagtcattggatgtgggaagcacaaaccgagatggtactgcagcaaggcctccgatccagaaatactctctcacaacacacatcactccccgccttaccccagaggccactcctaaaataatgtccacttctgcttctccaaggcgaatgtctaccacaggaacacccaagttgatgtctggttctacgtcaccgtcaaaaactcgaatcgaagctcacatgtcaatgacaccatggtatccatcaagcaagcaatcctcggcggcaaactcgcctccacgaggacgttcaaacccaggtcgcactcctcgaatcgatggaaaggagttctttcgtcaggccaggagtcgtctatcctacgagcaatttggagcattcttagccaacatcaaagagctcaatgcccataagcagtcacgtgaggaaactctcaagaaagccgaagagatctttggtccagacaataaagatctgtacctgtctttccaaggcctgctgaaccgtagcatggtggcataaggcttcacatgtcgcttcgcaagtccaatggagttccctcttcccgcaacgctaataggatacgcaagttgttgctggcttttgcagataatgaggttgctgcattggcaactttatctagctgtggatctgaaggcccagctgcaagttttggccccgtaataatccacatcgctggaacgagcggatctctctgaacgactgagtgggcaaaccagcagtgttgcttctgtaaaagtggtgtgtgtacttgccgaaagcggacgacaaattcattgcctaaatcagggtgcagtctgtcatggagcgcgtccttgtaaaaccgtgaaaaaggtaaacatgagagtaaaaatcttcatttcgtcgccaacaaagaaggtaacctcaggttaacctctatcgttttgctctggttgtacagcgttcttttctctggttttttttgcagtgcagtaaaagctggcacataacataattccgaaagcttggacaaacataggtaaaaggtacctgcatttccatagcagagtccacaccaatatccgtgacaatcaatgttccagcttcccatggaaaggacagcgcccttctacgtacgctcaccagtcaccaccttcctcctagtgccacgctgttacagcgcgcgcgcaccatatacctgataccacatatatatacacaca

SEQ ID NO: 90179 - DNA, 1961 bp, Zea Mays
aaaacaatttcaaacctcgcgtcggccgccgagcccatttcaaacccggacgccccctccccaagcgcaccgaggaagcagcaaggccagcggtggtccctttcccctccactgcagtctccagagtctagagacctccaccgtccactccaaagacgagcagcgggcaaacccaagcacccgcccaatccggttcgccttccttctcaccccgcccggactctgcggagagatctggcagcggtggctatgccattgggcgacgacgcggcggcggacttcgcgctgccggacgagctcctggcggcgctgccgcgggacccctacgagcagctggatctggcgcgccgcatcaccgcgctggcggtggcggggcgggtgtccgggctggagcgggaggcggggcgcctgcgcgcggaggccgcggggaaggaccgcgagagcgccgagctccgggagcgggtggcgctgctcgacgccgcgcttcaggagaccaacgccaggctccgcgccgcgctcgaggacaatattaagctcagcaaggagcgggactcgctggcgcagacgtccaagaagctggcacgcgacctgcacaagctggagtcattcaagaggcatctgatgcagtcattgcgtgatgatagttcatcaacacaggaaacagttgacattacaacgtgtgatcagccagtagcatcgaaagcatcatccagtgcagatggtggatctgtcagcaaccctgcaacgaatatatttactgagtcattggatgtgggaagcacaaaccgagatggtactgcagcaaggcctccgatccagaaatactctctcacaacacacatcactccccgccttaccccagaggccactcctaaaataatgtccacttctgcttctccaaggcgaatgtctaccacaggaacacccaagttgatgtctggttctacgtcaccgtcaaaaactcgaatcgaagctcacatgtcaatgacaccatggtatccatcaagcaagcaatcctcggcggcaaactcgcctccacgaggacgttcaaacccaggtcgcactcctcgaatcgatggaaaggagttctttcgtcaggccaggagtcgtctatcctacgagcaatttggagcattcttagccaacatcaaagagctcaatgcccataagcagtcacgtgaggaaactctcaagaaagccgaagagatctttggtccagacaataaagatctgtacctgtctttccaaggcctgctgaaccgtagcatggtggcataaggcttcacatgtcgcttcgcaagtccaatggagttccctcttcccgcaacgctaataggatacgcaagttgttgctggcttttgcagataatgaggttgctgcattggcaactttatctagctgtggatctgaaggcccagctgcaagttttggccccgtaataatccacatcgctggaacgagcggatctctctgaacgactgagtgggcaaaccagcagtgttgcttctgtaaaagtggtgtgtgtacttgccgaaagcggacgacaaattcattgcctaaatcagggtgcagtctgtcatggagcgcgtccttgtaaaaccgtgaaaaaggtaaacatgagagtaaaaatcttcatttcgtcgccaacaaagaaggtaacctcaggttaacctctatcgttttgctctggttgtacagcgttcttttctctggttttttttgcagtgcagtaaaagctggcacataacataattccgaaagcttggacaaacataggtaaaaggtacctgcatttccatagcagagtccacaccaatatccgtgacaatcaatgttccagcttcccatggaaaggacagcgcccttctacgtacgctcaccagtcaccaccttcctcctagtgccacgctgttacagcgcgcgcgcaccatatacctgataccacatatatatacacaca

SEQ ID NO: 90180 - DNA, 1836 bp, Zea Mays
atgggcgaacccacggccgtgccagggaggatattatcatcttcaatgcccacagcggcgaaggagttcagccaagctgtatactggatgaaggatgatccacatgtatctggacatcctaatacaccttgccatactgatcggaaacttatatttataaattgtgaaaatatgcagatgaaagagcatccatacctcagaacacaactgtgctggcggaaagtcacagaagaattttctgtgccttgcaagtcagtggttactgactcaagctcaaagtcatgttcttccacggtagtgcaagatgaagatgctgcaattgctgcagtgattgatgccgctgaactcaaatcggaacaactcccgtctaaaaaaggacaaggcagtggaaggtttacgtcaggacgtaactatgggtcattggaaggggaggcacctccaccaggctatgtctgtcgctcttgcggtgttccaggccatttcattcaacactgctcacaggaaaacaagatacctccacctggatacatttgctacagatgccgaattccagggcattttatccatcgttgcccaagcattggtgatcccaagtgcgacaacaataaaatgctttgttctcttgtcccagtagttacacctgtcaatggcattttggattcacttgtcccggcttcccccgttagtgctgttgatgacttgccagcagagctccactgcaggctatgtaaaaaagtgatgagagatgcagtattgacaagcaaatgctgttttgatagtttttgtgatagatgcattcgggattatattattacagagtcgaagtgcatttgtggagtcaagacactagcagatgacctcattcccaatcaaacacttcggagcacaatcagcaatatgttgggaacacagactatcagtggtggaagtggtacaacaagacacagaagttcgtcaggcagcaaccctgaccccaaaatacagagccacactgcctcgacaagggaggtgaagcaatctagagaccaccagctaccagcagcatctgcacttgatgatgtgctccaggttgccacagaaggtgctctagtgaaccagcctcgggagaaattggtacccagtgctaaaatccttggtaaagatggaggcaattttgcacaagtgtcagcagagaagactgtagcaaatgctgaagccctcaaagtaaaggatggaactgaatcgacttcaaaggccaccactgtttcaggggcccgagaacacaatgtcacaaggacagatcaaccgaagaagtggaagaaggcagtcttaaccaagaactttcaacctaacaatgttggatatggttacaatgttccatttgaccctgcatattgcaatcccttcatcaatggatatccttgggcaactgaaccttacatgcctgaaactgagcccatgcatcgtgggggcactgcagctgcaccttcaaagcgccctgagaggagtgacaggcccaaggacactcgtcatcagccccaatcacgagagcacgagcgacaattgggctcttctcatgtctcagaatcgagaacgaggaacagaacaaggtcaagctccgagggaagggaccgtgggcattccgacagggcctctgttgaccaccatgaggaccactctactaggaagcggacgcgcgattcctctccgaagtacggtgatagacagagcgaccggaggtcgagtcacggttccaggagtatgatgactcctgaggaggatgcaagcgacgatgaatgtaatttcaagaggagatggggtcgcagatcatcaggaggcgtggacacaaggcactga

SEQ ID NO: 90181 - DNA, 549 bp, Zea Mays
atggcgacgctgcagctcaaccacatcgcgcgggagacctccgacgtggcccgactcgccgccttctacgaggccgtgctggggttcgagcgcatcccttcgcccacctactcgggcttccaggtcgcatggctccgcctcccgagctcccccgacgtcgcgctccacctcatcgagcgggaccccgccgcggcacccgtcgcggtggggcctggcgccgagggcgcgccgccgtcgcagctgccccggcgccaccacctcgccttctccgtcgctgactacgacgggttcgtgaccgggctgaaggcgcgcggcaccgatgtgttcgaaaagtcgcagccggatgggcgcacgcgccaggtcttcttcttcgaccctgacggtgagagatgccctgctcgtttttgcggtgatcaaacgaggtcgcagagtccgcatcctgtgttgccttttctcttcatcaaaattaatgaaaagacaggtccatgcttgttgcaattggctagagaattgcagctcttcaagaattcacaacttcgaaagttctga

SEQ ID NO: 90182 - DNA, 507 bp, Zea Mays
tgtcttcgacgtacttgcgtaaagtgctgttgtcagtgctgacttggttcttttagaagtctcatgcataagcacacctacagctctctgatttggttctgttgcaggcaatggcctagaggttactagcgctggtgcagggaatgagaagtgaacagagaccatgatttgcagtctacttctattttatcgtgcaatacctcagcaaaccctgcctacatgatgcgatcgaaaccggagacgttcctgggtcaagcttcgttccgtaaaataaataaatccgaagcacttcaaagctctacatactcgcccttgcttgtttgagacaagggcttgcgttcttgctgcatctcatccgagatgattgtaatccgaacaatgtgtagttaataaaaatgtcgctttgccctgaaaatgttttacgctgtaacatcgctctgtacgtgattggatttcctacatgacaactggctaatggagtctaaataatttccttgtcattcactc

SEQ ID NO: 90183 - DNA, 1380 bp, Zea Mays
aaggctccaaagtactgatgagtgcatgtatgcagactaatcacctagtagataggataggaaatggctatggattacgtattagttgctgtgctgtttgtgactttattgctagcaaccttgctgatccgcttggtcttggcatgggggctcggcgagcgtttcgatcaaaggctaccgccgggatcgaggggcttaccgctcgtcggagagacgctggagttcttcaccgcgtcaccgaccctcgagctgttgcccttcttcaagcgacgtttggagagtggatcctgcagatacgggccgatcttccggacgagcgtcgtcggcgaggacctgatcgtgtcgctggacccggagctgagcaggcgcgcgctgcaggaggaggagcgggccttccagatatggtacccgccgtccttcctgcgcgtcctgggcgccgacagcaccgtcagcgcgctgggccctctccaccgccacatcagggcgctcgtgctccgcctcttcggccccgagagcctccgcctggtgctgctgcgggacgtaccgcggagcgcgcgcgccgagctgcggtcctggctccggcggccgggcccgggcgtcgaggtccgggcggccacctcaaggatgatatttggcgtcacggagaagaagctgatcagccacgacgtacgacgcggcggcaggagggagcctgtggaagtgcttcgacgcgtgcaccacgggcctgctggcgttcccgctccgcgttcccggcacagccttctaccgatgcatgcagggacgcaagagggtgatgggaacgctgaggcagcagctcggcgcgcgcaggagcaggaacgagccagagcacgaggtggtggatttcttcgaccttgtgatcccacgagctggacaggccggactccgagctgaacgagaacatcgcgctggacctgctgttcctgatgctcttcgctagccacgagaccacgtccatcggcctcaccgcgatcctcaagttccctgacagacagccccgaagcattgcaggaactaacggaagagcacgagaacatccagaaaagaagggcggatccagactcggacgacgaagtcacatgggaggagtacaagtctatgaagttcacgtctcatgatcgtactgtcgaatcagctggcggctcaaggatttcatggcctggtctgcggctatgcgttggtgccgactttgccaagctgcagatggctatcttcctccattatattgtttagtcaccaagtacagatggagagcgattagcggagggcacaatgatgttctacccaggactagggtttccagacggttttcatatcaagcttcttcccaaagattgaagtgtgataactgacaatgcgttg

SEQ ID NO: 90184 - DNA, 913 bp, Zea Mays
attgtacacctaatagataggtcgacgacgacgatttatgcgtgtcctagatataacgttaattccttggcacacactaaaaaaactgtagtgatggatcgagagggagcggaggaggagagagaaacaaaagggaggaggaggacgacgacgaggcggcggcggaggccggcaacggcagacagctggtgatgcccgaggacgggtacgagtggaagaagtacggccagaagttcatcaagaacatccagaaaatgaggagctacttccggtgccggcacaggctgtgcggcgccaagaagaaggtggagtggcacccgcgcgaccccggcggcgacctccgcatcgtctacgacggcgcgcaccagcacgggcccccgccgctggcggctcctcccggcggccacggccagatgcagggcggcggcgcctccgactccaacagatacgagctgtgcacccagtacttcggcggggcccggtcgcgctgacgacctggcgggccagctagctagcgtcgggggtggcatggcagctgacaagaaaggccggccggcgggcggcggcgtggcgtcccgtcgcgtcacgctcacgcccgcatcacctcctgcccctgctggctgctggcctgctgcagcaccgatcgctttcgctgcgcaccggagggcagcggcagcggcagcggctggctggtgctgccggtggcggttgacttgacgccttgcgccggcgcaaccgacgtgatgttgagtgcggattaattggtgctgcaccggtcaacgctgtggtctactactagtgtactacactattacgacgacggtgcgtacaaaaaattaaagctagctttatcagtggaataagcctaatctgtttagtcagatttaacatccaaccatttgcagattgaaaa

SEQ ID NO: 90185 - DNA, 491 bp, Zea Mays
ttaataatactaaaacgagtgtatagtctcgcattaatttattaaactagaattatccagctcccagtgcaataagcctatgataagcagaacattttacatatacatcaagcttttacagaacttgtgatctttatctgatcatttaacgatctgtgggttatcagaagcgataaccctcagttgtttcagatggaggatggatgtgcaccaccagtttacagccctgtatacttcacccaataaccgatcactctgaaagaatgaactatctgtggctccttgatgagcccagcatgtttgttgtttaggttcccttaggttaaacgctaaatcttcatgatggaatgtggttgctggaactccaagacagctatgttttctacatagttctttacttcagccaccattctgttgtacgattcagggtatttgcaaaggttcacaattttgattcagctccctggctagtgcctgcaacgtcaacatga

SEQ ID NO: 90186 - DNA, 1219 bp, Zea Mays
aattttttgtgtccggcgtcgggtatgtcaccggccgccatctcatttcaggctatcgatcggctctctgcaagtgggccctctcccgcggggcgatgaacccgaagctggtgcggcttggaaatctgagaagcgctacaagaagttggagctgctcgcctgctgcccctttcctcccccgggccccctctccgctgcgacggcgagcccaagaaaactttcctctaggagcgcatggaggtgtccgctgggctccggccgccgcccgtcgctgcggcagcgtcgctccgaggccgtcggtttgcgtcggtgccgccgctcgcggcttcccattcggtgcggtccgtgtcccgcgcggttaagaataaagcaagtgcaatctatgacctccaaaggaatagaagtaaccttgaatcgctattctgctacgacaaatctgtcccagaggagaatattggaaaaccgtccggtctagatctggaaaagaaggatgtcggggacaaccctccctgctcaagctgtgaagctaaaggcgctgtgctgtgcgcaacatgcgctggttcaggcttgtacgtcgactcgatactggagagccaagggatcatcgtgaaagtcagatgcctaggctgtggaggaactgggaacatcatgtgctccaagtgtggaggccgtgggcatacctgaatgataaaaagcttggacattgcagtgtctccgcagcaagacagtacaatcctgctagcatccttcccgagttacgttggtgggtatttggtctcatggtgacatcgtcaatcaaaaagagttacgattcttccggagaattttccttgtgctgatctagctgctgtaactgcatcgaaacatgctttagaagctattgaaccccatcccccccccccccccttttgctttttattcccctcgttttcatgcctaaaagtttaaaggacgatgcgtcaaaggattcgatgttatgttgtaatcataaaggttaatgaaatgtgaaagatacacttcgtttatgggagagattagattcaaagtgtcctgtgcagtaactgagcagaagtgtggtcacatcacatcacaaatactagtacatactccaactccattcaagaaagaatgcaattctagcagtgttatgttttggtattttaaattttaactaattatagataaaaaaagaatcaatatttataatgtgaaataaata

SEQ ID NO: 90187 - DNA, 1223 bp, Zea Mays
accacaaacgcccattgccatcaaccccagcagcagcagcagtcagcagaggcattgttacttgttagttccgaaagcacacgtacgtctcacattagctagttccagccttcgtcgtccaggacacgagaggaaaccgcagccatggccaacaaccgcacctacgaggagcatacccccgccgtcgagtggagccgctccgccgccgaggccgacgccgtcaagatctcgctcccagggttcaagagggaggacctccgcgtgctggtggacaaccacggccacctgcggacgcgcggcgagcggcacctcaccggcaacaggtggatccgcttccagaacgacttcgagcttcccgccaactgcaacgccgacggcatccgcgccaagttcgagaacgagacgctcaccatcacgctccccaagaagaccccctcgacgcccatgcagccgccgccaaggatgcccacggcggcgccgcctccgttgcagggccaggggcaggggcttccgccggcggccaggcctgccgcgccgaccccggcgccgctggctccagctgctccttccgtgaagccgcccgccgagtccagagcgtcgatgccgaggaagacgtacgatcctgtgccggcgccggcgccggaagtggaaccgcctgcaaccacaaagccccagccgtcgctgggggctgttcagaggctgaaggaggaggaggaggagaggaagagggaggaagaggggaagatggccgaggacaggaaggagatggtgcatgagaaggacacgcagcaggagcagcagccaatgctagcagagacgatggcgttggcgaacctgaagcccaggcaggcctccgcgaggcaaggcatgctggtgagcgtggcggtcgcggtggttgtgctgcttgggttcaccgtctacgtgtggcacagcctgaggaacgccacgggaggcgccggcggcgagcacggccacggacaccagctgtggaccggtagctacggcgacgagatgtgagcaagctagctcgaggtgtggcgtgagtacacagtacatctaagtggaaaggaagcaatgcaagtgtgcgtgtgtatatatagttatacacgcacacgtacatacacatatactacatacatgggaggctcagtacacgcactacatactctactcgtgttgatcgtttatcagctggcaatggcatgacggcttaatgagctttt

SEQ ID NO: 90188 - DNA, 646 bp, Zea Mays
cggccggatccagtggccagaaccctcgctggtctgcgtttcccatctcgtgattctacacttctaccgttccactctcgtgcgctcttgttttcttctctccgttgccgccctacgtcaggtgcccaattctccattttcgggcccttctccagcgacgagcacccgccaggtccgatccatctcacccggatcttctgtatctcgggttcttggcagaggattatggattggctggggcagaaacgcgcggagatgctgatgcaggtgctgctggtggcgtctgcggtggtggcgttcctggtgggctacgtgcgcgcggacttccagctcatgctgctcgtctacgccggcggcgtcgtgctcacggctctggtcaccgtccccaactggcctttctacaaccgtaacccgctcaagtggctcgacgctgccgaggccgagcgccacccgcggccccaggtcagcgccgcccccgcggcagggggtaagaagaggtccgggaagaacaagtagttggtcgatgtgtgtgttcttggtcgacctgactcaacctgtttaagatctattcgcagaactaatcaattataaaaagagatattgagatatttgacagttttcgtacttaaaaaaaggaaagaaaaca

SEQ ID NO: 90189 - DNA, 599 bp, Zea Mays
cggccggatccagtggccagaaccctcgctggtctgcgtttcccatctcgtgattctacacttctaccgttccactctcgtgcgctcttgttttcttctctccgttgccgccctacgtcaggtgcccaattctccattttcgggcccttctccagcgacgagcacccgccagaggattatggattggctggggcagaaacgcgcggagatgctgatgcaggtgctgctggtggcgtctgcggtggtggcgttcctggtgggctacgtgcgcgcggacttccagctcatgctgctcgtctacgccggcggcgtcgtgctcacggctctggtcaccgtccccaactggcctttctacaaccgtaacccgctcaagtggctcgacgctgccgaggccgagcgccacccgcggccccaggtcagcgccgcccccgcggcagggggtaagaagaggtccgggaagaacaagtagttggtcgatgtgtgtgttcttggtcgacctgactcaacctgtttaagatctattcgcagaactaatcaattataaaaagagatattgagatatttgacagttttcgtacttaaaaaaaggaaagaaaaca

SEQ ID NO: 90190 - DNA, 583 bp, Zea Mays
cggccggatccagtggccagaaccctcgctggtctgcgtttcccatctcgtgattctacacttctaccgttccactctcgtgcgctcttgttttcttctctccgttgccgccctacgtcaggtgcccaattctccattttcgggcccttctccagcgacgagcacccgccagaggattatggattggctggggcagaaacgcgcggagatgctgatgcaggtgctgctggtggcgtctgcggtggtggcgttcctggtgggctacgtgcgcgcggacttccagctcatgctgctcgtctacgccggcggcgtcgtgctcacggctctggtcaccgtccccaactggcctttctacaaccgtaacccgctcaagtggctcgacgctgccgaggccgagcgccacccgcggccccaggtcagcgccgcccccgcggcagggggtaagaagaggtccgggaagaacaagtagttggtcgatgtgtgtgttcttggtcgacctgactcaacctgtttaagatctattcgcagaactaatcaattataaaaagagatattgagatatttgacaaaaggaaagaaaaca

SEQ ID NO: 90191 - DNA, 783 bp, Zea Mays
gctgggcgcgttcttcgtggtgccgcggcggtccagaggattgcttcagctcatgcggaagacgcaggccgtccaccccattcagacgttctgggctggcgacggggccggctgggcgctggattccaaaggtaaaaaccaagtcagtctctttcgctgacccattaatctctgttgtttggcccccagctgctatggaagagctggaaggtggaaaaggtgttattttggctgatgattggaatcctggcgaccagacagcacaacagcctcagcttgctgctcctaccaagattgcaaggcatttcacgaggcctctcaataaggaacaaatggaggcaattatggagctggcaatgcagggaaaagaaaaggaagggaacaagaagaagggcagcaaggtgacacctctcaaggctcctctcatagaggttgttgcgaggacctgagttgtttttaggagatgtgtgggtaggtctggtgcagaatgttagcacaaatctgtactagtctttgggtcgcccaactgcttttgatgactactttgggtagtaggttgtgggcgaggcagtggtgttctttcttgtggcttgctctgtcggtagttcggtctgtcgtaattctggttgtgagtcgcatgatgtctccggatgtaagcgtgctgttgacgctggttggctggtcgagtcctgttttttcagctgtgttcctcatgtgtggcactttctggattagtagaggaacttcttttgattaatgaatgccaactgttgtattctgtca

SEQ ID NO: 90192 - DNA, 122 bp, Zea Mays
ttcttacttcaaatgtttacggaaacttcattcaatcattccaacaaagattatttctagctgaccccctcctcacccaaaaaaaacacaatttgcatatgctggtcaaaaataagggtccg

SEQ ID NO: 90193 - DNA, 1209 bp, Zea Mays
attttagaaaaacaaaacaattagagggggcaacgagtaaaaaaggaaaggaagaactcccttctctcctcttcgatcccgacgaacgccgagggccgcggcgatggaatactcaggcggcggtgcgacgctgtcggagatgtaccagagcgcgcggcggctgctactctcggcgcgggatggcgtgggccgcgtcgagcgccttgcctcggcacccacttcgtcctcctactcctcggcgccgctcgtcggtggtgcgtcgggggaccccgcggttgctgaggaggtgcggcgagaggtggcgcagatccaggggctgtgcgcgcagatggaccgactctggcgatccatccccgccaaaggccaacgggacctctggaagagaaaagtggagcagctctctgaagaggtagattcattgaaggaaacccttgacaggcattctctgcgacagaaaaaacggattctggaagcaaaagaaagagctgagctatttgaaagagctaacggtgaatcttcacacgtcctccgaatattcgacgacgaagcccaagcaaagcaatcagcccgtaactcctcacgaatgctcgaagaagcttacgagacaggagtgggtatccttcacaagtacgctgaccagagggatcgactgaagagtgctcaaaggaaagctttggatgtcctgaacactgtcggtctgtcaaactccgttctgaaacttatcgagaggcggcaccgcgtggacaggtggatcgcgtatgctggtatggtcatcaccgtggtggtgatgattgcgttttggcggttaacgcattagtgctgggctgtgtttgttacatatttctatcccagatatcaatgtgcaaacaagggggatggggcagattcagatggtgcagttttttttcgctggtcgtggagcagttcaagtttgcctcgccggtccgtcgcgtgcatagttgatgccggacccccaaagtgggttaaatgttcaaattccattgtatgcaatgctgctgtgtagtctattgttacgacttccatgtaactacacaagcttttgcgggacacagaagagaaaaggcgctgtattatttctgcacgaaatattgtactcgtaatatctagcctgcagttgaatagcacaaaataacggaaacctgtgagacctgaattttcagatttaactgaggaaaagatatgtgtcta

SEQ ID NO: 90194 - DNA, 1587 bp, Zea Mays
gtggtatcgccgcgccgcgtcgtcgtggacctccagccgcgccccgcccccatcatatccatcgcccgcggttttttcaccacaccacccactggcgctgcctttattctaacgtgccggctctgctcccctcgcatgctcctgctcattcccagccgcgccgcggttcttgcatgctttcctcggcgcaaggccggggtcggaaaggagactcggccgtggatttaagtatttaaccccacagcaagaccggacttgctggaaaggcagatcttgatccgttcctcttcctgttcctgctgctagctgctggctgctggggccgtgtacgtacgcgttgatgaaggtgaccgtggaagggagcggcgccggcccggccgcggtcaagaggaggcggagtggcgggcctggcaggcgccagagcggcggcgtgagcgtacggcggcgcgtgcaggtggacgcggcgaccgcgccagagccggcgccggcgccactccagcgtctgcttgccgcgtgccgccgcgcgttcggaggccccgggaccgtgccggcgcaccacgacgtcgtcctcatcagagacatcctcgacaagatgggaccagaggatgtgcacctgagagccgtcaccaaggccgccgccgcttccggcggccctcgaacgcaccctgttcctatcatcacacgaaccaccatttataaatgcaagaacttctcggtcgtggtgttcctgctgcccccaggcgcgaccatccctctgcacaaccacccggggatgacggtgttcagcaagcttctcctcggctcgctccgcgtcacgtcctacgactgggccgaggccgaccaacgtcccgtcgccgtcggcggcgatcgcccactgctgaggctggcgaagctggtgctggacgccgacctgagcgcgccgtgcgacgccctggtgctgttcccggagtccggcggcaacatgcacaggttcgccgccgccacggcgtgcgcggtcctcgacgtcctcggcccgccctactccggcgaccgggactgcacctactaccaggacttgccataccgccgtcatatcgacgatacagatgaggccgccggggatgaggagcagaagccgcgtctggggtggctgctggagacgcgcaagcccaaggaactgcacatgtacgaggtgccgtacaggggccctccgatcctgtggaagagacggcctgcatttgactcttggcggcggcagcagcagcagcacaagggacagtgagacatatagcgagtgtatgcagcatgtgcctccgtatgtacgctagctgttggtgggaggacgacgtgtgcaaattgttgagaactacgttaccctggatcaccagattcgtttcattcctcccgtcagccgtagaggcgcgagaagttgtagaagacccgtctcccttcccagaagcacgacaaaggaacacacgagacacatgatatagggttgggggcttggggctctggcctctttctcctctctgtcatatgaaggcgtgtacaagttccttatatagagatgtgggacccctcaggggcaaagtcggtatttggccacat

SEQ ID NO: 90195 - DNA, 1589 bp, Zea Mays
attctaacgtgccggctctgctcccctcgcatgctcctgctcattcccagccgcgccgcggttcttgcatgctttcctcggcgcaaggccggggtcggaaaggagactcggccgtggatttaagtatttaaccccacagcaagaccggacttgctggaaaggcagatcttgatccgttcctcttcctgttcctgctgctagctgctggctgctggggccgtgtacgtacgcgttgatgaaggtgaccgtggaagggagcggcgccggcccggccgcggtcaagaggaggcggagtggcgggcctggcaggcgccagagcggcggcgtgagcgtacggcggcgcgtgcaggtggacgcggcgaccgcgccagagccggcgccggcgccactccagcgtctgcttgccgcgtgccgccgcgcgttcggaggccccgggaccgtgccggcgcaccacgacgtcgtcctcatcagagacatcctcggtacgtacgccgcccctttttcctcatcgttaaagccatcgcattgcaagagctagactgccttgttcagtctgctaattaaccatgtcctttcctttgcactgcagacaagatgggaccagaggatgtgcacctgagagccgtcaccaaggccgccgccgcttccggcggccctcgaacgcaccctgttcctatcatcacacgaaccaccatttataaatgcaagaacttctcggtcgtggtgttcctgctgcccccaggcgcgaccatccctctgcacaaccacccggggatgacggtgttcagcaagcttctcctcggctcgctccgcgtcacgtcctacgactgggccgaggccgaccaacgtcccgtcgccgtcggcggcgatcgcccactgctgaggctggcgaagctggtgctggacgccgacctgagcgcgccgtgcgacgccctggtgctgttcccggagtccggcggcaacatgcacaggttcgccgccgccacggcgtgcgcggtcctcgacgtcctcggcccgccctactccggcgaccgggactgcacctactaccaggacttgccataccgccgtcatatcgacgatacagatgaggccgccggggatgaggagcagaagccgcgtctggggtggctgctggagacgcgcaagcccaaggaactgcacatgtacgaggtgccgtacaggggccctccgatcctgtggaagagacggcctgcatttgactcttggcggcggcagcagcagcagcacaagggacagtgagacatatagcgagtgtatgcagcatgtgcctccgtatgtacgctagctgttggtgggaggacgacgtgtgcaaattgttgagaactacgttaccctggatcaccagattcgtttcattcctcccgtcagccgtagaggcgcgagaagttgtagaagacccgtctcccttcccagaagcacgacaaaggaacacacgagacacatgatatagggttgggggcttggggctctggcctctttctcctctctgtcatatgaaggcgtgtacaagttccttatatagagatgtgggacccctcaggggcaaagtcggtatttggccacat

SEQ ID NO: 90196 - DNA, 1470 bp, Zea Mays
tagatcctcacccatctatcgagctaggactgctagatcctcacctgcccgactctcgctcgtcggttcgatctttcccatagttgcaggaacgcacggtgctagtttcgagtgtagcgcggcaatatggaggcaaagagcgcggccgcggaggtgctcaggaagaccgacgctggcggagacaatgagaggtataggcatggggagctggggcgcgaggctgtggaggaggaggaggtgaaaccgcgaagggtggcggatgcgccgctgccggcggagaggaagaggaagcgcgcggcggacccggaggacgacggcagcgtgagcgacagcggcagcggcagcgaagggcctccgcagcagcagcagcaggtgaagccgtgtctttccccggtgccgcctctccaacggctcctgagtgcgtgccgcgccctgctcactggctcctcctccccgccgacgccttccgctgtcgccttgatccgtggcattatggacaagattgggccagacgacgtcgggctcagggacgagatccgcttcttcaacaagatgaacgccgctggtcttcaaaaccctcctatcgtcacatgcaaacctatttacgagggcgccaactttacgatcgcggtgttcttcttgccactgggagcggtcatgcctctccacgaccacccgggcatgacggtcttcacgaaggtgctcatcgggtcagcgcgcctggaggcctacgactgggtccgtccccgtgtcttggccggctgctgctcgggctcccgtcgccggacgctcgcgaagaaggtgcgggacgaccacggcgtcaccgcagcggcgtccgcctgggtgctgttccccaacagcggcgggaacatgcaccgcttcgcggccgcggaggacgcccactgcgcgttcctcgacgtcctcacgccgccctacgcgcccacggaccgaaggcgctgcaccttttaccaggacctcccctacgaacaccatcgtcctcgtccctgtacctgtaggtcgacagccacaggcggtgccatctgtgacgacgacgtgcttgttgcggaggagcagacgtgtcggctggcatggttggaggaggtcccgcagcctaggaacctgagggttgtctgcttgccgttccgaggcccaacgatcttctagcctcatcaacagcccatccggcaggcagaccctgcttactatctctagctatgagggaggcatagttgatcaaaaaaaaatattgtctttttccttttggagaataggatcccgtgctgataaatgatgatgtttacagtatgtagtgttaagctactctactgcgtcactgagacaaaacgtattcagctcttcacaggtggacgacaaagccactggcttctgtacttctgtttctgcgatgaaccagatcaccgccatagtcaatataataggctctaagtctgcattctcccctttcacata

SEQ ID NO: 90197 - DNA, 1464 bp, Zea Mays
tagatcctcacccatctatcgagctaggactgctagatcctcacctgcccgactctcgctcgtcggttcgatctttcccataggaacgcacggtgctagtttcgagtgtagcgcggcaatatggaggcaaagagcgcggccgcggaggtgctcaggaagaccgacgctggcggagacaatgagaggtataggcatggggagctggggcgcgaggctgtggaggaggaggaggtgaaaccgcgaagggtggcggatgcgccgctgccggcggagaggaagaggaagcgcgcggcggacccggaggacgacggcagcgtgagcgacagcggcagcggcagcgaagggcctccgcagcagcagcagcaggtgaagccgtgtctttccccggtgccgcctctccaacggctcctgagtgcgtgccgcgccctgctcactggctcctcctccccgccgacgccttccgctgtcgccttgatccgtggcattatggacaagattgggccagacgacgtcgggctcagggacgagatccgcttcttcaacaagatgaacgccgctggtcttcaaaaccctcctatcgtcacatgcaaacctatttacgagggcgccaactttacgatcgcggtgttcttcttgccactgggagcggtcatgcctctccacgaccacccgggcatgacggtcttcacgaaggtgctcatcgggtcagcgcgcctggaggcctacgactgggtccgtccccgtgtcttggccggctgctgctcgggctcccgtcgccggacgctcgcgaagaaggtgcgggacgaccacggcgtcaccgcagcggcgtccgcctgggtgctgttccccaacagcggcgggaacatgcaccgcttcgcggccgcggaggacgcccactgcgcgttcctcgacgtcctcacgccgccctacgcgcccacggaccgaaggcgctgcaccttttaccaggacctcccctacgaacaccatcgtcctcgtccctgtacctgtaggtcgacagccacaggcggtgccatctgtgacgacgacgtgcttgttgcggaggagcagacgtgtcggctggcatggttggaggaggtcccgcagcctaggaacctgagggttgtctgcttgccgttccgaggcccaacgatcttctagcctcatcaacagcccatccggcaggcagaccctgcttactatctctagctatgagggaggcatagttgatcaaaaaaaaatattgtctttttccttttggagaataggatcccgtgctgataaatgatgatgtttacagtatgtagtgttaagctactctactgcgtcactgagacaaaacgtattcagctcttcacaggtggacgacaaagccactggcttctgtacttctgtttctgcgatgaaccagatcaccgccatagtcaatataataggctctaagtctgcattctcccctttcacata

SEQ ID NO: 90198 - DNA, 2019 bp, Zea Mays
ccaaagagttgagctgcttgcttgaattcccggggttatcaaaaggggggcttgcttgaatttaaagccctgccatctgccccggagcgccgccgcgcgagatgccccccaccgccaccgaagccacctcgtcgtcggcgaccagtgccacctcgtccacggatgccgacgccccgggccccacctcgccatcgccgtcccggcgcgcggcgcccactctgctcctcgtcgccttcctcgccgcactcctcatcttctccaccggcgacgatgccacggcgcagccgctcaacggtgtaagcttgcaaaacccagaggtttcatttgttccctcccccttggctggacaattttgtgagcgagtcctactatctggagtgccaaggttacatcttgatagttatgcaagccaaattcgtgtcaaaatgaatgtgtctcaatctattcctgagaagttccattggaaaatagaggtttgctttcataggaatgcctctatgggtttatgccagtgtgaggcgggtgagtggcaaggttttcaaggtgggatgtggactgctgtaagttctccatatggaaacaaatatgttgatctgaaattggctgataagaaacctgctaggttcactctttccattcaggaagagtttcagaaatggcgtctggcttgccttggtattggatttgtattgctattcctgtcaccaattattagcaaatgggttcccttttactatagcagctctatggctcttggaatcctggctgttgttcttattgttattttccaggggatgaaactgctaccaatgggcaggaagagtttattttaccttgcaatttatggatctgtgttaggtgttggttcctatgctgtacactacttctcaacattggtctcttctattcttgaaaacttcggcttgagtgaagagttatacaaccctgtttctatcttcctgctggtagcaattgtcttgactggagctggttttggctattggatggtcaggagatttatcctttccaaagatggaagtgtagatgctgggatagcgcagtttgtgaagtgggctatgcgtgttgttgctacatttttcattatgcagagcacacttgatcctcttctagcactggttgctcttgcttttagctggtggttatgctctctgttgactacaaagaaagttcagaagaccatgacccagaaacaaaagcaatcaaaggttctttctcagcaaatgcttactcaaggattgcccacgggtcctaaaatccagtttttaagtccatctaagacaggctttggaggaaccacatctagaacttccgccacacagtatggtcggagcaatttggccaatcgaggtatggtctgctcagcacttgcaaagcgcgcagtgcccaacgaagacgaagaccactactccaccttccacaacatccagccacggaaatatacgaagcaggaatgggaggacttcacccaggaatcgactaggaaggcgcttgcggagtgcacagctaccccagagtttgcccagtgggtcggtgacaacgctcgtcgtctgcaagtagagaaagaggaggacaacttgtcagaggaagagatcatggagagctccagctcgtcggaagaaactggggatgaagctgatggagctcctggcctgatcagactgtggggctagcatgccggttgaacttgtaagagccccaagcatatatgctcctgccatttcacgtgtaaagagtagcaaccggtcattttaactagtgtagcagcagggtagggtggtagcagctgattgctttcgcagttgttgccacggtggcagtagttggctagccatctcaggtcaattgatgctaggtttagctaactgtctgttatcagcggattcttagttctctagagctgatatatgtgtaatggtttaaacaatctaatctgtgactggatccagcattttgttgatctggttggaagttgggtcgttagcatttcttggcgctcca

SEQ ID NO: 90199 - DNA, 223 bp, Zea Mays
aatcactaattttgattttcactaatggtgttaaggagaggggtaaacagtgaagcctttaaaacaaacagcaagtatgacacattggtgaagaatcaaaccacagttggagacgcaaagcatctccgtttcacacgcacacatgggcatggaatggaaggcacgcgcgcgcacacacatgtaccattttactcgtttgcttctctccgctactgaaaaaaca

SEQ ID NO: 90200 - DNA, 2484 bp, Zea Mays
cgagagggaacctcgagccaagaaagcgagagggggaagctgcggccgccggccgagcgagctcgccgtccccatccacccctctcactctcctcttcctcctctctgtctttcgctccgtccagccgccgcgtaatccgcggaaccagatgccctcatccgccctctgatcgaatcccgcgagaaaggccggttctctgtcctgccgtgccggcgatcttgatggcattggaggcggggagcagcggctgcggcgggaggggatggggcggcgggttccggagcctgatgcggcggaagcaggtggactccgaccggatccgcgccgagggccagccgcagctcgccaaggagctcaacgtgccggagctggtcgccatcggagttggttccacagttggagcaggagtatatgttcttgtgggaataattgctagggagcacgctggtccagcattgacaatttcatttctgatagctggaatagcagccacactttcagctttctgttatgctgagcttgctagtcgttgcccctctgctggaagtgcctaccattattcatacatctgtgttggagaaggtgttgcctggttgattggctgggctctagtgctggaatatactattggtggatctgctgttgcccgtggtatatctccaaacttagccttgttttttggaggacaggatagtctgccatggattttagcacgccatcagcttccatggtttggtatcattattgatccctgtgcagctgctcttgtttgtgttgtgactgttttactctgcatgggaattaaagagagttcatttgcacaaggagttgtaacagttctgaatgcttttgtaatgatatttgttattgtagctggtagttatattggcttccaaataggatgggtcggctacaaggattctgatgggtatttcccatatggagtaaatggaatgcttgctggatcagcaactgttttctttgcatacataggctttgatacagttgctagtacagctgaagaggttaggaatccacagagagatcttccattgggaatcggagtagcgttggctatttgttgtgcattgtatatggctgtttctgttgttattgttgggctggtaccatattttgccatggacccagatactcctatttcatctgcctttgcaaaacatggaatgcaatgggccatgtatgttgtgacaactggtgctgttcttgcactctgctcgaacttgatgggctcacttcttccacagcctagaatacttatggccatggcacgagatggcctgttgccatccttcttctctgatgttaacaagcaaactcaagtacctgttaagagcacaattgtgacaggcatctgtgcagctgctctggcttttacaatggatgtctcacagttagcaggaatggtcagtgtaggcacactccttgcattcaccgtagttgctgtttcgatcttgatactcagatatgtccctccagatgaggtccctttgccaccctctctgcaagaatcattccgtttgaaccaggaatgcgatgaggaaagggacagggctcttcttggagttgggaactgtaccttgtctcagacaaaggatgtgattgtggtagtagaatcagttaaggaccctctcattgatataccgctgcataaaggcaagatggatgagacaaagcgccgaaagatagcctctttaagcataggatctgtgtgtataggggttctgatcctcacatcttcagcctctgccacatggttgccttttctcccgatatgtattggctgcatcattggagttgtgctccttctggctggcctcagtttgctctcctggatcgaccaagatgctggcaggcactcttttggtcattctggaggattcacatgcccttttgttccagtgctgccagttttgtgcatcctgataaatacgtatctgttgataaacctgggtggtgacacatggatgagagttggcatatggctgctgatgggtgttctcctgtacattttctacggacgaacccacagctccctaacagatgtcgtctacgttccagtagcgcaggctgatgagatgtacaggagttcatcaggatatgtatcatagaaaagaacagccgcagttacttcaaggtggttggtcattcagttgtagataattggttatcaaccaggaaagaggggaattggctgttatttctttcatgcttggccaacaagatctcgtggatgcaactttgcaagatatatatgatgttcacgagcctggtcaatttacacattgtttgttggagtgtgcgtagatgtggtgtatataaacccagctgggtggaatgatgtggtacataatttatgcaattcatgtaaaagccctttctacctttctactgaaatgggagagcatttaaagggcatattgaaacagtacatgaatggcaagagaagctacctttttttatat

SEQ ID NO: 90201 - DNA, 2587 bp, Zea Mays
ctggttttaattgattgtgatatatgttgacataggttagtgcctcttatgagcaggctctgatggatgcccgaaagcagattgaacgagagatggaacgatttaaagtatgtgagaaggaaacaaaaactaaggccttctcaaaagaagggttaggtcagcaaccaaaaacagatcccaaagaaaaggccaaagctgaaacaagagactggcttaataatgtggttagtgatttggaaagccagattgataacttcgaagcagagattgaaggactttcaattaaaaagggaaaacaaagaccgcctcgattggtacatttagagaagtctattacgagacataaagctcatataaagaaattggagtcaatcttgagacttttggataatgatgagttgagtcctgagcaagtcaatgatgttaaagattttcttgatgattatgttgaacgtaatcaggaagactttgatgaattcagtgatgttgaggacctctatagcacattgcctatggagaaggttgaagcacttgaagacatggtttcacttgctccttctagtcttgtcaagggtgttgcttctgttccgactactgcagtttcgagtacaaagagttcgattgcaacttcacttactcagcctacagtatcaacagctccttcacaaagtacatcacaagatcaaacagaggacacagcttcccaagaaagcaatagtgaatctgtgccacaaacaccacctccaaaaggtggaaattctggaccttcaataccagctgtgccaattgctgtcagtactggtagtgcagctatttctgtacttgcagaaacaattagttcccctgtgcgaccaattgttcccaccacagtggctacaatactttcttctgctattccacgaagtgctcctgagaatacatctacggttacctcaattcctgcaaacttatctatcaccttgaaggatgatgaaagcatgagttttcctccacgacgaccatctcctgctattactgaaattggaattggcaggggcatagctcgaggaacaactagtcaggcattaggtacagctcccataactattggtccagtcccaggaaatggatcggttagtgcacttcctggaataaatgacttgtccaaaagaaatatattgaacactgacgagaagattaacagtggtggtctttctcagcagttggttatgcctcttggtagtaaagttcaaccccagcaggttcccaggactaatgatgcaattagctctgaatctgctaacacaaatgaaagccctattctcggtggaagagtattttctcctccagttgtttctggggttcaatggagacctctaggtgctgctgcatttcaaaatcaaagtgaaattagtcattttcgtggaaggcctgagatttctgctgatcacagggagaagtacatacaaagactgcagcaagtacagcagcaaggtggcagccttctgaacgtttctcatataactggcataaatcagaagcaatttccaacacagcagccaaatccccttctacaacagtttaattcacagagttcctctatatcttcccaagtgaatcttggagttcaaggaacagatgctgggcatataaaaagtgaagaagaagaacaacttttggctgaagatggtgtggaatcttctgcaacaacaggagcaaataaacaaacaagtgaagatgacacaaagattccatattcgaatccttcagcacctgcagcagaaagcaatcagctgcctagggatactgatccatcacctgggcagcctttgcaacctggaatgtcatcatctggtgttggtgttatcggccgaagaagtgtatctgatcttggtgcaatcggagataaccttactggaacttctgctagttctggtcatgatcagctttataacctgcaaatgctagaagctgcattccacaagcttccacaaccaaaggactctgagcgtgctaaaacttacatcccgcggcaccctgcagttacccctgctagctatccccaagttcagccatcaattgtatctcatccctccttctgggaaagaattggtagcgacacattagctaccgacatgctattctttgcgttctattaccagcagaacacatatcaacaatacatggctgctagagaattgaagaagcaatcgtggagatttcaccggaggtacaatacctggttccagcggcatgtggagccacaggttacgactgatgagtatgagcggggatcatatgtatactttgatttccatgtcaccgaggatggctcaggatggtgccaaagaatcaagaatgacttcacattcgagtacaacttcttggaggatgagctatcagtacaaacaaactaaagtgggctgtaggtctaatcaaaccattctgtccattgtgaattttgtagttctcatgaggtgactgacttataatctggactcttgtaaaattctccagctgtaaactaatggtgaagttggagagcattccttgtaggttctgatgcaccgaacatgctgaaattagaatcgggttgtgccagtcaaat

SEQ ID NO: 90202 - DNA, 1780 bp, Zea Mays
ctcaattcctgcaaacttatctatcaccttgaaggatgatgaaagcatgagttttcctccacgacgaccatctcctgctattactgaaattggaattggcaggggcatagctcgaggaacaactagtcaggcattaggtacagctcccataactattggtccagtcccaggaaatggatcgttggttatgcctcttggtagtaaagttcaaccccagcaggttcccaggactaatgatgcaattagctctgaatctgctaacacaaatgaaagccctattctcggtggaagagtattttctcctccagttgtttctggggttcaatggagacctctaggtgctgctgcatttcaaaatcaaagtgaaattagtcattttcgtggaaggcctgagatttctgctgatcacagggagaagtacatacaaagactgcagcaagtacagcagcaaggtggcagccttctgaacgtttctcatataactggcataaatcagaagcaatttccaacacagcagccaaatccccttctacaacagtttaattcacagagttcctctatatcttcccaagtgaatcttggagttcaaggaacagatgctgggcatataaaaagtgaagaagaagaacaacttttggctgaagatggtgtggaatcttctgcaacaacaggagcaaataaacaaacaagtgaagatgacacaaagattccatattcgaatccttcagcacctgcagcagaaagcaatcagctgcctagggatactgatccatcacctgggcagcctttgcaacctggaatgtcatcatctggtgttggtgttatcggccgaagaagtgtatctgatcttggtgcaatcggagataaccttactggaacttctgctagttctggtcatgatcagctttataacctgcaaatgctagaagctgcattccacaagcttccacaaccaaaggactctgagcgtgctaaaacttacatcccgcggcaccctgcagttacccctgctagctatccccaagttcagccatcaattgtatctcatccctccttctgggaaagaattggtagcgacacattagctaccgacatgctattctttgcgttctattaccagcagaacacatatcaacaatacatggctgctagagaattgaagaagcaatcgtggagatttcaccggaggtacaatacctggttccagcggcatgtggagccacaggttacgactgatgagtatgagcggggatcatatgtatactttgatttccatgtcaccgaggatggctcaggatggtgccaaagaatcaagaatgacttcacattcgagtacaacttcttggaggatgagctatcagtacaaacaaactaaagtgggctgtaggtctaatcaaaccattctgtccattgtgaattttgtagttctcatgaggtgactgacttataatctggactcttgtaaaattctccagctgtaaactaatggtgaagttggagagcattccttgtaggttctgatgcaccgaacatgctgaaattagaatcgggttgtgccagtcaaatatatttgactccgctgtatattgtcgttctcatctgctttagcagcaacaattaagtcagcttagttctaaagctacagtggagttaaaacccccaacaaaagcacaaaataagtttcagggcataactgtttttcatttgttcatgtttaaggctaaggcacatgaataactgttttttattccttatttaaggctaaatttttagatatatt

SEQ ID NO: 90203 - DNA, 2139 bp, Zea Mays
atggcaagttcggcgctgaagaatctcgccaccggacggcccaacggcagagaggacatcatccgcctctgctccactggtcgcgtcaaggaggctctccaccgccgcttccgcgagggcctgtggtcggaacctggcctcttctcccacatcttccgggcatgccaagccctcccgctcctccgccagctgcacgccttcgccgccacgtctggcgccgccgccgaccggttcacggcgaatcacctcctcctagcttacgccgacctgggcgacttccccaccgcgcgcggcctgttcgagaggattcctaagcggaacgtcatgtcctggaacatcctcatcgggggatacgtcaagaacggtgacctggagaccgcgcgtaagctgttcgacgaaatgcccgcgaggaacgtggccacgtggaatgccatggtcgctgggctcaccaactcgggactcaacgaggagagcctggggttcttctttgccatgcggagggagggaatgcagcccgatgagtatggcctcgggagcttgttccggtgctgtgccgggctgagggacgttgtgtccgggcggcaggtccacgcgtacgttgtgcggtctggactagacagggacatgtgcgttgggagctccttggcacacatgtatatgcggtgtggttttcttcgagatggggaggctgctctccgagcattgccttcgcttaacattgtgtcgtgcaataccactatctctggaagaacacagaacggagacgcggaaggggcactcgagtttttctgcttgatgaggggtgctggtgtggaagcaaacgcagtcacattcgtcagcgccgttacttcttgctccgacttggcagctcttgcacaaggtcagcagattcacgcactggctatcaaaactggagttgacaaggttgtgccagtcatgacttctcttgtgcatatgtattctcgatgcgggtgcttaggtgactcagaaagggtttgccttgagtatagtggtacagatcttgtcctttgcagcgcgatgatctcagcttatggattccatgggcatggacaaaaggcagttggcctgttcaaacagatgatggctgcaggagcagaacccaatgaggttaccttcttgaccttgctatatgcatgcagccatagtggtcttaaagatgaaggcatgaattgttttgagcttatgactaagacttatggactgcaaccaagtgttaaacactacacttgtattgtggatctccttggacgttcaggttgcttaaatgaggcggaggaccttatcctgtcaatgcctgtgcaacctgatggggtcatatggaagacactactgtctgcatgtaagacccagaaaaagttcgacatggctgagaggatagcagaacgtgtcattgaattggaccctcatgattctgcctcatatgttcttctatcaaatattcgagctaccagcagcagatgggaggatgtcagtaaggtaagagaaaccatgagggaacagaacgtgaggaaagagcctggagttagctgggtggagctcaagggtcagattcaccaattctgcaccggagatgaatcccattcaaggcaaagggagattgttgaatgcttggaagaaatgatgaccaggatcaggcaatgtgggtatgcaccggacatgagcatggttttccatgacatggaggatgaggagaaagaagttagtttggctcaccacagtgagaaattggctatagcatttgcttttctgagcttacctgaaggagttcctattcgtgttatgaagaatctacgtgtatgtgatgattgccatgttgctattaagttgatgtctaaggttattggacgtgagattgtggtccgagatgttagccgttttcaccatttcaaagatggaaaatgctcctgtggagattattggtgacagtagcggagtgccatggaaatacttttttgcctcagttgagggaacaagacttttaacccctccatagtagtgtacctgagtgtaattgggatgctattctgatggcaggcttctggttgccagaaaaaaacagcagaatcaatgccatacttgagatttgagtcagtttgctagtttggtaacatcttcatc

SEQ ID NO: 90204 - DNA, 2049 bp, Zea Mays
tccagagagacggagcagagcaggcgaagcaagcgaaagccacaaccaccgcaaaagcgaaaggcggaggagcacaaggagatgagacgataccactagactaaagcaaagccgtgggcattagagagagacacagagagaaggcgcgtggggcggccggatggcgatgcacttcggcgagatcacgacggccttcccaggcggcggcggcattgccggggcgtccacggccaggacaacgccggcggcgagcccgtaccaggcggctgttgaaagtgaagagcaaatttattccccagcatttggcaacattgaggtccaggatagtcgtggttgctgcagtggtttcacaggcagtgtaacgaagttgctgttcatctttcatctgcttgctttcattgccctcacagcattcctaggcgtccaggcctcttaccaccagaaccctgcctacaagcccttctccaacttcatccctctggtatcctctgtcatagtatccacaattgctgcatgcttctgggttatccttgctgtcacaaacccgccaaaagccatcaagacctctctctgggctgcccctgtttctgcacttgcttgtgatgtagtcatacttcttgttggcaatactgctgcacttggcattggagcgcttgtagttgtattcgcaattgcagcaggattatacagttgttgggccactggcccacgtctcaagcatgcctctgatatgctttccgtttctgtcatcggtgcacatttaccgcctgctacttcatgccttgttgtctatgtccttcttgcaacgtttgggtatatggccttctggacagttgccatcagctgcattgctgctgcagaagggcacttcatggactaccggatggcttatgtggcagcacttctagtgagcatggcctggacaatgcaggtactgagatatattgtctatgtggcagtggcaaaactggcacatggacgtctcacctatggaattcacgtcctgggcggtgctgtcgaagcattctgtgacacgatatttggaccagcctttggggacatatgcatgggtgcagtggctgtgccggtgaactcagcggtgcggggattggctcgagcaatgaaaacagcggctgggggcaacgacgagttcattttgtcaggacagggctgctgctttgctgtatcagagaagatgctgggacgtgctaaccgttggggttttgtgcacgtgggggcgcgggggaaggcattctgtgtggcttcacgggatgtgtggtcgctttttgttctccgtgggattgcagagcttgttgattcagacctcactggttcgttttgcttcctttcttccgttacatcaggcgcattggcctcattggtttctggatcatgggcactagccatggataaggatcagaagaaactagctttgcccatatccatctatgcattcctgatcggttattatatgtgccggatgatgatcgcatggccgcaagcatgtgtggctgcgtaccatgtcgcatatgcagagaacccgcagaaccctcagctgggcacgctgataccagaacatctgcgcgagctccaagcaatggctgcagatcaagatcgtcccagagttatccatttttctgatgacattgacaattcatagatccttccattctttcagtctttttcccccctgacccaagggggtagacacctcggcagcagacgtagacacgtcgttgcagtcttccagatgcatgatgatgggtgttgactgctcctgggctgcttgctggtgcagatgatagggtgtgctcagttctgtagatattgggcaagtggataactgagcaaaagaagtggttagatgtcgtataggtacagagtttagcaaagtaaacaaaaatgtagaattaaatacattgttttcagaatttcccggaggcgtgttcttgccctcgcactgacactgaacgctgttgcgattcctgtgccttttcatctgcttacgaggtggctctacgtggcaattgacatgcatcaggttcgagg

SEQ ID NO: 90205 - DNA, 417 bp, Zea Mays
atggagaagggagaagaggggatcgtccatgggatctctgcccacggcggtttccacgcctggggaggggtcgggctcgcctacacgccaccaagggcctcctggccgcgccctaggggctcgccgggggtgctcgactgctgggcacacagggagatgcaactaggaacgacaccggcaggggcgagacagccatggacgcgatcgcgcagactacctggaggcggggcgtcggcactgagggtgtgcagtaggacaggtggagcagcgatgctgctcgaccagggagcagggggcaccgaggctgggcaggctgggagccacacgcgcaggacctgtcgaccgcgccgtgcagagaagacgagggggaggggctccttacctcgacggggaatagcagctacagcccatggatga

SEQ ID NO: 90206 - DNA, 2493 bp, Zea Mays
ttttttttgttctagagagaaattaataaaaaaattatataaatttttattactatacttcataatattttcaataacatgataataaattagcttcaaattctatatatatttatattaaaatatagatttgtcgatattttagaaacatcctctcagagccacccgcaaaagtccgataatccttttccggcacgacagatccaccgtgtttggccctctcgaactcaaccgacagctgccgattcttcacccttacttttcacgtcatgaatgctcgtcagctcgtgagacgtgacgccgtgtcctgaaaaaaaaaagacccgtcccggcgacccccacacccttcaatccggggaaaaaaagcaacagctcgattgcccgggtcttccaaaaccctcgagatctcggttggtggtgtggtggggtggggtgctcttccctctcgcctccgctccgaagcatcgatccgaactcctcggttactcgcggcagcggcgtgtcgagatgcgccccaacattatcacagaggctgggattccaactaggttgaatcagtggtggagcagcattccgtttgttacttctggtgttatcttgatatgtggagtaatttatctgctctgcttgttgattggctatgattcctatgtggagatatgcttcttgccttctgctgtagcatcacattttcaagtatacaggttctacacatctgttctctttcatggttctttgcttcatgtgctattcaacatgcttgccttggtacccttgggcactgagttggagagaatcatgggatcagtccgtctcttattcttgatgctccttcttgcaacaacaaatgcaattctccatctcacaattgctttcttggtggcttacaatcctctgtatcacgttccaaatcttgtgaatgaatgctccattggcttttctggagttatattctcaatgattgtcattgagacaagtctgagtggtgtgcaatcacgaagtgtcttcggcctcttcaatgttcctgcaaaatggtacgcatggattttgctagtgctatttcagtttctcgcaagcaatgtttcattgctgggacacctttgtggcatcttgtcaggatttgcatacacttatgggctgttcaactacttgcttcctgggccatcattttattctaaaatcgaaggcttgtcagcactatctgtttgtgtgaggcgtcctggctttattatgtgtactggaggcactacttatggtcagcttcctacatactctaacacgtctgctgcaccaagtgctctcataaatggaaatttcttgagaaatatatcttcatggatgcctagcagacacacatcaactgctcaggaaggagaagacccaaggtttcctgggagagcacgaacacttggttctgtaggaactgaacccactgcaagggaggcaagtgcgcatttgcatgctaggttgttggataacacaactccaagtgacccactaacgaatacacagcatacagctgtgaacacagtcagagctgatgcaacagtgacagctgagcaggttgatacatttgatgaagaacttaagaagctggttggaatgggctttgaaaagcgtcgttggagaggacgtcgtccaccagagaagagacggcagctgttgctcgttcacgagtagcacgatcctgagcctgggccacgcgctcacgttcctcctatgcagcacgaagctcctcagcgcgctggagagacgtggcagcagtggcgtgggtgggggaagcgtggggcatcccaaggtgaagaacctcggtgcaggaggtgtctggtgcaggaggtgtcttcggtcggcggcgggggagtgccagccatggagcagcaccgagcagatggggtgcgctgatgcggaaacggagaatggaaaaaggaacctaggtgtctgataccatactcaggctgaagttgctcttgctgcagctgatggggatccaaatgttgccattgagattctgatgagtcagcagggttgaagtttgaccataaagtacaaattgaaaggaagcacggtatcgagccattttttgttcttacaaaggttcaaaaagtaggctgtggtttggggagtctgaaaaaggatggctgcaatcttgtttataccgggggtgcagaaacaacgtgcagcctaattgcaattctcaaggctttatgtaaggtagaaagtaacgttggatgttctgttaaatacgaacaatcagaaaatgctgaatttagtctgaaaatagccagtgtgtttgttttagcttgcagattattacaatctacaagccaggggaaactagattattgggctgtaacaataagactttgacgttgggactggttcccttttgagattgtggatccgtcctgcgttgagacctttttagcggcctatgaattttcacatgggaaaaatctgcaaaaataatgcataatctttaacctcaaatcaaca

SEQ ID NO: 90207 - DNA, 2162 bp, Zea Mays
ttttttttgttctagagagaaattaataaaaaaattatataaatttttattactatacttcataatattttcaataacatgataataaattagcttcaaattctatatatatttatattaaaatatagatttgtcgatattttagaaacatcctctcagagccacccgcaaaagtccgataatccttttccggcacgacagatccaccgtgtttggccctctcgaactcaaccgacagctgccgattcttcacccttacttttcacgtcatgaatgctcgtcagctcgtgagacgtgacgccgtgtcctgaaaaaaaaaagacccgtcccggcgacccccacacccttcaatccggggaaaaaaagcaacagctcgattgcccgggtcttccaaaaccctcgagatctcggttggtggtgtggtggggtggggtgctcttccctctcgcctccgctccgaagcatcgatccgaactcctcggttactcgcggcagcggcgtgtcgagatgcgccccaacattatcacagaggctgggattccaactaggttgaatcagtggtggagcagcattccgtttgttacttctggtgttatcttgatatgtggagtaatttatctgctctgcttgttgattggctatgattcctatgtggagatatgcttcttgccttctgctgtagcatcacattttcaagtatacaggttctacacatctgttctctttcatggttctttgcttcatgtgctattcaacatgcttgccttggtacccttgggcactgagttggagagaatcatgggatcagtccgtctcttattcttgatgctccttcttgcaacaacaaatgcaattctccatctcacaattgctttcttggtggcttacaatcctctgtatcacgttccaaatcttgtgaatgaatgctccattggcttttctggagttatattctcaatgattgtcattgagacaagtctgagtggtgtgcaatcacgaagtgtcttcggcctcttcaatgttcctgcaaaatggtacgcatggattttgctagtgctatttcagtttctcgcaagcaatgtttcattgctgggacacctttgtggcatcttgtcaggatttgcatacacttatgggctgttcaactacttgcttcctgggccatcattttattctaaaatcgaaggcttgtcagcactatctgtttgtgtgaggcgtcctggctttattatgtgtactggaggcactacttatggtcagcttcctacatactctaacacgtctgctgcaccaagtgctctcataaatggaaatttcttgagaaatatatcttcatggatgcctagcagacacacatcaactgctcaggaaggagaagacccaaggtttcctgggagagcacgaacacttggttctgtaggaactgaacccactgcaagggaggcaagtgcgcatttgcatgctaggttgttggataacacaactccaagtgacccactaacgaatacacagcatacagctgtgaacacagtcagagctgatgcaacagtgacagctgagcaggttgatacatttgatgaagaacttaagaagctggttggaatgggctttgaaaagactcaggctgaagttgctcttgctgcagctgatggggatccaaatgttgccattgagattctgatgagtcagcagggttgaagtttgaccataaagtacaaattgaaaggaagcacggtatcgagccattttttgttcttacaaaggttcaaaaagtaggctgtggtttggggagtctgaaaaaggatggctgcaatcttgtttataccgggggtgcagaaacaacgtgcagcctaattgcaattctcaaggctttatgtaaggtagaaagtaacgttggatgttctgttaaatacgaacaatcagaaaatgctgaatttagtctgaaaatagccagtgtgtttgttttagcttgcagattattacaatctacaagccaggggaaactagattattgggctgtaacaataagactttgacgttgggactggttcccttttgagattgtggatccgtcctgcgttgagacctttttagcggcctatgaattttcacatgggaaaaatctgcaaaaataatgcataatctttaacctcaaatcaaca

SEQ ID NO: 90208 - DNA, 2117 bp, Zea Mays
ttttttttgttctagagagaaattaataaaaaaattatataaatttttattactatacttcataatattttcaataacatgataataaattagcttcaaattctatatatatttatattaaaatatagatttgtcgatattttagaaacatcctctcagagccacccgcaaaagtccgataatccttttccggcacgacagatccaccgtgtttggccctctcgaactcaaccgacagctgccgattcttcacccttacttttcacgtcatgaatgctcgtcagctcgtgagacgtgacgccgtgtcctgaaaaaaaaaagacccgtcccggcgacccccacacccttcaatccggggaaaaaaagcaacagctcgattgcccgggtcttccaaaaccctcgagatctcggttggtggtgtggtggggtggggtgctcttccctctcgcctccgctccgaagcatcgatccgaactcctcggttactcgcggcagcggcgtgtcgagatgcgccccaacattatcacagaggctgggattccaactaggttgaatcagtggtggagcagcattccgtttgttacttctggtgttatcttgatatgtggagtaatttatctgctctgcttgttgattggctatgattcctatgtggagatatgcttcttgccttctgctgtagcatcacattttcaagtatacaggttctacacatctgttctctttcatggttctttgcttcatgtgctattcaacatgcttgccttggtacccttgggcactgagttggagagaatcatgggatcagtccgtctcttattcttgatgctccttcttgcaacaacaaatgcaattctccatctcacaattgctttcttggtggcttacaatcctctgtatcacgttccaaatcttgtgaatgaatgctccattggcttttctggagttatattctcaatgattgtcattgagacaagtctgagtggtgtgcaatcacgaagtgtcttcggcctcttcaatgttcctgcaaaatggtacgcatggattttgctagtgctatttcagtttctcgcaagcaatgtttcattgctgggacacctttgtggcatcttgtcaggatttgcatacacttatgggctgttcaactacttgcttcctgggccatcattttattctaaaatcgaaggcttgtcagcactatctgtttgtgtgaggcgtcctggctttattatgtgtactggaggcactacttatggtcagcttcctacatactctaacacgtctgctgcaccaagtgctctcataaatggaaatttcttgagaaatatatcttcatggatgcctagcagacacacatcaactgctcaggaaggagaagacccaaggtttcctgggagagcacgaacacttggttctgtaggaactgaacccactgcaagggaggcaagtgcgcatttgcatgctaggcatacagctgtgaacacagtcagagctgatgcaacagtgacagctgagcaggttgatacatttgatgaagaacttaagaagctggttggaatgggctttgaaaagactcaggctgaagttgctcttgctgcagctgatggggatccaaatgttgccattgagattctgatgagtcagcagggttgaagtttgaccataaagtacaaattgaaaggaagcacggtatcgagccattttttgttcttacaaaggttcaaaaagtaggctgtggtttggggagtctgaaaaaggatggctgcaatcttgtttataccgggggtgcagaaacaacgtgcagcctaattgcaattctcaaggctttatgtaaggtagaaagtaacgttggatgttctgttaaatacgaacaatcagaaaatgctgaatttagtctgaaaatagccagtgtgtttgttttagcttgcagattattacaatctacaagccaggggaaactagattattgggctgtaacaataagactttgacgttgggactggttcccttttgagattgtggatccgtcctgcgttgagacctttttagcggcctatgaattttcacatgggaaaaatctgcaaaaataatgcataatctttaacctcaaatcaaca

SEQ ID NO: 90209 - DNA, 2094 bp, Zea Mays
ttttttttgttctagagagaaattaataaaaaaattatataaatttttattactatacttcataatattttcaataacatgataataaattagcttcaaattctatatatatttatattaaaatatagatttgtcgatattttagaaacatcctctcagagccacccgcaaaagtccgataatccttttccggcacgacagatccaccgtgtttggccctctcgaactcaaccgacagctgccgattcttcacccttacttttcacgtcatgaatgctcgtcagctcgtgagacgtgacgccgtgtcctgaaaaaaaaaagacccgtcccggcgacccccacacccttcaatccggggaaaaaaagcaacagctcgattgcccgggtcttccaaaaccctcgagatctcggttggtggtgtggtggggtggggtgctcttccctctcgcctccgctccgaagcatcgatccgaactcctcggttactcgcggcagcggcgtgtcgagatgcgccccaacattatcacagaggctgggattccaactaggttgaatcagtggtggagcagcattccgtttgttacttctggtgttatcttgatatgtggagtaatttatctgctctgcttgttgattggctatgattcctatgtggagatatgcttcttgccttctgctgtagcatcacattttcaagtatacaggttctacacatctgttctctttcatggttctttgcttcatgtgctattcaacatgcttgccttggtacccttgggcactgagttggagagaatcatgggatcagtccgtctcttattcttgatgctccttcttgcaacaacaaatgcaattctccatctcacaattgctttcttggtggcttacaatcctctgtatcacgttccaaatcttgtgaatgaatgctccattggcttttctggagttatattctcaatgattgtcattgagacaagtctgagtggtgtgcaatcacgaagtgtcttcggcctcttcaatgttcctgcaaaatggtacgcatggattttgctagtgctatttcagtttctcgcaagcaatgtttcattgctgggacacctttgtggcatcttgtcaggatttgcatacacttatgggctgttcaactacttgcttcctgggccatcattttattctaaaatcgaaggcttgtcagcactatctgtttgtgtgaggcgtcctggctttattatgtgtactggaggcactacttatggtcagcttcctacatactctaacacgtctgctgcaccaagtgctctcataaatggaaatttcttgagaaatatatcttcatggatgcctagcagacacacatcaactgctcaggaaggagaagacccaaggtttcctgggagagcacgaacacttggttctgtaggaactgaacccactgcaagggaggcatacagctgtgaacacagtcagagctgatgcaacagtgacagctgagcaggttgatacatttgatgaagaacttaagaagctggttggaatgggctttgaaaagactcaggctgaagttgctcttgctgcagctgatggggatccaaatgttgccattgagattctgatgagtcagcagggttgaagtttgaccataaagtacaaattgaaaggaagcacggtatcgagccattttttgttcttacaaaggttcaaaaagtaggctgtggtttggggagtctgaaaaaggatggctgcaatcttgtttataccgggggtgcagaaacaacgtgcagcctaattgcaattctcaaggctttatgtaaggtagaaagtaacgttggatgttctgttaaatacgaacaatcagaaaatgctgaatttagtctgaaaatagccagtgtgtttgttttagcttgcagattattacaatctacaagccaggggaaactagattattgggctgtaacaataagactttgacgttgggactggttcccttttgagattgtggatccgtcctgcgttgagacctttttagcggcctatgaattttcacatgggaaaaatctgcaaaaataatgcataatctttaacctcaaatcaaca

SEQ ID NO: 90210 - DNA, 2070 bp, Zea Mays
ttttttttgttctagagagaaattaataaaaaaattatataaatttttattactatacttcataatattttcaataacatgataataaattagcttcaaattctatatatatttatattaaaatatagatttgtcgatattttagaaacatcctctcagagccacccgcaaaagtccgataatccttttccggcacgacagatccaccgtgtttggccctctcgaactcaaccgacagctgccgattcttcacccttacttttcacgtcatgaatgctcgtcagctcgtgagacgtgacgccgtgtcctgaaaaaaaaaagacccgtcccggcgacccccacacccttcaatccggggaaaaaaagcaacagctcgattgcccgggtcttccaaaaccctcgagatctcggttggtggtgtggtggggtggggtgctcttccctctcgcctccgctccgaagcatcgatccgaactcctcggttactcgcggcagcggcgtgtcgagatgcgccccaacattatcacagaggctgggattccaactaggttgaatcagtggtggagcagcattccgtttgttacttctggtgttatcttgatatgtggagtaatttatctgctctgcttgttgattggctatgattcctatgtggagatatgcttcttgccttctgctgtagcatcacattttcaagtatacaggttctacacatctgttctctttcatggttctttgcttcatgtgctattcaacatgcttgccttggtacccttgggcactgagttggagagaatcatgggatcagtccgtctcttattcttgatgctccttcttgcaacaacaaatgcaattctccatctcacaattgctttcttggtggcttacaatcctctgtatcacgttccaaatcttgtgaatgaatgctccattggcttttctggagttatattctcaatgattgtcattgagacaagtctgagtggtgtgcaatcacgaagtgtcttcggcctcttcaatgttcctgcaaaatgacacttatgggctgttcaactacttgcttcctgggccatcattttattctaaaatcgaaggcttgtcagcactatctgtttgtgtgaggcgtcctggctttattatgtgtactggaggcactacttatggtcagcttcctacatactctaacacgtctgctgcaccaagtgctctcataaatggaaatttcttgagaaatatatcttcatggatgcctagcagacacacatcaactgctcaggaaggagaagacccaaggtttcctgggagagcacgaacacttggttctgtaggaactgaacccactgcaagggaggcaagtgcgcatttgcatgctaggttgttggataacacaactccaagtgacccactaacgaatacacagcatacagctgtgaacacagtcagagctgatgcaacagtgacagctgagcaggttgatacatttgatgaagaacttaagaagctggttggaatgggctttgaaaagactcaggctgaagttgctcttgctgcagctgatggggatccaaatgttgccattgagattctgatgagtcagcagggttgaagtttgaccataaagtacaaattgaaaggaagcacggtatcgagccattttttgttcttacaaaggttcaaaaagtaggctgtggtttggggagtctgaaaaaggatggctgcaatcttgtttataccgggggtgcagaaacaacgtgcagcctaattgcaattctcaaggctttatgtaaggtagaaagtaacgttggatgttctgttaaatacgaacaatcagaaaatgctgaatttagtctgaaaatagccagtgtgtttgttttagcttgcagattattacaatctacaagccaggggaaactagattattgggctgtaacaataagactttgacgttgggactggttcccttttgagattgtggatccgtcctgcgttgagacctttttagcggcctatgaattttcacatgggaaaaatctgcaaaaataatgcataatctttaacctcaaatcaaca

SEQ ID NO: 90211 - DNA, 690 bp, Zea Mays
ttttctgaagttagttgataaactaatgagagtatctttcaagtgactactattattttgctaaccgggttatctgacatgtgtcatacctaatgctgggtcttataagatgtaagactaacagtagctgttgctatatgttttttccattgagaaatcatcagtgctaaaatgtagaatctgctttttatttttttccctttactgaaccagaaactgcaggcaagtccccatatttagttttcagtcttattaacaatgctgttagctgtctttaacatatgggtactgcttgtttcctcagcttgagtgctctgcccaccgccgccgctactgctgtgctgctgctgctgccgccgccgccgccgccgctgctgcgccaccaccacccattctgcttctgccaccaaagagctgctgcgctggctgttgcgtcgctaaggtgccatagagcaaggaagccatagaaggcgctatgtatgcatcgaataaaagattctaatatcctgggatattcagatggttgcttgaacttgctttactcaatgcttgagcagtgcccccttcactataggggctgtgtgtggttttgtatttgttgtcataaaagatattttttgactctagctaatttgatgtctacgctattgccttccccttagcatcacactttattgtttgtataagtta

SEQ ID NO: 90212 - DNA, 648 bp, Zea Mays
gttcgagagctagagagacagagagagggacaacgactaagacaagctagttcaccgataagtgatatcgaacgaatggaccgtgtgatgcagctggtgtcggagcgtgcggtggttgtgttcacgctgagcagctgctgcatgtgccacacggtgacgcagctgatggcggacctgagcgtgaacgcgctggtgcacgagctggacagcgaccccaggggcaaggacatggagcgcgcgctgctcaagatgctgggagggagggcgcccgccgtccccgccgtcttcatcggcggcaagctcgtcggcggcaccaacaatgtcatgtcgctccacctcggcggagagctcgtgcccatgctcatgaacgctggcgccctctgggtctagactagctagacaccagggcatcgcgcgcgcgtactcgtcagtcgtcacgaacgtacctatatatatgcatggccccatgcatgcgtgagtggcgtgtgtgagaaaataaacagatcatgcgttgcatgcatggtcgaagagaggattaattaccagggctgataaacggcaggtttaatttttcccgtcctattcttctgatgatcaagttgactccagtctccagaaataactaaggcaaactgctatagcttgctg

SEQ ID NO: 90213 - DNA, 1749 bp, Zea Mays
atggcggcacccccgcccgcgccgttcctcctcctgctcgccgtggcagcagcgtcgctcgccggcgccgacgacccttaccgctacttcacctggaccgtcacctacgggccaatcagcccgctcggcaccacgcagcagtttttttcttcttctccccttccggtcccccaactcctccatgctttgcacctgagtcagtttttccccccttcttctccccttccggtcccccaactccgccagggcatcctgatcaacggccagttcccgggcccgcgcatcgactgcgtgacgaacgacaacctggtggtgaacgtggtcaacagcctggacgagccgttcctgctcacctggaacggcgtcaagcagcgcaagaactcgtggcaggacggggtagcgggcaccaactgcggcatcccgccgggcgccaactacacgtaccgcttccaggccaaggaccagatcggaaccttcttctacttcccgtccctggccctgcaccgcgccgcgggcggcttcggcgcgctcaacgtgtaccagcggcccgccatcccggtgccctacccgccgccggccggggacttcacgctgctcgtcggcgactggtacgccgccgcgtccccgcacgcggacctccggcgcgcgctggacgacggcggcggcggagcgctcccgccgcccgccgcgctgctcatcaacggcgccgccgcgtccggggccgcgccgttcgtcggcgcccaaggcgggacgtacctgttccgggtgtccaacatcgggctccgcgcctccgtcaacgtccgggtgcagggccacgcgctgcggctggtggaggtggagggcacccacccggtgcagagcgcctacgactcgctcgacgtccacgcgggccagtcgctggcgttcctcgtcacgctggaccaggcgccgctggactacgccgtggtggcgtccacgcgcttcgccgccgccgagctcacggccgtcgccacgctgcattacgcgggggccacggcccgcgcgcccggcccgctgccgccggccccgccgcccggctacggctggtcgctgggccaggcgcggtcgttccggtggaacctcacggccagcgcggcgcgccccaacccgcagggctccttccactacggcgccatcccgacgtccaggacgctggtgctggccagctccgcttccctcgacggcgccgggcgtaggcgctgcgccgtcaacgccgtgtccttcgtcgtgcccgacacgccgctcaagctcgccgacagatacgacatcgccggcgtcatcgactgggacggcctccccgcgcggctcgacggcgccgcggcggtgccgcgcgccgggacgcccgtgctcaggctcggcctgcacgagttcgtggaggtggtgttccagaacacggaggaggagctgcagtcgtggcacctcgatggatacgacttctgggttgtagggtacggcgatggccagtggaatgagacgcagcggcagacgtacaacttggtggacgcgcaggcaagacacaccgttcaggtgtaccccaacgggtggtcggcgatcctggtgtcgctggacaaccaggggatgtggaacctgcggtcggcgatgtgggaccggcagtacctcgggcagcagctctacctcagggtgtggacgccggagcagagcctctccaacgagtacgccatccccgccaacgccatcctctgcgggaaggccgccgccctcccacactga

SEQ ID NO: 90214 - DNA, 850 bp, Zea Mays
acaaattgggctagtgtcataatattgtatatcaccttcggaatgtaggctttatatgaaagaacatattaagtgggctttttcccccttcattagcatttagcaatcttaacggttttgaatcgtgttaccttaagaatgccaatataattataatgaaggctgagatttgttggacctatttcttttggatgccccaactagctttacaaaatgggtgattattttaaagagatctaatgcatcttttatttagactgtggaccagcaacaacgcctttcacagtgcttcgataagctgatgacggatgtcaataggaacttggaacctaagaatcgtgacagattcactcaaaacctgacagcatttagacgtgattttcgactgaagtaacagctccttggtaccagctatcagtttgaaggtgttcctgcatgatgtaaatactccagttaccttcttttttggaaccacctttctgtgggttgagaaaagaagagcttgtccttaggtttgccttggattggctgaagatggtcttgttgatgcatgtggtagtgaaagcagctgtaaatttcatagcatgtcattttaatcagaatggtgaaaggtggagattgtttcttttgttttttattttatattgcatccctttagcatgtacagcaaaattggtgctagaacgggggtggctgtttgcccaatttgttaagtgggaggcagtcatctcagatataattcatttgttaagaagtcaacgaggtaaaggatgtaaatgattccgttggctttgctgaatatgaaagttgaacagtaagaaggatggctcagttgcatccgctgtgcaga

SEQ ID NO: 90215 - DNA, 1098 bp, Zea Mays
atggagtgcctaacctcctcaacgttgtatggctatagttcattatcatttctttttccagcagacaagatgaagttcggcgccacatatgaggagtatctccgggcagagcgggacaaattcctagggcaatgctcccatgtagaatacaaacgcctcaaaaaggtattgaagaaatgtagagttggtcgctcactgcaagcagatggcacaaatggtgatgagcagcaggaggggagagacgaatcttcaaacatttgtgaatgcaactcatgcacattgtgtgatgagatgttctttacagaactcaacaaggaagcatcagaaatagcaggttgtttcagatctagagtacaacgtctcctccatcttcatgttccttcaggactacaacgctgtatatggcgttttaggcagtgtttcatagatgatcagcaaataatggttcaagaaggcagaatgcttctcaattatgtgaccatgaatgctattgctattcgcaaaattctcaagaaatatgacaagatacatggttctgtgagtggcagagatttcaagagcaagatgcaaactgagcatattgaactgttgcagtcaccttggctgatagagcttgctgctttccatcttaactgcgatgattcagatgctgatgaacctagagctggagagttcttcaagaatggattcttcaagaatttttcctgtgacctgagtggagcacagccactactaacaatgaccatttctgaaactctgaagtatgagtacagcctaacttgtccaatttgcttggacactttgttcaacccttatgcgcttagctgtgggcatctgttctgcaaagcctgtgcatgtggtgctgcttctgtctacatcttccagggtgtcaagtcggcacctccggaggccaagtgccctgtctgccgagcggttggtgtgtttgatcgtgctgtgcgtatgactgaactagaattgctcctcaagagaagggacaaagattactttctgcagagactgcgcgaagagcgaagtgtgatggtgaagcaggccaaagaatactgggactcacaggcaatgctatcgatggggatttga

SEQ ID NO: 90216 - DNA, 358 bp, Zea Mays
aacaaatctaggtggcttggaccgcccacgttcagtgtataaaggctgatactgtgatccttgggctatggctgttgctccccgccgaggcatgcaggggaccaattcttccctaaccattggagagagagaatggccgccaccttctagcccatggctgaagctgtcgtgctgccgcgcaattgcctcgcgactactctccagccacacctcgctgactccccctcgccggtggcctcggtggcgtcagctaggcaggtgatgtcgtcggcgcttggatggactccatggtcctcgggcgcgaaaagaggatcaccagtaggctccatcgcggctgcacaggaactggtgagagcac

SEQ ID NO: 90217 - DNA, 113 bp, Zea Mays
gtctatttttccagtacctctacttttcttctataagtgttctccgtatccttgtcaaatccaaaaggttcagccgaactacaccgaatcctttggtgcctatcacttctatc

SEQ ID NO: 90218 - DNA, 1612 bp, Zea Mays
atgacatgtggtgggccaagtcgacgcgcggccagaacatgccgccggcgtaccatggattggattctggcacacgaccacacgcacaacacaagggttccagccaggtaatggcagttttgaacggacggtaggtaggcgcagctgcgactggtgtgcatgttgcattgttggctctcaaacgaacgcgtggttgctgcgtgcacgcaatgatgctgccatgcatcgtttgggctcggttgcccggtcgtttctactcgtcaatccaccagccaaatttggagagcggccaggcggtttcgccgccgccgaccccggcgagcccccgtcgcagccccctgttattatgtataactcagctggcccgtctcctccacccacgccttccttccgcggcatccgatccatcttgggcgggcgccgcgcgtcgagggccagccaaagcttgccatggcagccgtccggtccgacagggtccaccaccaccaccgccgctccgaggcgtcgtgcccggcaacctccgcggccgtggcggcggcgagggccgatgacgccctgcgccagcgcccgcgggggctcgtgcaggtccgggagcgggatcagggcccgctgtcgacggggcaccagcacctgcaccaccatcaccaccagctgcggcggtcggcggcgttcccaccccgccgcccggggccggggcgccgccctcctcagcgctgcgaaagcgacctcaacatcagggagcaccgctcctgcagcgaggtggccggcggcaccgcggcgggctgcgccgctgtgtgctgctgcttcccctgcgtcatggtggaggtcgcggtgctcgccacggtgcgcgcgcccgcggcgctgtgccgcaaggccgcccgcgtgcgcaagggccgcaggcgctctgcctccgcgggccaggccacggagatatacgagctcctcgtggacgacaccggcgtcgtcgaggtggatgccggcgccgccaatgcggtggcgctgcccgtgaagcccgccttgcagctggaggaaaagggggagctggagaaggaggtgtgggcgaggttctacggcaccggcttttggaggagcccgtcgcagctggacgacaacgacgacaggtgatcgggacaggcccgcgagcgagctatccacaagctcctccggcgatgcgtgggcttccttcgttttccgcgggaagaagagaggatcgaggaaagggaaacatgattgtgtgttcgatactacgattacgaacttcgttttcccttcttttttgtttgtttggaaggggaaatacttctcttctattctacaacaatgtcacgtacatgcaatgtaataataaaaaatgtatgtgatatatttaacaatgtgattgatgattgataaatggaaatggaaaatgcttgggcaagtgtagttgaaaaagtagcacgacaatctggagccttggatgtgcgccgcgcacattttctcgatcgatcgaaagttttgtccatccatcttgttcaggggtctctaggtctggatgtcaggttcatctatcagcagccttggtacaggctttcccaattgggcctagggcctcatatgtcatatctacacacac

SEQ ID NO: 90219 - DNA, 2883 bp, Zea Mays
cccacctagcggtccggctggcctcgcctcctcctcctcgcttctctcagcctcaggacgacgcctgcctaggcttccaccgctgatctgaccccgaaacctcgttcccttgtccgcttcctgccgtctcagtcgtcgatacttgtcccccaaaaccccgggctccggccgatctctgcgcgttgaccggggcgccgctgatggtggcgaggatgatgcggtggccgcggccgccggcggcgcgcaagttccgcgtgcggctgttggtgcggcgtgcggaggggctcccgcctccttcaccttcgccttcgccgtcgccctcgcccgcgacagcggcctcgccggagcgcgagccgccgggcgccgcgcagcccagggccgccgtcgccgcggaggtgaggtggaaggggcccagggcctccgcgctcggctcgctgcggcgtgccgcggtcaggcgcaaccgcacacgggaggacgccggcgcggcgtgggaggaggagttcgagagcgtcgtcaccctcgcggccgcgtcgcagcgggagggcgccgcgttccacccatgggagctcgccttctgcgtcttcagcgatattaacaaaggcccaaagaacaaaccatcaattctgggaactgcttctctcaatctagcagattatgcattgacggctggagagacaattgagataattcttccgttgtctatacctggtggtgcacctgaacgagcctcatcccttcatctcactctgagtatggttgaattaagagcttttcaagaaacatctgatgcatcacagcgatctgctgcaaccttgccattgtccccatcatctggcgattcttttcctggaggaaaagatgaggtttcggttattaaagcagggttgaggaaggtaaaaattctcacagatctggtgtcgacacgaaggcctaagaagacttgccaggcaggtggcgaagataagttttgtgttaacagtgatggtgctgaatatccatgtgatactgagtctcttgatgacgatctagatgacagagtagaggaagatgaatttggagattcaactatcaggaagtctttcagttatgggtctctgcaatctgtcaactatgttggtggcctagtttatgcccatgcaaagattgatggggagcatgaggactggatatattatagtaaccgaaaaactgatgtcggtttccaagtagagaaagtattgccatcaaccacagagaatgggttgctaactgctaagcgcagtatacttccttggagaaagaggaaactgagtttacggtcgctgaaggctaaaggtgaacctctgttgaaaaaggcatatggggaagagggaggtgatgatattgacaatgatcgacgcttgctaacatcatctgatgaatctgtttcagagggatcaagaggagatggatcagcaaatactatggtgtcagaatttggtgatgacaattttgtcattggaaattgggagttgaaggagataattagccgcgatggccgtatgaagctttcatcccagatgttctttgcatcaatagaccagagaagtgagcgagcagctggggagagtgcatgtacagcacttgtggctgttattgcagactggttccaagcaaatcagaatatcatgcctatccagtcacagtttgacagccttatccgtgaaggatcactagagtggagaaacctttgtgagaatgagacgtatagagagcgttttcctgacaagcactttgatcttgaaactgtccttcatgccaagattcgcccgctgacagtttcccccagcaaatcttttatcggattcttccagcccgaaggcgatgatgacatgagtggttttgacttccttaatggtgccatgtcatttgacaacatctgggatgagattgcccaggcggcagagttctcatccagtgatagccctaacttatacatagtaagttggaatgaccacttttttctactcaaggttgagcatgatgcatattacattatcgatacccttggagaaaggctccatgaagggtgcagccaggcatacattttgaagttcgacaagaatacgacaattcacaaggtacctggggaaaagaaatcttgtagccccgactcaagtggaccaatgaaggattcttcaggttctgagagctctacgactgaccaggacagtgggaatgatactgaagaggaggtgcttgtgtcgaagggcaaagaatcatgtaaagagtacatcaagagtttcttggcagccataccaatccgggaactacaggcggacatcaagaaaggactgatggcatcaaccccattgcaccaccgcctccagattgagttccagtacacccagtcgtccccaaaagagactgcatcagccactcagcttcttaccatggaggccccctttgagttctcatggcctgaggcaccgccaacaatggaagtcacactaacatctgccgtctctgttgtgtagcttgtcaccctggtggcgaagaacccaaagacatgagacaacggcctgccctgatgttcggcatggagaacccttttttccttggttccctgcatggagggggagcctagatgaagattttggttcttctgtttgtactaatttgtttaatatgaactgactactacgggttattcctcctgggcgtaggagcgttctacctgcttttttttagaggtatcttccctcacctgctcgcttgtaatcttttggaaccctgtatgactaatcgaggaggaattcccctttgttataatgaactagatgccggcttatctgtagatgtaacatgataatatggtgccaacaagcaagaagctacgagttatgaatctgctagttacaagca

SEQ ID NO: 90220 - DNA, 2342 bp, Zea Mays
attactgacaagcgccagagcagagagggagagagagaacacacaaggggaggggtggggaagggaagggaagggaggcgcactcgtcccgtctggtatcgtctcccccggcagtgaaggagtagaaggaaggagagtaggagtaggaggggagaatgcgtgtcggcggcgggcgggacgacgacgacgaggtgtcccggaagctcaagagcatggacgtggacaagctggagaacggcggcggggaggagagcccgcggcccgccgtcaagtaccacggctggaaggccatgccgttcatcatcgggaacgagacgttcgagaagctggggacgctgggcacgtcggcgaacctgctggtgtacctgacgcaggtgttccacatgcggagcgtggacgcggcgacgctgctcaacgggctcaacggcaccaccagcctcgcccccatcatcggcgccttcctctccgacgcctacctcggccgctacctcgcgctcgccatcgcctccgtcgcctccctcatcggcatgttcctgctgacgatgacggccggcgcgaatagcctgcacccgccggagtgcagcgtgggcgagacctgcgagaaggcgacgtcgtaccagttcgcggtgctcttcgtggccttcgcgttcctggtgctgggctcggcggggatccgcccctgcagcatgcccttcggcgccgaccagttcgaccccaacacggagtctggcaagcgcggcatcaacagcttcttcaactggtactacttcaccttcacggccgccatgatgatctccgccaccgtcatcatctacgtgcagagcaacgtgagctggcccatcgggctgggcatccccacggcactcatgttcctggcatgcgtgctcttcttcatgggcacgcgcctatacgtgcgggtgacgcccgaggggagccccttcaccagcgtcgtgcaggtgctatcagccgcgctcaagaagcggtcgctgaagcagcccaaggacccgaagcaggacctcttcgacccgccgcacaccagcgccatcgtcaccaagttggcgcacacggaccagttccgctgcctcgacaaggcggccatcgtggcatccccggacgaggtgcgttccggcggcggcgcgcccgcggacccctggaggctctgcagcgtgcagcaggtggaggaggtcaagtgcctcatccgcatcgtgcccgtctggtccacggggatcatctactacgtcgccgtggtgcagcagtccacgtacgtggtgctctcggcgctgcagtccgaccgccacctcggccgcgccggcttccagatccccgccgcgtccttcaccgtcttcgccatgctcgcgcagacgctgtggatccccttctacgaccgcctcctgctgcccaagctccggaagataacgggcaaggaggaggggttcacgctgctccagcgccagggcatcggcatcgcgctctccactgtcgccatggtcatctcggccatcgtcgaggaccggcgccgtgccatcgcgctcagccagccgacgctcggcaccaccatcactggcggggcgatctcggccatgtccagcctgtggatggtgccacagctcatgatcctggggctgtcggaggccttcaacctcatcagccagatcgagttctactacaaggagatcccggagcacatgcgcagcgtggccggggcgctcgccttctgcaacctggcgctcggcaactacctcagcggcttcctggttaccatcgtgcaccggacgacggggtccgggcagaactggctggcgcaggacctcaacaagggccgcctcgacctattctactggaccatcgccggaatcggcgtctttaacttcatctacttcgtcatctgcgccaggtggtacaggttcaagggggccagcaactgatccgccgaggtaaccgtcgtctcacgatcacgacgagtgcgggcatgaatgggactcagctctatgcggtcctgatggcagtttgcttggtggcttgggtaattatgttatggccttggcagagcaacaggaaaaaaaaggggccttaaaataaggtcatgataattattttgtatctaccatagtagttgtttgatatcgacgcctctctctctctctctctctctctctctctctctctgttattactttatatttttgttactgtcctttcatttgaatctataggatggtcaaagtggctgatgaaagaggagaaagaaacaaaacagttggtttcttgttacttgtaagtggttaaactgaaatacaaatggatgtaagattgaatgaaagctttagctcagttaccagatt

SEQ ID NO: 90221 - DNA, 1879 bp, Zea Mays
gataaacaacaataatgttggcatgcatgctcactcgttggttccatgcatccaccaccagggcatgttcctgctgacgatgacggccggcgcgaatagcctgcacccgccggagtgcagcgtgggcgagacctgcgagaaggcgacgtcgtaccagttcgcggtgctcttcgtggccttcgcgttcctggtgctgggctcggcggggatccgcccctgcagcatgcccttcggcgccgaccagttcgaccccaacacggagtctggcaagcgcggcatcaacagcttcttcaactggtactacttcaccttcacggccgccatgatgatctccgccaccgtcatcatctacgtgcagagcaacgtgagctggcccatcgggctgggcatccccacggcactcatgttcctggcatgcgtgctcttcttcatgggcacgcgcctatacgtgcgggtgacgcccgaggggagccccttcaccagcgtcgtgcaggtgctatcagccgcgctcaagaagcggtcgctgaagcagcccaaggacccgaagcaggacctcttcgacccgccgcacaccagcgccatcgtcaccaagttggcgcacacggaccagttccgctgcctcgacaaggcggccatcgtggcatccccggacgaggtgcgttccggcggcggcgcgcccgcggacccctggaggctctgcagcgtgcagcaggtggaggaggtcaagtgcctcatccgcatcgtgcccgtctggtccacggggatcatctactacgtcgccgtggtgcagcagtccacgtacgtggtgctctcggcgctgcagtccgaccgccacctcggccgcgccggcttccagatccccgccgcgtccttcaccgtcttcgccatgctcgcgcagacgctgtggatccccttctacgaccgcctcctgctgcccaagctccggaagataacgggcaaggaggaggggttcacgctgctccagcgccagggcatcggcatcgcgctctccactgtcgccatggtcatctcggccatcgtcgaggaccggcgccgtgccatcgcgctcagccagccgacgctcggcaccaccatcactggcggggcgatctcggccatgtccagcctgtggatggtgccacagctcatgatcctggggctgtcggaggccttcaacctcatcagccagatcgagttctactacaaggagatcccggagcacatgcgcagcgtggccggggcgctcgccttctgcaacctggcgctcggcaactacctcagcggcttcctggttaccatcgtgcaccggacgacggggtccgggcagaactggctggcgcaggacctcaacaagggccgcctcgacctattctactggaccatcgccggaatcggcgtctttaacttcatctacttcgtcatctgcgccaggtggtacaggttcaagggggccagcaactgatccgccgaggtaaccgtcgtctcacgatcacgacgagtgcgggcatgaatgggactcagctctatgcggtcctgatggcagtttgcttggtggcttgggtaattatgttatggccttggcagagcaacaggaaaaaaaaggggccttaaaataaggtcatgataattattttgtatctaccatagtagttgtttgatatcgacgcctctctctctctctctctctctctctctctctctctgttattactttatatttttgttactgtcctttcatttgaatctataggatggtcaaagtggctgatgaaagaggagaaagaaacaaaacagttggtttcttgttacttgtaagtggttaaactgaaatacaaatggatgtaagattgaatgaaagctttagctcagttaccagatt

SEQ ID NO: 90222 - DNA, 176 bp, Zea Mays
ttggaaacttgaactcacaaagtttctcttatttggtctctgtatggtggaattatgtcattttataatctttgttcgttcagtcagtcgttgtgaactctcttctaatcgctcacttgattggccatgttgtatcaagacatattgcatggagtaaaaaataatatcagttagcc

SEQ ID NO: 90223 - DNA, 855 bp, Zea Mays
atgagacacccaattatggatgttggaacagtttttaccgatttgaagcaatttagagcagcactaaagaatttgatcatctgtgagggtagagaagttatgagacctaagaatgatcctgtgcaagtttcagcaaagtgcaaaattgtagactgtgcttggtatatatatgcctctagacttccagatggtcgttccttcaacatcaagaagtatgtaaaggaccacacttgtgggaaaagtcacacggtgaagcaaatggatgctaactggattggcacagagtatgagcattttttcagaagtgagaaagattggcgagttaagtcccttagggacaccgtccttagggacacacagggtctaaaagacggtgttagggccattttcccacatgtagagcatatatattgtttgaggcacttgtatgctaacttttcaaaggctgggttcaagggtccccgactaaaagagctaatggatagggctgcctatgcgtacaaggagtttgatttcaaacaagctatggatgatattaagaaagaaaacactagagcatggaaatggttgtttgacattgataatgatgcaaagaaggacacatggttcataactccaaattatcagaaaaagcttgagtttgagaagaaaaatgcttcatattgtagggccgtctgtgctaggcatgggatatggcaagtcacaagtggagacagtcaatatgttgttgatctcaacaatcacaaatgtggatgctacaagtggggtgttactggagtgccatgctcacatggagtggctgctattcatgagttcaaacacaagccagaaaactatgtcattattcttcactag

SEQ ID NO: 90224 - DNA, 99 bp, Zea Mays
gtcctacatcatcctttcactgcaccaaatcctaaggatatgaacgatctaccatcaacccgtgctctggtgtatgacatgatttacaatggtgtgaag

SEQ ID NO: 90225 - DNA, 1035 bp, Zea Mays
gttgcgcgagcccacacgtcagatcttcttgtgtcgcaagacaggcccacaaactgggactaatggttcgagagtcgagacttcgagtgccttctcccttataaaaccgaacgcccagggccctccatgttcaatctcgttgtccgttgtactctctctctctattcgttccccgcctcaccccgagccagccgtctcgctagggtttcgccgccgccgccgccatgcctcgccgcagctcaggtctgccccacgcccagctccccgtgctgctccagtgaggaacccgccacagccagcacgccaggctcctcctccagctcctgttcgagatggtggtggctccatgtttggaggaattgggtccaccattgctcaaggtatggcgtttggcacgggtagtgccatggcacacagggctgttgatgctgtattaggtccccggaccattcagcatgagactgttgcctcagaagctgctgctgctgcccctgcccctccagtgatgaatgctgatgcttgcagcatccattctaaggctttccaagattgtctcaacaactatggcagcgagatcagcaagtgccagttctacctagacatgctgaacgagtgccgccgtggtggtgtgtctgcctaagctgcctctggggttattcatggattttctttcggtgatgctatctcattaataagataccgtgaaacttttgtctccacagcttgaagctaaacttcctgggattaatacattttgttatcctatgctgttggagcagacttttgtctcttgatcataaatatttaaacgaacctgttatgttggaatatgttgtacatgcgtacgaccatcggctccacagccattgggatgcgatgggttcatctatcagtttacaaaaccgttcggttttggcggtaaatcggtcagtttactgaaaccgccgctgcccggttttggttaaccatcgttttttaaattttgcgctaaattttaaaaaaaattgaaaaaaatcataaaaaacaaaaaaactg

SEQ ID NO: 90226 - DNA, 1039 bp, Zea Mays
gttgcgcgagcccacacgtcagatcttcttgtgtcgcaagacaggcccacaaactgggactaatggttcgagagtcgagacttcgagtgccttctcccttataaaaccgaacgcccagggccctccatgttcaatctcgttgtccgttgtactctctctctctattcgttccccgcctcaccccgagccagccgtctcgctagggtttcgccgccgccgccgccatgcctcgccgcagctcaggaaggtctgccccacgcccagctccccgtgctgctccagtgaggaacccgccacagccagcacgccaggctcctcctccagctcctgttcgagatggtggtggctccatgtttggaggaattgggtccaccattgctcaaggtatggcgtttggcacgggtagtgccatggcacacagggctgttgatgctgtattaggtccccggaccattcagcatgagactgttgcctcagaagctgctgctgctgcccctgcccctccagtgatgaatgctgatgcttgcagcatccattctaaggctttccaagattgtctcaacaactatggcagcgagatcagcaagtgccagttctacctagacatgctgaacgagtgccgccgtggtggtgtgtctgcctaagctgcctctggggttattcatggattttctttcggtgatgctatctcattaataagataccgtgaaacttttgtctccacagcttgaagctaaacttcctgggattaatacattttgttatcctatgctgttggagcagacttttgtctcttgatcataaatatttaaacgaacctgttatgttggaatatgttgtacatgcgtacgaccatcggctccacagccattgggatgcgatgggttcatctatcagtttacaaaaccgttcggttttggcggtaaatcggtcagtttactgaaaccgccgctgcccggttttggttaaccatcgttttttaaattttgcgctaaattttaaaaaaaattgaaaaaaatcataaaaaacaaaaaaactg

SEQ ID NO: 90227 - DNA, 2994 bp, Zea Mays
gttgcgcgagcccacacgtcagatcttcttgtgtcgcaagacaggcccacaaactgggactaatggttcgagagtcgagacttcgagtgccttctcccttataaaaccgaacgcccagggccctccatgttcaatctcgttgtccgttgtactctctctctctattcgttccccgcctcaccccgagccagccgtctcgctagggtttcgccgccgccgccgccatgcctcgccgcagctcaggtctgccccacgcccagctccccgtgctgctccagtgaggaacccgccacagccagcacgccaggctcctcctccagctcctgttcgagatggtggtggctccatgtttggaggaattgggtccaccattgctcaaggtatggcgtttggcacgggtagtgccatggcacacagggctgttgatgctgtattaggtccccggaccattcagcatgagactgttgcctcagaagctgctgctgctgcccctgcccctccagtgatgaatgctgatgcttgcagcatccattctaaggctttccaagattgtctcaacaactatggcagcgagatcagcaagtgccagttctacctagacatgctgaacgagtgccgccgtggtggtgtgtctgcctaagctgcctctggggttattcatggattttctttcggtgatgctatctcattaataagataccgtgaaacttttgtctccacagcttgaagctaaacttcctgggattaatacattttgttatcctatgctgttggagcagacttttgtctcttgatcataaatatttaaacgaacctgttatgttggaatatgttgtacatgcgtacgaccatcggctccacagccattgggatgcgatgggttcatctatcagtttacaaaaccgttcggttttggcggtaaatcggtcagtttactgaaaccgccgctgcccggttttggttaaccatcgttttttaaattttgcgctaaattttaaaaaaaattgaaaaaaatcataaaaaacaaaaaaactgtcaatcaacctcattttttggacaggtaaactgctattttttttgcgtatttgatgataagattgagtttcagtttatgcatttagtggcaagtttaggcttattagttttgtttactgttatatactaatgtgaagataatttaatgatagatgctattttcctctagtgctataggtgatactagatcatatggtctagggggagtgggatgggggaccataggtgatactagataatacatgagtgttgtgaaacaagtcgatctgtcgttggagaactataaaaagacttatatttgagtattgtgaagttcgctggttgtttgttgcatgataattggaatttatgcatgtatatgtatattgtatgtcattttgttgaacacatattgtatggaccaattattctttacttcacaacgtgaattgagcaaattagaaatgaacaatgtcaaaaattttctttttctttgtaaaatgcaaaaaaccggttcgtgtgatatgtttatcacgggttttggcggtttactgcttggaaatctgttttaaatttggtttaacttgacctagccaaatcggagggtttttagcggtttaccgtcaggacaccgttatcgttgggtattatctggagcaggctggctcgataaggttcgatgcacctggacacttgccttatctcgaaccagtgctatgcgtgagtggttgactgtgcgtggttggttggcggttggcacaaccgcgtatcatagtttggcagccgtaagtcaaggataccacacattctgacgcagctgcttggttttttacgctaatagctataaggccatttctagtgggagtttcatcatagttttattcttattaaatgtgatgacacaacaccatatatttgatgacatgtcactgtatttatgatgagagagatggagagagtttcacgggaggagagatgagacgaaactcaggagaaaagttgatgtgtcagttttagaaaccgtacaataaaactttcactaggaatagcctaaagctcgcaaccattttttttaacttgttgagatcgtgtcaaacacttcacccatatgattatctgaaacattattttacaatatagaagtttgtggggggacaaaaagacaactgaagcgatggtgtggctaccacatatgacgcggaaaccaagcatcaccatcaataaataaaatgttgtagcccatcttgcataattgacatacaaaaatcaagttgtagcatagagattctataagaaatacattagaaatgcaatggttaggtgatataacaattttatccaagcctttgaccaaatcttgattcccgtccccaaatgtgacgacatcgagactactggagttgctacatatagatctcttcaggtttgttgattatcttaacatcgaggaaagtaagtatgatctcgttattgttgatgactattctcgctttacttgagtattctttttgcaggataaatctgaaacccaaggaaccctcaagcacttcttaaggcgggctcaaaatgagatttagctaaaggtgaagaagatccggagtgacaacggatcagaatgcaagaaccttcaagtataagagtaccttgaggaggaagacatcaagtatgagttctctgccccctacactccacaacaaaatggcttagtggagaggaagaataggacgcttatcgacatggcaagaactatgctgggagaatacaagacgctggagtgtttttggtcggaagctatgaatacaacttgtcatgctataaattgactatcttcatcgcctcctcaagaagacggtatacgagctcctaatggggaacaaacctaatgtttcttactttcttgtatttgggagcatatgctacattttgattaagaaatgtatacattcaaagtttgctactaaagccattgaaggatttttt

SEQ ID NO: 90228 - DNA, 2998 bp, Zea Mays
gttgcgcgagcccacacgtcagatcttcttgtgtcgcaagacaggcccacaaactgggactaatggttcgagagtcgagacttcgagtgccttctcccttataaaaccgaacgcccagggccctccatgttcaatctcgttgtccgttgtactctctctctctattcgttccccgcctcaccccgagccagccgtctcgctagggtttcgccgccgccgccgccatgcctcgccgcagctcaggaaggtctgccccacgcccagctccccgtgctgctccagtgaggaacccgccacagccagcacgccaggctcctcctccagctcctgttcgagatggtggtggctccatgtttggaggaattgggtccaccattgctcaaggtatggcgtttggcacgggtagtgccatggcacacagggctgttgatgctgtattaggtccccggaccattcagcatgagactgttgcctcagaagctgctgctgctgcccctgcccctccagtgatgaatgctgatgcttgcagcatccattctaaggctttccaagattgtctcaacaactatggcagcgagatcagcaagtgccagttctacctagacatgctgaacgagtgccgccgtggtggtgtgtctgcctaagctgcctctggggttattcatggattttctttcggtgatgctatctcattaataagataccgtgaaacttttgtctccacagcttgaagctaaacttcctgggattaatacattttgttatcctatgctgttggagcagacttttgtctcttgatcataaatatttaaacgaacctgttatgttggaatatgttgtacatgcgtacgaccatcggctccacagccattgggatgcgatgggttcatctatcagtttacaaaaccgttcggttttggcggtaaatcggtcagtttactgaaaccgccgctgcccggttttggttaaccatcgttttttaaattttgcgctaaattttaaaaaaaattgaaaaaaatcataaaaaacaaaaaaactgtcaatcaacctcattttttggacaggtaaactgctattttttttgcgtatttgatgataagattgagtttcagtttatgcatttagtggcaagtttaggcttattagttttgtttactgttatatactaatgtgaagataatttaatgatagatgctattttcctctagtgctataggtgatactagatcatatggtctagggggagtgggatgggggaccataggtgatactagataatacatgagtgttgtgaaacaagtcgatctgtcgttggagaactataaaaagacttatatttgagtattgtgaagttcgctggttgtttgttgcatgataattggaatttatgcatgtatatgtatattgtatgtcattttgttgaacacatattgtatggaccaattattctttacttcacaacgtgaattgagcaaattagaaatgaacaatgtcaaaaattttctttttctttgtaaaatgcaaaaaaccggttcgtgtgatatgtttatcacgggttttggcggtttactgcttggaaatctgttttaaatttggtttaacttgacctagccaaatcggagggtttttagcggtttaccgtcaggacaccgttatcgttgggtattatctggagcaggctggctcgataaggttcgatgcacctggacacttgccttatctcgaaccagtgctatgcgtgagtggttgactgtgcgtggttggttggcggttggcacaaccgcgtatcatagtttggcagccgtaagtcaaggataccacacattctgacgcagctgcttggttttttacgctaatagctataaggccatttctagtgggagtttcatcatagttttattcttattaaatgtgatgacacaacaccatatatttgatgacatgtcactgtatttatgatgagagagatggagagagtttcacgggaggagagatgagacgaaactcaggagaaaagttgatgtgtcagttttagaaaccgtacaataaaactttcactaggaatagcctaaagctcgcaaccattttttttaacttgttgagatcgtgtcaaacacttcacccatatgattatctgaaacattattttacaatatagaagtttgtggggggacaaaaagacaactgaagcgatggtgtggctaccacatatgacgcggaaaccaagcatcaccatcaataaataaaatgttgtagcccatcttgcataattgacatacaaaaatcaagttgtagcatagagattctataagaaatacattagaaatgcaatggttaggtgatataacaattttatccaagcctttgaccaaatcttgattcccgtccccaaatgtgacgacatcgagactactggagttgctacatatagatctcttcaggtttgttgattatcttaacatcgaggaaagtaagtatgatctcgttattgttgatgactattctcgctttacttgagtattctttttgcaggataaatctgaaacccaaggaaccctcaagcacttcttaaggcgggctcaaaatgagatttagctaaaggtgaagaagatccggagtgacaacggatcagaatgcaagaaccttcaagtataagagtaccttgaggaggaagacatcaagtatgagttctctgccccctacactccacaacaaaatggcttagtggagaggaagaataggacgcttatcgacatggcaagaactatgctgggagaatacaagacgctggagtgtttttggtcggaagctatgaatacaacttgtcatgctataaattgactatcttcatcgcctcctcaagaagacggtatacgagctcctaatggggaacaaacctaatgtttcttactttcttgtatttgggagcatatgctacattttgattaagaaatgtatacattcaaagtttgctactaaagccattgaaggatttttt

SEQ ID NO: 90229 - DNA, 890 bp, Zea Mays
gcaagacaggcccacaaactgggactaatggttcgagagtcgagacttcgagtgccttctcccttataaaaccgaacgcccagggccctccatgttcaatctcgttgtccgttgtactctctctctctattcgttccccgcctcaccccgagccagccgtctcgctagggtttcgccgccgccgccgccatgcctcgccgcagctcaggaaggtctgccccacgcccagctccccgtgctgctccagtgaggaacccgccacagccagcacgccaggctcctcctccagctcctgttcgagatggtggtggctccatgtttggaggaattgggtccaccattgctcaaggtatggcgtttggcacgggtagtgccatggcacacagggctgttgatgctgtattaggtccccggaccattcagcatgagactgttgcctcagaagctgctgctgctgcccctgcccctccagtgatgaatgctgatgcttgcagcatccattctaaggctttccaagatgtatgtttgcttgccactttatgctccctaatttttcctcagtttgatgcggtagtaaaggttgtgtaacttctttagttgtacaagagccgcatgttgtcattcacatttgtttgatatatattcctttcatcttgaaaactccactttaaataaagggtctaattttgttaatgtgtgaagtgactgatatatggtccttatctgttatttcaacatgtcagaacagttaaattgatatttttgtaactattagatatctttgtttttagccgcggtcgttcgttctcacatgggctaccgtgccgctgtgtatgtgtggggcagtggttctggggttttctacaatgtcggggctgccttacaacccc

SEQ ID NO: 90230 - DNA, 1004 bp, Zea Mays
gcaagacaggcccacaaactgggactaatggttcgagagtcgagacttcgagtgccttctcccttataaaaccgaacgcccagggccctccatgttcaatctcgttgtccgttgtactctctctctctattcgttccccgcctcaccccgagccagccgtctcgctagggtttcgccgccgccgccgccatgcctcgccgcagctcaggaaggtctgccccacgcccagctccccgtgctgctccagtgaggaacccgccacagccaggtactcaagctcctcctccagctcctgttcgagatggtggtggctccatgtttggaggaattgggtccaccattgctcaaggtatggcgtttggcacgggtagtgccatggcacacagggctgttgatgctgtattaggtccccggaccattcagcatgagactgttgcctcagaagctgctgctgctgcccctgcccctccagtgatgaatgctgatgcttgcagcatccattctaaggctttccaagattgtctcaacaactatggcagcgagatcagcaagtgccagttctacctagacatgctgaacgagtgccgccgtggtggtgtgtctgcctaagctgcctctggggttattcatggattttctttcggtgatgctatctcattaataagataccgtgaaacttttgtctccacagcttgaagctaaacttcctgggattaatacattttgttatcctatgctgttggagcagacttttgtctcttgatcataaatatttaaacgaacctgttatgttggaatatgttgtacatgcgtacgaccatcggctccacagccattgggatgcgatgggttcatctatcagtttacaaaaccgttcggttttggcggtaaatcggtcagtttactgaaaccgccgctgcccggttttggttaaccatcgttttttaaattttgcgctaaattttaaaaaaaattgaaaaaaatcataaaaaacaaaaaaactg

SEQ ID NO: 90231 - DNA, 724 bp, Zea Mays
tccttttctggatagcttcagctataaacattatcataatccttgaattgaatgaacatattctttcaggtatggcgtttggcacgggtagtgccatggcacacagggctgttgatgctgtattaggtccccggaccattcagcatgagactgttgcctcagaagctgctgctgctgcccctgcccctccagtgatgaatgctgatgcttgcagcatccattctaaggctttccaagattgtctcaacaactatggcagcgagatcagcaagtgccagttctacctagacatgctgaacgagtgccgccgtggtggtgtgtctgcctaagctgcctctggggttattcatggattttctttcggtgatgctatctcattaataagataccgtgaaacttttgtctccacagcttgaagctaaacttcctgggattaatacattttgttatcctatgctgttggagcagacttttgtctcttgatcataaatatttaaacgaacctgttatgttggaatatgttgtacatgcgtacgaccatcggctccacagccattgggatgcgatgggttcatctatcagtttacaaaaccgttcggttttggcggtaaatcggtcagtttactgaaaccgccgctgcccggttttggttaaccatcgttttttaaattttgcgctaaattttaaaaaaaattgaaaaaaatcataaaaaacaaaaaaactg

SEQ ID NO: 90232 - DNA, 845 bp, Zea Mays
ccataaccataagctaaaaaaaccaaagaggctaatcttggttagagtcgagactcgagacttcgagttccctctccgttataaaaccgaacgctcagggcgctccgtgttcaatctccttgcccgttgtgctctctctcttcattcgttcccggcctcaccccgagccagtcgtctcgctagggtttcgccgccgccgccgccatgcctcgccgcagctcaggtaaccgtcctttctggcgcctcataaggtttcgtttcgagatttggttactcctttctggatgccctgatctggggttcgtgcgcgtaggttttggcgtttgtagatttgattcagtcggtatgacgttgttgctcgcttgtgttagtatgtgcaaattatattgttcctgtgggtgtaggaatagccggatctgtttctagcgttcaatggctgggtcgcgcctctttagataattgtgagaaatgcgcagctgttactactcggcagagaaccgattgcttcttgaataaccggttgcatatactatttcttcgcaggcggttcagacaggggcataaagaaaatctggatcccgacggggatcgtattcctgactgggaagggttatttccattgaccctttctcgttcggattctgaatcccctcgagggaagggttatttcctttgatccttcctcgttcggattcacatagatttatactactgtgttttcttatgaggcgtatattcttgaaagttattcacctgcgtagtggattgaatcttctgatgttgcatttatgtagctgtattgtcagttgatcagtgcctctttgagtaaccattacagtccctgg

SEQ ID NO: 90233 - DNA, 1007 bp, Zea Mays
ccataaccataagctaaaaaaaccaaagaggctaatcttggttagagtcgagactcgagacttcgagttccctctccgttataaaaccgaacgctcagggcgctccgtgttcaatctccttgcccgttgtgctctctctcttcattcgttcccggcctcaccccgagccagtcgtctcgctagggtttcgccgccgccgccgccatgcctcgccgcagctcaggaaggtctgccccacgcccagctccccgtgctgcttcactgaggaacccgccacagccagcacgccaggctcctcctccagctcctgttcgagatggtggtggctccatgtttggaggaattgggtccaccattgctcaaggtatggcgtttggcacgggtagtgccatggcacacagggctgttgactctgtattaggtccccggaccatccagcatgagactcttgccacagaagctcctgctgctgcccctgctgctccagcgatgaatgctgatgcttgcagcttccattctaaggctttccaagattgtctgaacaactatggcagcgagatcagcaagtgccagttctacctagacatgctgaacgagtgccgccgtggtggtgtgtctgtctaagctgcctctgggattattcatggattttcttttcggatgagggtatctcattaataagacaccgtgaaacttcgaccatctccacagcttgaaaccatacttcctgggattaatttattttgttatcctatggtgttggaacagacttttgtctcttgatcataaatatttaaacgaacctgttatgttggagtatgttggtgtgtgttttttccgatcgtacatgcatacgaccatcggctccacaggcgttgggatgggattgattcatctatccacgtctggagcaggctggctagacgaggttcgatgcacctggacgctcgccttatctcggaccagtgctgtgcgtggttggcggtcggcgcaaccaaagttgcttt

SEQ ID NO: 90234 - DNA, 2287 bp, Zea Mays
ccataaccataagctaaaaaaaccaaagaggctaatcttggttagagtcgagactcgagacttcgagttccctctccgttataaaaccgaacgctcagggcgctccgtgttcaatctccttgcccgttgtgctctctctcttcattcgttcccggcctcaccccgagccagtcgtctcgctagggtttcgccgccgccgccgccatgcctcgccgcagctcaggcggttcagacaggggcataaagaaaatctggatcccgacggggatcgtattcctgactgggaagggttatttccattgaccctttctcgttcggattctgaatcccctcgagggaagggttatttcctttgatccttcctcgttcggattcacatagatttatactactgtgttttcttatgaggcgtatattcttgaaagttattcacctgcgtagtggattgaatcttctgatgttgcatttatgtagctgtattgtcagttgatcagtgcctctttgagtaaccattacagtccctgggtactgtcttggtttagttagggggcgcatagcaatggccatctgataaccactcaggccttttgagggggcgcctctgtcataccaagaattgcccccaagcagccctagacatgtatctacattatcacaatgcaatgctttttttcagttgttttttttgacttactaccatatgccttttgagtagccattatagttgtatatactatcttggtttagttaggaggcacatagagatacgtgacaaagtcaccttggctgatcagagcggcacatcaagcatttgttggatgtgtttttttttttgaaaaaccttacattgtagtgtcatcatctttatttttgcttctctgcttatgaggtttattgaatggtatacatgttatgcaaaacattcgtaagactgcttctgtacttgattaaaatcaaggtttcagggagcaaaggaatttctgaatatatttgttataggactatgattttagttactaacagtattacttagtcgcaaagaatgtgcctcttgaataaccagttgctttgattactatgcttgcatttggttcagacaggggcacataataaatgggatcatttgaggaaggattcttgtctttttttgtcccttcttagattgattcctatagttaattgctattctcgtcatcataattttgctggtggaggatgtggctgttccaggtttatagtatcatggtttgttatcttgttgcatctatctctctaccattgttgtgtgctgatctttgtcttaaactgtgtttacaataaaccaagccactttgtttgtgtaattctttttttgcttattttttgccattatattgtcaggaaggtctgccccacgcccagctccccgtgctgcttcactgaggaacccgccacagccagcacgccaggctcctcctccagctcctgttcgagatggtggtggctccatgtttggaggaattgggtccaccattgctcaaggtggtatggcgtttggcacgggtagtgccatggcacacagggctgttgactctgtattaggtccccggaccatccagcatgagactcttgccacagaagctcctgctgctgcccctgctgctccagcgatgaatgctgatgcttgcagcttccattctaaggctttccaagattgtctgaacaactatggcagcgagatcagcaagtgccagttctacctagacatgctgaacgagtgccgccgtggtggtgtgtctgtctaagctgcctctgggattattcatggattttcttttcggatgagggtatctcattaataagacaccgtgaaacttcgaccatctccacagcttgaaaccatacttcctgggattaatttattttgttatcctatggtgttggaacagacttttgtctcttgatcataaatatttaaacgaacctgttatgttggagtatgttggtgtgtgttttttccgatcgtacatgcatacgaccatcggctccacaggcgttgggatgggattgattcatctatccacgtctggagcaggctggctagacgaggttcgatgcacctggacgctcgccttatctcggaccagtgctgtgcgtggttggcggtcggcgcaaccaaagttgcttttggcgatgtttggttgcccgccgtaaggctgccacacattctgacgcaactacctttatagttatttaaattattttttacaccgtagactactgtttacaggcggccgatttttttaag

SEQ ID NO: 90235 - DNA, 2010 bp, Zea Mays
ccataaccataagctaaaaaaaccaaagaggctaatcttggttagagtcgagactcgagacttcgagttccctctccgttataaaaccgaacgctcagggcgctccgtgttcaatctccttgcccgttgtgctctctctcttcattcgttcccggcctcaccccgagccagtcgtctcgctagggtttcgccgccgccgccgccatgcctcgccgcagctcaggcggttcagacaggggcataaagaaaatctggatcccgacggggatcgtattcctgactgggaagggttatttccattgaccctttctcgttcggattctgaatcccctcgagggaagggttatttcctttgatccttcctcgttcggattcacatagatttatactactgtgttttcttatgaggcgtatattcttgaaagttattcacctgcgtagtggattgaatcttctgatgttgcatttatgtagctgtattgtcagttgatcagtgcctctttgagtaaccattacagtccctgggtactgtcttggtttagttagggggcgcatagcaatggccatctgataaccactcaggccttttgagggggcgcctctgtcataccaagaattgcccccaagcagccctagacatgtatctacattatcacaatgcaatgctttttttcagttgttttttttgacttactaccatatgccttttgagtagccattatagttgtatatactatcttggtttagttaggaggcacatagagatacgtgacaaagtcaccttggctgatcagagcggcacatcaagcatttgttggatgtgtttttttttttgaaaaaccttacattgtagtgtcatcatctttatttttgcttctctgcttatgaggtttattgaatggtatacatgttatgcaaaacattcgtaagactgcttctgtacttgattaaaatcaaggtttcagggagcaaaggaatttctgaatatatttgttataggactatgattttagttactaacagtattacttagtcgcaaagaatgtgcctcttgaataaccagttgctttgattactatgcttgcatttggttcagacaggggcacataataaatgggatcatttgaggaaggattcttgtctttttttgtcccttcttagattgattcctatagttaattgctattctcgtcatcataattttgctggtggaggatgtggctgttccaggtttatagtatcatggtttgttatcttgttgcatctatctctctaccattgttgtgtgctgatctttgtcttaaactgtgtttacaataaaccaagccactttgtttgtgtaattctttttttgcttattttttgccattatattgtcaggaaggtctgccccacgcccagctccccgtgctgcttcactgaggaacccgccacagccagcacgccaggctcctcctccagctcctgttcgagatggtggtggctccatgtttggaggaattgggtccaccattgctcaaggtatggcgtttggcacgggtagtgccatggcacacagggctgttgactctgtattaggtccccggaccatccagcatgagactcttgccacagaagctcctgctgctgcccctgctgctccagcgatgaatgctgatgcttgcagcttccattctaaggctttccaagattgtctgaacaactatggcagcgagatcagcaagtgccagttctacctagacatgctgaacgagtgccgccgtggtggtgtgtctgtctaagctgcctctgggattattcatggattttcttttcggatgagggtatctcattaataagacaccgtgaaacttcgaccatctccacagcttgaaaccatacttcctgggattaatttattttgttatcctatggtgttggaacagacttttgtctcttgatcataaatatttaaacgaacctgttatgttggaaaaatcttaacaagatagaactcatacaaagaaaaga

SEQ ID NO: 90236 - DNA, 797 bp, Zea Mays
gagacttcgagttccctctccgttataaaaccgaacgctcagggcgctccgtgttcaatctccttgcccgttgtgctctctctcttcattcgttcccggcctcaccccgagccagtcgtctcgctagggtttcgccgccgccgccgccatgcctcgccgcagctcaggaaggtctgccccacgcccagctccccgtgctgcttcactgaggaacccgccacagccagcacgccaggctcctcctccagctcctgttcgagatggtggtggctccatgtttggaggaattgggtccaccattgctcaaggtatggcgtttggcacgggtagtgccatggcacacagggctgttgactctgtattaggtccccggaccatccagcatgagactcttgccacagaagctcctgctgctgcccctgctgctccagcgatgaatgctgatgcttgcagcttccattctaaggctttccaagattgtctgaacaactatggcagcgagatcagcaagtgccagttctacctagacatgctgaacgagtgccgccgtggtggtgtgtctgtctaagctgcctctgggattattcatggattttcttttcggatgagggtatctcattaataagacaccgtgaaacttcgaccatctccacagcttgaaaccatacttcctgggattaatttattttgttatcctatggtgttggaacagacttttgtctcttgatcataaatatttaaacgaacctgttatgttggaaaaatcttaacaagatagaactcatacaaagaaaaga

SEQ ID NO: 90237 - DNA, 952 bp, Zea Mays
atgcttgcatttggttcagacaggggcacataataaatgggatcatttgaggaaggattcttgtctttttttgtcccttcttagattgattcctatagttaattgctattctcgtcatcataattttgctggtggaggatgtggctgttccaggtttatagtatcatggaaggtctgccccacgcccagctccccgtgctgcttcactgaggaacccgccacagccagcacgccaggctcctcctccagctcctgttcgagatggtggtggctccatgtttggaggaattgggtccaccattgctcaaggtatggcgtttggcacgggtagtgccatggcacacagggctgttgactctgtattaggtccccggaccatccagcatgagactcttgccacagaagctcctgctgctgcccctgctgctccagcgatgaatgctgatgcttgcagcttccattctaaggctttccaagattgtctgaacaactatggcagcgagatcagcaagtgccagttctacctagacatgctgaacgagtgccgccgtggtggtgtgtctgtctaagctgcctctgggattattcatggattttcttttcggatgagggtatctcattaataagacaccgtgaaacttcgaccatctccacagcttgaaaccatacttcctgggattaatttattttgttatcctatggtgttggaacagacttttgtctcttgatcataaatatttaaacgaacctgttatgttggagtatgttggtgtgtgttttttccgatcgtacatgcatacgaccatcggctccacaggcgttgggatgggattgattcatctatccacgtctggagcaggctggctagacgaggttcgatgcacctggacgctcgccttatctcggaccagtgctgtgcgtggttggcggtcggcgcaaccaaagttgcttt

SEQ ID NO: 90238 - DNA, 585 bp, Zea Mays
atgccggaggaggcggtcggcgatgctcatgaggatgtccttgctgtactccgggtggccctggacgcccatggcgcggtcccccaggcggaacatctcgacgcgggtctggtccgaccgcgccagcacctcggcgccggcgggcagctcccacacctcgtcgtggtggaactcgatcaccggcatgtgcaccggcagcttcagcggcgcgaacagccgcgccgccgccgccgtcgggtggatgcagctcaccccgatgtcccagcccttggtcgaccgcccggtgcgcccgcccagcgcccggcacaggatgcggtcaaggcgtgccctgaattcagacgaagtggtgagattgcgtgcgctgggacttgggagggcacacgcagtcgcgcacgccctttgggtgattggtccggccggccccgggccggtacgacgctagcagtagcatcgtcacctcaaaagcaaccgctgcgcgagacgcgccacgccatctgcgttcttccttcctcctccggtccccggggcgggatttggttcaaaatagaacggaattaccggggttccgtttggaggaactgctaa

SEQ ID NO: 90239 - DNA, 2412 bp, Zea Mays
caaatctctaaccgctgccaccgatccatgccgtcgtcacccccgcggctggcgatggagcatcgccgccgccagcctccagcgccctccgcgcccacctacctcgccgcaacgctcgccttcctcaccctcgccgcggtcgcctacttccgcgccgccttcccccgcttcccgcacccgccggccacccgcgggtgccgccacgacgccgaggggtcctggtccgccggtgtcttccttggggactcccccttctccctcaagcccgtcgagcactggaggatctctagtggccctggagcggcatggccagtggcgaatccggtggtgacgtgcgccgatgtggcggaggctggattccctagcagctttgtcgccaacccatttctcttcatacagggagactcaatttatatgtttttcgagaccaagaaccccattgcgtcacaaggcgacattgctgctgccgtgagcaaggatgccggcacaacatggcagcagttgggtgtagtgttggatgaggagtggcacctttcttatccatatgtgtttagttatggaaacgagacttacatgatgcctgaaagcagcaagaaaggaaaccttaagttatatcgtgccgttgactttccccttaagtgggagttagaaaaggtccttctggagagaccccttgtagattcggtcatcatacattccaagggttcctattggctcattggatcagatttaagttcttatggtgcaaaacagacaggtgaactctttatttggtacagcagctctcctcttggtccttggagttcacacaagcagaacccaattcgtaatacaggcaacaggccaagtgccagaaatggaggcaggccattcatttacaatgacaatctttatcgcgtaggcaaagatcgtggtggtggatctggctataccatccaagtattcaaagttcaagtcctaacagaagatcattacaaggaagttgcagtcccatttgtgcttgacaaacccctcaagggccgaaacgcatggaatggtgcaaggtcccatcactttgatgtccagcagcttccatcaagtcaacattggattggggtaatggatggtgacagagtgctctcaggtgactcaattcaccatctgactataggctgtatgttttatggtgctgcttgcattttggtccttctacttggtgggcttattggtgcaatcaagtgcaccttaccacttagatggtatttaccacatactgagaaacggagtgacaactttgatatagagaagcaggtattgctgtgccataagcttagttggcttatctgcaatgtgaacaggttgggatctcttattggtgggaaaattaattacagagcttggaaagaccgagtttatatagcttttataatattggtatcggtagtcctaacttttttggggactaactacatctttggtggcgatggtgcagaagagccatatcctattaggggtaggtattcacaattcacattgttgaccatgacctatgacgcccgattttggaatctgaagatgtttgtggagcattactctaaatgtgcatcggtgagggagattgtagtggtctggaacaaaggtcgagccccagtgcaaggtgaattgaagtctatggtgcctgttaggatcagagttgaaaacaataatactctgaacaacagattcaaaattgacaaagaaattaaaacaggagctgttatggagcttgatgatgatatcatgatggcatgtgatgacttagagcgtgggttcaaggtatggagggagcaccctgatagaattgtcggatactatccacgccttgctgagggctggcctctggaataccgcaatgagaggtatgctcggcaacaaggaggttataacatcatactaacaggagcagcatttatggatcatgaactagcctttaagaggtactggagcaaagaggctgagattggcaggcagattgttgatagtttctttaattgtgaggatattctcctaaatttcttatttgcgaatgcaagctcggcaagcacagtggagtatgtaaaaccagcttgggcaattgatatgtctaagttctcaggagtagccattagtcgaaacacgcaggaacattaccatgctaggagcaaatgccttgctatgttttcaggaatctttgggaatttgacttccaagaggttttttagcagccggggtgatggctgggatgtatagtggcatagataattaggtagctttttcttgatccttaaaatgtctctttagtttataaggtagtcaggtgagtattggaccagtgcagtgtcattcatgtaactattaactgtcaccagtttgctgtataagtttagcacatatccactatctgtaagtttttca

SEQ ID NO: 90240 - DNA, 354 bp, Zea Mays
atgaaggtggtgtctccggagcgagcatggtggagtcctcgttcctcggagttgaggtgggcaaccagacctgcggcgacagagtctggtgaggaggaggggagcgcactggccccagaggacaggcacgaagagcggggcgcgcacgacgcgtgggtagtccgccatggtcgtcgatggaagggcacggtgggcgaggatttcggcgtggcgcaggggcgacgaagatgcaaggaggatgcgcggcgcttcggtagcgatctcatcgttggaagggcggttagggcgacgaagaccggggcgtgcgcggcgtggtggcggtgggagaggttttcggcgcggcgcagtggatga

SEQ ID NO: 90241 - DNA, 1811 bp, Zea Mays
gttagggcctgtagatccctcaaatccctaaccgacccgcgaccccgacccgattgccgtacctccttccgtgtggcatataaatccgacgcgccgacgcctcgattcctcgcctccccgagagcccccgtttctgtcacaaatcgccactaaaaccctagccttccgccatggccacctcccctgccgcctcgtcctcctccgctccgaccgcctccgcggtggctgcggctacgatggctgttgaggccaccgacgggccggtgctcagcgtagtatcgaagcgtctccgcgcactgcggaagaagtacaaccgaatcacgcagatggaggagtcgctcgccgccggcaagacgctcaaccgagagcaggaggaggttctccgctccaagcccgtcgtcgccgctctgatcgacgagctcgagcgcctccgccctccgctcgcctccgccctcgcggaggagctctcctcccgccccgcccccgccccctccgccgcttcctcctccgactcagattcgtcagtccaggacttgcttgcgctcgtctacttcggctccctctttgacgtcaagcagcaaagcgacttcgtctctttggtttacacgcgcgaactcgagcggagcagctgcctcacttatgactacgtcggggatgatccggaggacagtctcgcggagaccgatctgaacgcggtttctgcccttgcctccctcgccgcgttgcgccctcctgctgcagccggagtctcgcaccgtgacgcccttcaggcttgtgctcatcacgcccgcctctggctctgccgtgcggatgaacccatccatcctgactccaccatcacatatgctggggtgagggcaaagctggataggatcatggcatcgggctacttcacagcgcagctagaaatgaggacaccattggatctggctgctgcagtggcaagttttggagctggaggtgtgcaggtgcaagagagcatggttgtgtcacctcaggcaccggaagcagtggaggagagccaggctgttgaaggacacaagaatgagaaggaagattctcaggctacagaaatctacaatgatcatcctgttgttgactctgaacatgtggaggatgaagtcctggtgcatccaactgatgaagttcctccagctgagacagagcaggagcaggagacatttgatgctgatgtgaaggatcaggagcaaaaggaccaacaattcatccagcggcggtcttaccagaaccagcgtggtggtggtcgtggtggcagcaggagaggctatcctaatggtcgtggaggacgtggtggccgaggtggcgggtaccagaatggccgtggtggataccagaatggtcgtggcggtgctggcgggtactactacgaatctggatactaccagccgaggaactacaacagaggccggggtggtcgctccggcggtggcaactcttactacaacagccatggtggaggtgcacaggggcatcatcctgggagtgttgagctgggcgcaaacgcctagcttcgctgactgttctgtttgataatgaggagcgagtgagtcgtgccattttgttattatagaactaacttagcctgttattacgtcaccgttggtcccatccgtgagtctttttgctgctcgagtgactgcatatggtcggtcggtattgaggaaatactctgggaaagtagtttcaggtcatattcgttttctaagttacgtttttttttgtgttaatatgcccttatttcttaattattatatactctgctagaggtgtcgatgccgccaccagatttt

SEQ ID NO: 90242 - DNA, 192 bp, Zea Mays
gagcacagcagctgtatatgcagtaaattctaaaatatatcatccatgagacaagtatataatgaagtatacttttatttagtgcagaagaaaaaagatgaatatgtgtgcttctttttactgggaatatgttattatggatttaaaatttatgttcaaaagaactcaatgaaaatataatatttttatttg

SEQ ID NO: 90243 - DNA, 100 bp, Zea Mays
gaagtgttgaagcgtgagtgcttatttatagaacgaataggcttcggagacaagccatcgtgttgtcgtgcagacgaagctagtcgatggcttgttgaag

SEQ ID NO: 90244 - DNA, 219 bp, Zea Mays
atgtggggacgttctacccgaatcagtataaatatcgcgctcactgagctcaacatccggaccccagaacgtgcacaaacaaatttacttgtcggagtaggttcgaaacaccgacatagtgtttatttaagcgaggtacgttgtgagtgtggtgttgtttgggtttcatactcttaatataatgatacacaacttttttgcatgtttatggaaaaaacg

SEQ ID NO: 90245 - DNA, 1507 bp, Zea Mays
gaaacattgcatgtatgatgtatcatttttaatgtttttttcatcaccaattattactagaggttaaataaactaatctttcaggctagattgcatgagattattatttcaagtgagaaagcaaagaacacagaagggccagtggaatttccatggatggttgatggtgcaggattgcctgcaaatgcttcccagctcctgcctaagatggccaagttgacgaaagaagtgacttcacaagtaaagctgcttgctgaaggtgaagatgaaagacttgcgttgacgagcacattttcaaaatatgaccaggcaaaagctcttggaaagacaactattgatgtggctcgtattgctgccgggttgccatgtggtagtgaaagcttcctcttgatgtttgccagatggagaaaacttgagagggatttatacaatgaaagaaaggaccgttttgacattacacagatcccagatgtatatgattcctgcaagtatgaccttttgcataatgctcatctcaatcttaagggtttggaagagctattcaaagttgctcaaatactcgctgatggtgttattccaaatgagtatgggatcaacccaaagcaaaaactgaaaatcggctcaaagatagcgcgccgtttattgggaaaaatcctaatcgatctacgcaacactcgtgaagaagctatcagtgttgccgaaccaaaatttattgaagacgaagctctattcctaccaacaaaagaagcagagcaccagcagaaggttcatgttagaaatgaggatggaagaagatctagctctacgagtgagaagtcattggaccaagaagatgaagatgatagagaaactaaataccgattagatcccaagtatgccaatgtaaggacacctgagcgccatgtccgcactaggctttacttcacatcggaatctcatatacactcattgatgaatgtccttcgttactgcaatttggacgaaagtctacaaggagaggaaagccttgtctgccagagtgctttggaccgtctacatagaactagggagcttgattacatgagtaatattgtgcttagaatgtttgaaaacatagaggttcctttggaagatgagaagaggttcaggattgaaatgacgttcagtcgtggcgccgatctcagtcccctagaggacaaaaccagtgaaagttcttccttgctccaggagcacaccttgcccataatggggcccgagagactgcaggaagttgggtcctgcctgaccatggacaagttcgagaaaatggtgcggccattcgccatgccgccggaggacttccctcctgccgctccgccacaagccttgggctacttctccaaaggggcaggggtgcttgaaaggttggctagcctctggcctttccacaagagcgctaacgggaagtagctggaagctaacaaatccctgaaaccagttcatgtggttattcttgttctgtaacactttctgcacgccagcccaattt

SEQ ID NO: 90246 - DNA, 1205 bp, Zea Mays
ttactgatctgagctgtgttgttatttgtctatgttgtacaagaactatcattaactctggtacaagcaatgtcatatggtctctgttaatcaattaaccttgtgggaggcaatttgaaaagttttctcatagttcctgtttatcttaatgtgtatatcttaaccatgctcatatccttttttatatataatatatcgactagatagcgcgccgtttattgggaaaaatcctaatcgatctacgcaacactcgtgaagaagctatcagtgttgccgaaccaaaatttattgaagacgaagctctattcctaccaacaaaagaagcagagcaccagcagaaggttcatgttagaaatgaggatggaagaagatctagctctacgagtgagaagtcattggaccaagaagatgaagatgatagagaaactaaataccgattagatcccaagtatgccaatgtaaggacacctgagcgccatgtccgcactaggctttacttcacatcggaatctcatatacactcattgatgaatgtccttcgttactgcaatttggacgaaagtctacaaggagaggaaagccttgtctgccagagtgctttggaccgtctacatagaactagggagcttgattacatgagtaatattgtgcttagaatgtttgaaaacatagaggttcctttggaagatgagaagaggttcaggattgaaatgacgttcagtcgtggcgccgatctcagtcccctagaggacaaaaccagtgaaagttcttccttgctccaggagcacaccttgcccataatggggcccgagagactgcaggaagttgggtcctgcctgaccatggacaagttcgagaaaatggtgcggccattcgccatgccgccggaggacttccctcctgccgctccgccacaagccttgggctacttctccaaaggggcaggggtgcttgaaaggttggctagcctctggcctttccacaagagcgctaacgggaagtagctggaagctaacaaatccctgaaaccagttcatgtggttattcttgttctgtaacactttctgcacgccagcccaattttgacgatctgaatcatagtgaaaattttgctggttctttttcatgagcgcgagacataattgtgctatcatgttgcttgcatggatctgagatttaagggtgcgtttggttgctggatagcc

SEQ ID NO: 90247 - DNA, 5343 bp, Zea Mays
atgggccttggttgtccaatatctcagatctggactcgtcatcgccaagataacttaagcatggcaggcgtcatcgtgtcctcctcggcggcacgtacagagaagagccaggagcaagaccgactcacccgtacccgcgtcgacgagcgtcagtcggctcgcggctgcgaccgcgggcgggggcagcaagttggggaggaagaatacggcgaaggtcgggaagacgaacgagacgtccgacgatggcgaaatcgatggtgcgtgcatgatgtgaaacgtcctcgtggacgtgcaatagccactgtgcgagtcggtccggggctggtgtcggacgaatacgggaagggggcacatgctcctacgccctctgccgagaatggggtcgtacggagttggaggcataagggaagagagaaaataagtagaatggcgaccgagatggtggcaactgaggcgaggaccatcattattgtgcggagggggactgggggagctaccgagcacagtgcagaggtcagaccgtcagagggagttgctggtgcagtggtgcgggggagatcatcagatcagaggggtgtctccatggccgacaatgaggggaccctggacgccgtcctcaaggaggccgtcgacttggagaacatcccacttgaggaagtttttgagaatctgagatgcagtcgtggggggctcacttccgagcaggcgcagcaacgcctgcaattatttggccccaacaagctcgaagagaaggagttaaactggccatggctgcaggagagcaaatttctcaagtttctgggattcatgtggaacccactgtcatgggtcatggaggctgcagctatcatggccatcgcactggccaatggtgggggaaagccaccagactggcaggatttcgttggtatcatcacactgctgcttatcaactcaactatcagtttcatagaggaaaataatgctgggaatgctgctgctgcgcttatggcccgccttgcgccgaaagccaaggtgcttcgtgatggccgttgggccgaggaagaggcagccgtccttgtgcctggggatgtaatcagcattaaacttggagatatcatccctgcagatgctcggctccttgatggagatcccttgaagatcgatcagtcttcgctaactggagaatcgttgccagtcaccaaaggtcctggtgatggtgcctactctggttcgactgtcaagcagggtgaaattgaggctgttgtgatagcaactggtgtccacactttctttgggaaggctgcgcatcttgttgactccacgaatcaagtattgacagccattgggaacttttgtatttgttcaattgctgtggggatgtttgttgagataattgtcatgtaccctatccagcatagggcgtatcgtcctgggattgacaatcttttggtgctacttattggaggcattcccatagcaatgcctacagttttgtctgtgaccatggcaattgggtcccatcgcttggctcaacagggagctataacaaaaagaatgactgcaattgaagagatggctggtatggatgtactttgtagtgacaaaactggaactctgactctgaataaactcacagtggacaagaacctcattgaggtttttgaaagggaagtgactcaagaccaagtaattctgatggctgctagagcctcccgaatagaaaatcaagatgctattgatactgctatagttggcatgctagctgatccaaaagaggcccgtgctggtattcaagaggttcatttccttccatttaatcctaccgacaaaagaactgccttgacatacattgatagtgatgggaagatgtaccgtgttagtaaaggtgcgccagagcagattctcaacctcgtctacaataagttggagatagaacgaagagttcatgctgtaattgacaagtttgctgagcgtggacttagatcacttgctgtagcgtatcaggtagtgccagatggaaggaaagagagtcccggtgggccatggcattttgttgctcttatgccactctttgatcctccaaggcatgacagtgcagaaacaatacgaagggcattgaaccttggtgttagtgtaaaaatgatcacaggtgatcagctagcaattgggaaggaaacaggacgtcgcttaggcatgggtactaacatgtacccttcctctgctttgctgggacagaataaggatgagtctattgctgttttacctgttgacgatttaattgagaaagcggatggttttgctggcgtattccctgagcacaaatatgagattgtaaaacgtctgcaagcacgaaaacacatttgtggaatgactggcgatggagtaaatgatgcccctgccctaaagaaagctgatattggtatagcagttgctgatgccactgatgcagccaggagtgcttctgacattgtcctgacagaacctggcttgagtgtgataattagtgccgttcttaccagccgggcgattttccagaggatgaagaactacactatctatgctgtttccattacaatacgtattgtgctaggatttatgctacttgccctcatatgggagttcgatttcccaccatttatggtacttattattgcaattctaaatgacggtaccataatgaccatatcgaaggatcgagtgaagccttcgcctctaccggacagctggaagctggccgagattttcacaactggaattgtgcttggtggatacctggcagtgatgactgtcatcttcttctgggctgcatataagacaaactttttccctaggatcttccacgttgaaagccttgagaagacagctcaagatgattaccagaaactcgcctctgccgtatatctccaagttagcaccatcagccaagctctcatcttcgtgacgaggtctcgcagctggtcattcgctgagcgcccgggctttctactagtgtttgccttcctggtcgcgcagctgatagctacactggtagctgtatacgcggactgggggttcacttcgatcgaaggcattggatggggctgggctggtgtggtgtggctctacaacctcgtcttctacttcccgctcgacctcctcaagttcctcatccgatacgctctgagtggcaaagcgtgggatcttgtcattgagcaaaggattgcgtttacaaggaagaaggacttcgggaaggaggagagggcgctcaagtgggcacacgcgcagaggacgctccacgggctgcagccaccggatgccaagctgttccctgacagggtgaacgagctgaatcagatggccgaagaggccaaacggagggccgagattgcaaggctgagggagcttcacacgctgaaggggcatgtggagtcggttgtgaagctcaagggcctagacatcgacaccatccagcagtcgtacacagtctgatgaccctggattaagtacatacatgtatatctagttctggcaggtggcagtcgcctgcttgtttgtatttgccatataccataacacatcatgagaactggtagttggtgccgtcggttgtcttcgcgtgctccttgcgatgttattgtgttacgccggtttcaagcaacataggtcacggatcataaatcagatatccgacggatatcaaatccgtgtgtcatctccccgcgtcctggttgccccgcgtcgggcgactcggacgctccccataatccctagtagccgccgccgccccttcgtgggcctctccctgccgcgccgctgcctgagctggccgccggaaggttcggctgcttgcggggagggcggcggcggggcatctccgtctccctctggtggatctgggcgggcacagccgccaaggtcaccgtgagttgctcgtcggcgtggtcggccccggcttcgccccctcgcgactcgggtggctgccaactcccctccctccccatctctttgccttgccgccgccggagctagctggtgggttgctcgcacggctaggggtgaaggcgtcgggcgggtgcttgctgccttgtcgtgcgtccaacccacggtggcggcgtccgcccactcaggcaacgggcctgtggctgggtgcgcgcccgcgaggctagcccggtggcggcgcctgcgtgccgcgacggcaatcgctgctgctcgggggttggaggtgtgcctggactgtgtgctcgcgtacctgatgcgcggagggctggatctggcgcccccagggggagcggcgttggcgcgcggaaggctggatctggcgcgcgaggttggcggcctccgcatgccatccgtcggaggcggcggcaggctggtcccgggctagcgcatgagccggggtggaggtcggcgttggtgcgccggcaggcctgcgcagtcggccggaattgcagtggcgggacctcctctcgtctggggcagcatcggctagtcgatcgggctagcgcagggtggtggtggcggcaggcccaaaatcttcatcatttgtgtggtacgtcggggtaccggcgacggcggaggcagcttgctgtgtctcgaggtttcggccagacgttgtgctgggggctcttgggcgaaagtctcggcgacggtgacgcccatgggcgtcgcttcccctgttaagggcgtcacaccccagtgctatcttccttgggtgaaagctcggtccatcacggacaggtgacggtggcgtcacagtgacgtcactcccttcctgaaggcgtcgcttctgaagttcgtctcggccaggactttgccttcggctgttgcttcgcttctcggtgcctggtatgcgagtggaggtgggggttttgcaacgtgaagtcggagctgctacatcagtggatgtggctcggcaacgataacacgaggcgaacctcccttcttcgtggtccagaatgtttcgaaggtcgggcaaaaaccggaggcagggcagagggtcaagattggaagtcgaagctgctttgtgcctgagcccggcaacgatgacttgttgagacctttcgcttcgggttgtctatctgctttttgtttggttcgcctgttggctgctttggaaagtcggagttgttggatgctctgcatctttgcttgataacgatgacctttagcagttttgtgctctcgtgtggggttgccgctgcctgtgttgtttgggcactctatgtcgacggtgagtgtggtgtcgtgttgatgtcctaatccaaccgacgagttgagttgtatggtgttggcgtgttgatgtctcaatccaaccgcatgttgtttgttgtttagtccggtccggaccacttcttaattaatataatcggcagctctcatgtc

SEQ ID NO: 90248 - DNA, 1253 bp, Zea Mays
cggtttggccgttccgttccattccattccgctctcctcccctcccctcccctcccattcttctacacggccgatcgcgaccctcgccccgcccccacacggccacgcaccgaaactgccccgcccccgcagcacactcgtcctccccgcgccacctcggggacgtcccggtccgcgacatccctgaccaccgcgatggccgccgccgccctccgctcctccgcacgccggctcctgcgtctcaccccggcaccctcgtcggctctgttcgccgcttcccggcccaccgccagggttgcaccgctctcacgccccatcgccgctctgtcaggtggcaacaatcctatctcatggaaactgagacgcttcttcagttcaaatgaaaagcacttgcctgcaatatctgatccagagatcgaagctgcatttaaggatttgttggctgctagttggaatgaacttccagattctctcgtagcggaagcaaagaaagcagtatctaaagcgaccgatgataatgctggtcaagaggctttgaaaaatgtatttggtgcagctgaggcatgtgaagaattcagtggaaccttggttaccctaagaatggctcttgatgatctgtgtggcctgactggcgaaaatgtgggtcccttacctggttatattgaagatgctgttaaagctgcatataatcgctacatgacatatctggagtcctttggccctgaggaaaattatctaagaaagaaggtggagactgagttgggcacaaaaatgatacacctcaaaatgagatgcagtggcataggttccgagtggggaaagatctccctgattggcacctcggggatctcaggctcctatgttgagctaagggcatgatgtgaagcctgcagatcagaaccatggaaattatcgatgagctgaggaagtctgtagatcagaatatgccgttctacattttcctttcccctttgtagctaccatggcaataacaatgagaccatcaaacagctgtgcattttaagtatggaaatactcccgtctgtgtctgtaataaggacgtttcatgtggctgaaacctgtcaattctgttaatttttgcatgacttcttgttcaactggtgtgaattgtatactttgttcacgaggcactgatcatatatgccttcgctcgcagtcgcagctcaacttccttcagcattgcaaaaactacggtgaactgccattttttaatgcaagggtttaacaatctc

SEQ ID NO: 90249 - DNA, 387 bp, Zea Mays
atggcaagcgccgcacttgctcgcgccgtagagaagagagtgcacctgaaatccgagacggtggtaagcgcgtcggagaggggtggaggccgacacggaggcaacaaagaggagggaggcgagcgcgacggcggggacgtgcggagcgcgcgggcgaggatggaaggaggggtggggagaaggatggaaggggcaggcaaggcagtaggcgaggattgcgggaggatggcgttgatggcggcctcggcaacgggcggtgctgatatcgcgtactggtccgatccgattgcgggcattgatggcggagatcctcggcagaaccgtgcaccaaaagcttttgtgaacgtctacagtaacttcttatgtagtagtagagatagagattga

SEQ ID NO: 90250 - DNA, 2165 bp, Zea Mays
gtactggccgccaccactcgccactcgccactcggccccaggaccctcctcttcctcgccagcaagccggcacgatccctcccttccgggaaaaaggctcccaatctgttccgagccagccggccatggcgattagggctggccgctcgccccttctccacctcctcgccctcgccttcctcatcctcgccgcctctccctgcctccaagctcgagtggaccatcgcaaacagatatctcactggactgggcaacccaactttgacctgcagaatgtctcatcgggtcgaaaggatggccctcatctcctgggtagatcaaaggaaataacacacatgaaattaaggagagttgctgtaaggaagaaaatggaagtagtgcagcaggatgatgaagcgttagttaaacttgagaatgcaggtatcgaacgttcaaaagctgttgactctgctgtgctgggaaaatacagcatctggagacgtgaaaatgaaaatgaaaaggcagattcaagggtccgtttgatgcgagatcaaatgatcatggccagaatatattctgttcttgccaaatcgagggacaagcttgatctctatcaggagctgcttgcaaggctcaaggaaagccagcgctcccttggggaagctactgctgatgctgaacttcccaagagtgcttcggatagaaccaaagcaatgggccaagttttatcaaaagcaagggatctattgtacgattgcaaggaaattacccagcgtttgagagcaatgcttcagtcagcagatgagcaggtccggagcttgaagaagcagagcaccttccttagccagctagcagctaagacaatcccaaatggcatccattgtctttccatgcgcttaacgattgattattatcttctctctccagagaaaagaaagttccccaatagtgagaacctggaaaatcctgatctttaccattatgctcttttctcggacaatgttttggcagcatcagttgtggtcaactcaaccatcatgaatgctaaggagcctgaaaaacatgtatttcatcttgttactgacaaactgaactttggggccatgaacatgtggtttttgctgaatccacctggggatgcaacaatccatgtggaaaatgttgatgacttcaaatggttaaactcttcttactgccctgttctgaagcagcttgagtctgcagccatgaaagaatattatttcaaggctgatcgtccgaaaacactctctgctggttcttctaatctgaagtatcgaaacccaaaatatttgtccatgctcaatcatctaagattttacctcccacaagtctatcccaagctgaataaaattcttttcctggatgatgatatagttgtccagagggacctaactggactctgggaggttgatcttaatggaaatgtaaatggagccgtggaaacatgtggagagagttttcaccgatttgataagtacctaaatttctcaaacccaaatattgctcagaattttgatcctaatgcatgtggttgggcttatggaatgaacatgtttgatctggaagaatggaagaagaaagacattactggaatttaccacaaatggcagaacatgaacgagaacaggctgctctggaaactggggacattgccaccagggcttctaactttttacaagctgacacaccctctggacaaatcatggcatgtgcttggcttagggtacaatccaaccattgagcgctcagagatagacaatgctgctgtcatccactacaatggtaacatgaagccctggctggaaattgcaatgataaagtatcggccttactggacaaagtacatcaattatcagcattcctacattcatggatgcaagatcagccaatagaaaccaccctcagatattcttctgtgatgaacattgaagttggatgggactcaaaatgaaatcagtataactatcacatgttctttattcgtgttatattagatttgttagttatcacgtgtatgtagtttcgtcgcccttttgtggtgctttctcccctagctcattgttggttcttgtccctttttgtcatgaaaagaatgatgagctctatgattctcatcagctgataaatgtaatgtctgaatttctgtcggtggcaaattaatgatc

SEQ ID NO: 90251 - DNA, 2412 bp, Zea Mays
gtactggccgccaccactcgccactcgccactcggccccaggaccctcctcttcctcgccagcaagccggcacgatccctcccttccgggaaaaaggctcccaatctgttccgagccagccggccatggcgattagggctggccgctcgccccttctccacctcctcgccctcgccttcctcatcctcgccgcctctccctgcctccaagctcgagtggaccatcgcaaacaggttagtaaaatattatcctacttatttcttctatgttaaaaaaatgtgtgattatagtggcaaccttctgcgacgttagatatctcactggactgggcaacccaactttgacctgcagaatgtctcatcgggtcgaaagggtgggtaactgagtattaataccatatgtatcttatctgtgagtgcatcacacacattaaactttggaactttaattgttaatgtagatggccctcatctcctgggtagatcaaaggaaataacacacatggtaatcatccccccttttccctcaagtacttatccttgtaagctgcagtgtatatatatgtagggatgaaactgcgcttgtttgattcccagagtggttaacattatgcttatgccatttttttccatggcttacagctactctaaaatgtaatcttgttccaccttatcctgaccattttgatatttcctaattgtagaaattaaggagagttgctgtaaggaagaaaatggaagtagtgcagcaggatgatgaagcgttagttaaacttgagaatgcaggtatcgaacgttcaaaagctgttgactctgctgtgctgggaaaatacagcatctggagacgtgaaaatgaaaatgaaaaggcagattcaagggtccgtttgatgcgagatcaaatgatcatggccagaatatattctgttcttgccaaatcgagggacaagcttgatctctatcaggagctgcttgcaaggctcaaggaaagccagcgctcccttggggaagctactgctgatgctgaacttcccaagagtgcttcggatagaaccaaagcaatgggccaagttttatcaaaagcaagggatctattgtacgattgcaaggaaattacccagcgtttgagagcaatgcttcagtcagcagatgagcagagaaaagaaagttccccaatagtgagaacctggaaaatcctgatctttaccattatgctcttttctcggacaatgttttggcagcatcagttgtggtcaactcaaccatcatgaatgctaaggagcctgaaaaacatgtatttcatcttgttactgacaaactgaactttggggccatgaacatgtggtttttgctgaatccacctggggatgcaacaatccatgtggaaaatgttgatgacttcaaatggttaaactcttcttactgccctgttctgaagcagcttgagtctgcagccatgaaagaatattatttcaaggctgatcgtccgaaaacactctctgctggttcttctaatctgaagtatcgaaacccaaaatatttgtccatgctcaatcatctaagattttacctcccacaagtctatcccaagctgaataaaattcttttcctggatgatgatatagttgtccagagggacctaactggactctgggaggttgatcttaatggaaatgtaaatggagccgtggaaacatgtggagagagttttcaccgatttgataagtacctaaatttctcaaacccaaatattgctcagaattttgatcctaatgcatgtggttgggcttatggaatgaacatgtttgatctggaagaatggaagaagaaagacattactggaatttaccacaaatggcagaacatgaacgagaacaggctgctctggaaactggggacattgccaccagggcttctaactttttacaagctgacacaccctctggacaaatcatggcatgtgcttggcttagggtacaatccaaccattgagcgctcagagatagacaatgctgctgtcatccactacaatggtaacatgaagccctggctggaaattgcaatgataaagtatcggccttactggacaaagtacatcaattatcagcattcctacattcatggatgcaagatcagccaatagaaaccaccctcagatattcttctgtgatgaacattgaagttggatgggactcaaaatgaaatcagtataactatcacatgttctttattcgtgttatattagatttgttagttatcacgtgtatgtagtttcgtcgcccttttgtggtgctttctcccctagctcattgttggttcttgtccctttttgtcatgaaaagaatgatgagctctatgattctcatcagctgataaatgtaatgtctgaatttctgtcggtggcaaattaatgatc

SEQ ID NO: 90252 - DNA, 1782 bp, Zea Mays
atggcgattagggctggccgctcgccccttctccacctcctcgccctcgccttcctcatcctcgccgcctctccctgcctccaagttttctgtgatgcaatgtgggtaggccagatagccttctcaattcagagttcagacgatagtcatcctagtataagctcgagtggaccatcgcaaacagatggccctcatctcctgggtagatcaaaggaaataacacacatgaaattaaggagagttgctgtaaggaagaaaatggaagtagtgcagcaggatgatgaagcgttagttaaacttgagaatgcaggtatcgaacgttcaaaagctgttgactctgctgtgctgggaaaatacagcatctggagacgtgaaaatgaaaatgaaaaggcagattcaagggtccgtttgatgcgagatcaaatgatcatggccagaatatattctgttcttgccaaatcgagggacaagcttgatctctatcaggagctgcttgcaaggctcaaggaaagccagcgctcccttggggaagctactgctgatgctgaacttcccaagagtgcttcggatagaaccaaagcaatgggccaagttttatcaaaagcaagggatctattgtacgattgcaaggaaattacccagcgtttgagagcaatgcttcagtcagcagatgagcaggtccggagcttgaagaagcagagcaccttccttagccagctagcagctaagacaatcccaaatggcatccattgtctttccatgcgcttaacgattgattattatcttctctctccagagaaaagaaagttccccaatagtgagaacctggaaaatcctgatctttaccattatgctcttttctcggacaatgttttggcagcatcagttgtggtcaactcaaccatcatgaatgctaaggagcctgaaaaacatgtatttcatcttgttactgacaaactgaactttggggccatgaacatgtggtttttgctgaatccacctggggatgcaacaatccatgtggaaaatgttgatgacttcaaatggttaaactcttcttactgccctgttctgaagcagcttgagtctgcagccatgaaagaatattatttcaaggctgatcgtccgaaaacactctctgctggttcttctaatctgaagtatcgaaacccaaaatatttgtccatgctcaatcatctaagattttacctcccacaagtctatcccaagctgaataaaattcttttcctggatgatgatatagttgtccagagggacctaactggactctgggaggttgatcttaatggaaatgtaaatggagccgtggaaacatgtggagagagttttcaccgatttgataagtacctaaatttctcaaacccaaatattgctcagaattttgatcctaatgcatgtggttgggcttatggaatgaacatgtttgatctggaagaatggaagaagaaagacattactggaatttaccacaaatggcagaacatgaacgagaacaggctgctctggaaactggggacattgccaccagggcttctaactttttacaagctgacacaccctctggacaaatcatggcatgtgcttggcttagggtacaatccaaccattgagcgctcagagatagacaatgctgctgtcatccactacaatggtaacatgaagccctggctggaaattgcaatgataaagtatcggccttactggacaaagtacatcaattatcagcattcctacattcatggatgcaagatcagccaatag

SEQ ID NO: 90253 - DNA, 1434 bp, Zea Mays
acgaacaggtctagcccatagcaacaccctcgccccctcccttctcagcctcaggcggtcaggcccactggccgtacccgcgacgtcttcctcctcggctccgccgccttccgccgatcgcctccgccgaatcgaatagaagaatcgagcgccgctgctggcgaggggctcggcgcacagcgcgggatggcgagcggcagcagcaacggggagccaagcacggcgccgcaggcgaaccggtggtacgacctccggctgggctcctcctgccgtgacccatcccccaccgccaagttctgcactctccgctatgaatttaagccagcatcaattgacaagactcaagctgggtctctgcagagtaccaaagataaccgggttactgtggaattctataataatcagcctggcaaaccaaaggtgacatttgagggaagccaagaagagtacaaggataatgatggtgtcttattttttgatggtgagacctttcgcctagagaggttgcatagggctgtcaagaggttaaggcatgtccgagttccaggagagtctgcagcagttaatttggcagctacaactactggaatgggtgcagaatcacagtctcctccattacctaaagtcaacaagtcacagagcatgaacaaacctgctgttcactcagttccagttgaggttgagcgtattgacattggtgaaccagaaaatccaggcccaaaatacaacaacaggagtacatatcaatctgttaccgtagacccatttgccctttcacctgatccaaatgagcaagagaaccttgacatacttggtgacgatgatggcaatgcttcaccaaacaacttggctgcaggacaagaggcatctgttcgtggttttgacatcaacttaccaaatcaggacgatatggatgatgaaattgctgatgtagatgtaaatgatgacacggatctgtggatcaatgcagccgatgcgctgcgagctcaagtgaacgcagaggagcatcaggagcagcaggacagctcaagctctagtgggagcagcagcagcagcagcggaagtgagagcggcagtggaagtgggagcagcagcagtggtagcgatggtagtgatgctgattcggcaagttccggaggtgatgttgatatatgagcttgatacgcaagcttttgttttgacacatgccttgcttcacaagttttcattcacaaggtaggtgtaggatatgtatatgttcagctaatattgctccagtgagtgcattaaattttcactaacaatggtggcctgggtccgtttttatgtttgctagacctggattggaagaatagaatctgtaaacatatctgtacaactatttgcttatgggaccatggatgttacaattgttcggttgaaatgacaaaaggtatactgctatgcttgcctatt

SEQ ID NO: 90254 - DNA, 2224 bp, Zea Mays
actcaccggctgagtcagcttcaatctcacctgtgacctgtacactcccagatcagacggttcacgtacgacggttggcaacactcacaaccaccgcaccgcacaccgcagcccaagttctcctctgcatctgaaatatcttgccacctgacgcgacagcgacaagatccaagaactcgctcgcgcgcacggacagggccggaacccagggatcgagactgaacagcagtccgagacgccatgaacgtggaggaggaggtcgggaggctcaaggaggagatccataggctcggccagcagcagcccgatggctcttacaaggtaccccttccatgctctaaactctcccctccggcctccggagccgccgcagatctgagccatccgcgtcgccgcatttccttttcctgtgctgtgctgccatctccaggatggcccgcgccagaattcctccccttctctcgatgcttagtgtgcaatgtgcagtatgatctgcacagaccagtctccggcatgaagctgcgatgggcgatcgagtcgagaagccgttgccgactcgacggactttgagagatcatcttgtggctgccgctgatgggtagtatttagcagggtctttctgaaatgggaagacatttattctagcagcctggtggatgctcgaaacgatatctgcggtgcagatcccctaagctgtgcgcctctcgcagttacttagtcagccagtggacattgctgtgaggattggcgccgaaccgatgatattgcaactgaaagatgaccctttcagtcgtttgcattgtaggtagcattttgtgtcggttgtggtgggatgaccaccataagcttatgatttcgtagattatcccctattctatggaaccgatcgaatgcgaaaatcttttaaaaaagcatgaataaatggaaactctgtttaaattgacctacttgccccagttaaatgttggcctgtgtccatatatgtcatattcgtaatgaagatgtccaatgtcgttgtgggaagaagagtgcaaacagatcaacgacatcgagttctttcataccgcagatgtttgtgtcgttgaccactatggatcctgtttattcgagaatacagaatactctccaaactcagtagagttatcccatcttggttattttggttactggtctaatttttttcttgcttcaagtaccatggaattaatattccttatgtttaatcgtgtcttaccttctattgattttctgtgtatttttcctagttattggtttccatgtttgttgtgtcttaatcatgttgaggctccaaagtgcatatgatagcttagaagggcttgtcgctgtgattctccttcgattcatcttgaatgaattcaaggtctattatttttactatttaagatttggcttgttcttttcatgttttgtacgacaaatttgaacttcgcaaatccgaatcttggctcatttattagtccatcgccctatgtgatctttagcccctgattctagccaaaagtcgtcaacaatgaaaaggatgaatggatacataaacagatgtagttcctgttcctggaaccatcactgtactgtgagcttttgaatcttaaatcgtgacactactttcatgggaggttgctagcctgctatgacctgcttagtgcagaccttgctttgctaaaagagtctcaccattcttagctgcacgtctgtatcctatagacaccactttctttaaagagtctacaagtgatgttgtaaatgttataacactatatcatatgatgttacagtgtaaaattatagtatacatgttatggattttattgtttctgcactataccttgtgaatgtgcacagagaacatcaatactacgttactgaactattggttcgcaggtcaagtttggcgtcctcttcaacgacgaccggtgtgcaaatatctttgaagcactagttggcaccttgagggccgccaagaagaggaagatcttgacctacgaaggcgagctgcttctgcaaggtgtccatgacaacgtggagataaccctgttgcccccacctgcagttgctgccgcttgaagcgaagagcaccaccaagttctcgattccatacaactcgtatgcttgtattctgccgtgcctatattagattctctcgaaccatttggtgttccttgaaaactgctatcgtgtgatatatgaaattgtggtgctcaag

SEQ ID NO: 90255 - DNA, 767 bp, Zea Mays
actcaccggctgagtcagcttcaatctcacctgtgacctgtacactcccagatcagacggttcacgtacgacggttggcaacactcacaaccaccgcaccgcacaccgcagcccaagttctcctctgcatctgaaatatcttgccacctgacgcgacagcgacaagatccaagaactcgctcgcgcgcacggacagggccggaacccagggatcgagactgaacagcagtccgagacgccatgaacgtggaggaggaggtcgggaggctcaaggaggagatccataggctcggccagcagcagcccgatggctcttacaaggtcaagtttggcgtcctcttcaacgacgaccggtgtgcaaatatctttgaagcactagttggcaccttgagggccgccaagaagaggaagatcttgacctacgaaggcgagctgcttctgcaaggtgtccatgacaacgtggagataaccctgttgcccccacctgcagttgctgccgcttgaagcgaagagcaccaccaagttctcgattccatacaactcgtatgcttgtattctgccgtgcctatattagattctctcgaaccatttggtgttccttgaaaactgctatcgtgtgatatatgaaattgtggtgctcaagaaattgccttgcttgcatatggttgtgttgcttaataaattcaatgctggtatagcattcgtgtcatgagacatgaaaacagcagactggagttaatggccgcgggttattgacgtcttccata

SEQ ID NO: 90256 - DNA, 3401 bp, Zea Mays
atgtcccgttcattcttcccgacctgctcctcccagaaagcggaaatggaggagatggccaaggagctcgacgacctgcgtgccgaggtggaggcactcaccgcccagctccgcgccaagtctgacctcgctgacggcctcaagcgcgcgagcgcggaccacgccgcgcggctgcgggatgcccgggcggaggcggagcggaatgcggcggaggccgcggccaggggtgaggaggccgccgccgccggggagcggtgcgaagtgctagagtccaggctagccgagaaggagcaggcgctgaggcacctctgtgcggcgcacgaagcgctcaaggccacgctccgggagaagatcgagggcctcgagggcgacaagaggggtctcctcgcggcgctcgaggacgctgaggcgaggcgcggggagcacgaggccgccctgcgcgcccgcgacgtcgaggtcgcgcggcttagggggcttctgtcagagaaggacaggaggtgcggcgaggctgagaagagggcatcggcgccacgagatgtggtgatgagggacgacatgctggggaagctggaggaggagaaggccgctgtccagtgtaagctcaagtggaaggatgagcagttcaggcacctcgaggaggcactcaagaaggttcaggatgacttcagggctgccaagaaggagtggggctcagatagatcaactttggttgatcggattgacactcttgaggctgatttggattccaagatcagggttgcagaggatttccggtccaggctggatatgtgcagccaggcattagcccatgaggaaggccgcaggaagcgagtggaaacagagatgtctgagttgcgccacatgtatggcaatgtgatctctgaatatcaaggggccaaatcaatggtcgagtcgttgagctccaagacagatggggatattgcatatttgagaagctcactggctgagaaggccacaatgctcaaggaaatagaatacagtaaggcacgtattgaacaagaaaatgaggatttgcggtcaaagctcaaggagtatcaggaggcacagattggtggtgcagatgctgttgtatcattgaaaagtctgcgggagaagttccgagccctggagcagacacatagaagttgcaccgagaagctaagaggtaaggaagaagaatggagactgcagatgacaaagcttgtgaatgacttggatggatgcttatcgcagttagaatccaaagatattcttatcgtgcaactgcagaatgagttgctgggtagtcataggtcccttgagctacaaacagtggataattgggaagcattgataatacttactgttgtacagacaaaattttatgagtcctgctcatttgttgatactgctaaactgaatatgcagcatcactgtgaagaaattgagaaggaaatatcttctgccaagaaacagttagaagaacaatcttgcattattgcccagtctcaagctgaacagaaacaacaatctggggttataacaaaattgcatgcaagaattgaggagctagagcatatggaacaagaacataagaagatgcaaagacaacttgatgcatacaaagagatgagggacaacatgttaagagatgctcactgcctaaaagatgaaacttcaaagaaggaaagcaccctgcaggtgaaattgagggaggcattaagtgctcttgatgaagcaaactgtgcccttgctgacaggaagcgtgagctgagccagttagaaatcagtctccatcaccaaaaggaagcgattgagcatttggaaaaactgaaagttgatatggaagctgaagccaagagctatatgtgtgacaaccgtatcctgaagagagatctggatactgctcttactgccaaagtggaagctgaggagttgcttaggcaagaaaaaatgcagttaacatgtgctcttgatgaggcaaaatataccctttctgagaggaacagtgagctgacccaatttgagatcaattttcatcagcaaaagcaagcactggcgaacttagagaaggtgaaggttgatatgggaactgaactcaaaacatgtatggatgaaaattgtgtgctgaagagagatttgggtgttgctcttattgccaaaatggaggctgaggagtgtcatacaaaagaaaaggaggagttttgtggcataattaaagagaaaggaatgatgattgataaacttcagcaatacgtcgctgtgctagaagaagaaaacatggtcaagaaacttgatttgggaagtcttatcaagatggagtgtgacaagtccattcgtgaagtgaagaactggtattctgaaattgttgagatctctgacaaaaagcttttggagctggaagaaaggcttagattcgctgagcagaaattttcatgcagggagcaggagatcatgaatatgtttgatcaagaggaatcagattggtatacactaattgcagagaaagaaattgctatttctgatattcaacaaactgttgaatctgttcagcttgacatcaagcaccttcttgaggcagcagcagcaaaagtggcagaagttcagctagaggtgaatcaactttatggttttgctgaaactctgaattcacttaacatcatccaagagcatgatactgttttcaaggatatgctcattgcagagtgcgaaagagaacttgactccctgcaggtgaatttagtgcaagagaagcatcagtcaagaaatttgaagaatcttattgaacagctcgaagctcaaactgcttcagaaatgtcagaaaaggcagaggagcatctagaagttacgaataagctgaaatcattggaggggagaaatgaaacgttagatgagcatctgcgagagcttaagtctagaacaactgatatgtctaaagctgtactacaagagaggaatcagttggtcaatgagctgactggactaaccaataccatcggggaggtaatttatggaggtgaaagtatgatgtcaaatttgagaaggatcatgcagaaagttaatgaggaaccttgcaatgacaggcttacctcagaaaaaactaatggtagaagttcttcacctttgatcaggcacaaatcagggcatgtcctagatagaagatcgcctctgaaggagaacaactactagttagtataggtcagatcgtgtactgatattgctgtaacagttgtactcggttttctatgaatctaacatgccgcccctagagctgtgccttttcttctccttccccagtgccatccgtgttttgttatttaaacacagtggctgtgttagcgaacacttattttatggactgaatttgaataacatagtttcccaagtgttgaatgaaatgaagcctattgtgtttgctgcaa

SEQ ID NO: 90257 - DNA, 413 bp, Zea Mays
gctccttggcccacgcgccgcggcgccgcccctggaccggtcgagaggagcggagatccatccatccggccgtcggtcggtctcgtcgtctgtcgttggctgtaatgaaaatctgggcctgctagagccaggagttttcgttgcaaatctgtgtctccgctatgggttcaggcaacttgatcgtgaagaaggtggtaaagcacagctcttttgatctggacattcagctcgataagagttggatggaggacattacctgcccgatctgccttgattaccctcacaatgcagtcctactgagatgcacatcttatgagaaaggctgcaggccgtttgtttgtgatacaaaccagacccgttccaactgtcttgagagatttaaatctgcatatgaactgccttccaatgtgaaa

SEQ ID NO: 90258 - DNA, 389 bp, Zea Mays
cttctaatttctgaaggatatttctcccttggaggtcccatatgtacacgcagttgtcttctgatccactgacaatgtattttccattcgtaacagaaaacgcggactatatgcagtattgtctgttcacatgtccactgtataccttcaagaacttgccggtggcaaaattgcatagcttctgcaaggtgcaataacaagttaggagcttgaacgaattaaacatcttgtatgcaatagaaagcacaactaaattaatgtaaaaaaagaaaggcacaactacaattatgaataacagtgtgctagcaactcagctatatgacatggaagtacgaaacaaaaatgccactataaccagcctacatgaagctcagaggggatattattaa

SEQ ID NO: 90259 - DNA, 679 bp, Zea Mays
catgattacatgggcaatgcgctcgcacagcttagcccagtcttgaggaagatcgacgaccgattcatttgcatgagatcgtcatcgttaacgcagaacttgtggacttcttctttgtcgacaccactccattccaactggagtattggactcaccctggcaagcatcgttatgactggagaggggtggcgcctcgaggcaagtacatagccaatttgttgaaggatatggatgtggctatgaagagatcaactgcaaggtggaagattgtggttgggcatcacaccatgaggagtgtgagtgagcacggggacaccgaggagcttctggaattactacttccagtcctcaaggacaatggcgtcgacttctacatcaatggacacgatcactgcctggagcacattagcagcagagacagcccactccagtatttcacgagcggaggcggttccaaggcatggagaggagtcttccatccaaacaaggacaagctccggttcttctacgacgggcaagggttcatgtccctccagctgaaccaagaccaggctcacttcatcttttacgacgttttcgggaacatactgtaccgatggagctcgagacatcctcagtcctccacctatctcaatgaggaataaattggattgattttgcgccattgatatgtacaaaa

SEQ ID NO: 90260 - DNA, 1745 bp, Zea Mays
cactcacatgccatgctgccaatgccgcctcctgcctaccctggtcttccaataaatcaacctgctccccgacgcggcgaggctcggccatgcccgtgagctgtaggcgcacccggaggccgcagcacagcagccacggatgaggaggcctccaatcgtggcgcgcgtgcgccgctcgctcttcctcctcctctgctgctgttgctgcctcgccgcctggtcgtcgccgccggccgtgcgcgcactcccgctgtgcaccgacgggcgggcgccggtgccgctgaacaggacgctgggcttctgctccgcttacggcgggggcggcagcagtagcagctgctgcgacgccgcagcggacgccgcgctgcggaagaggttcaacgccatgaacatctctgacgcggcctgcgctggcgtcatcaagtctgtcctctgcgcggaatgcagtccattttcggctgagttgttcaactcaagctcaaagattcagatggttcctctcctgtgcaactatacttcttcatcaagttctgctcaatcaaaagattctacacgagattactgtaaactagtttgggagacttgcaaaaatgtgacaatagtgaactctcctttccaacctcccttgcaaggaagtgcaagactgcctagttcatcgtcaaagctcacagatgtctggcagtcagaacatgacttctgcacatcatttggtggctcatctggtgagcagtctttatgtttcaatggaaatggaattttcttcaacagcacagaaccatcacccacacctaaagggatatgccttgagagaatcagcaatggatcttatctgaacatggcttcacatcctgatggatccaacagagttttcttgtctagccaagctggaaagatatggttggccagcatcccagaacaaggctctgggggcactctacaatatgatgaggcaaacccatttcttgacataactgatgaagtttatcatgattctcagtttggcctcatgggtatagcatttcacccaaagttcgctactaatgggcgcttctttgtttcttataattgtgatagaactcaatctcctaaatgtgctggtaggtgttcatgtaattctgatgctaactgtgatccgtcaaagctcggcactgataatggtgctcagccatgtcaataccaagttgttgtttcggagtattctacaaaaatctcctcacctaacgtttctatggcaacatctgccaatccatctgaggttagaaggatttttacaatgggactgccgtatatagctcaccatggagggcaaatactatttggaccaacagatggatacctttaccttatgatgggggatggtggaagtgaaggcgacccttttaatttctctcaaaataagaaatcacttttggggaaaataatgaggcttgatgttgacagcacacaaggtaagttggaatgatggttcttttagcaaaaggcgacaatgttttcattgtggttcgttgctaatattggtgttatgttgatctttacctcttgtcgtgtcactcgtgttcttgtaatcttaggtgtacttctgctaatattggtgttctgttaatcttaggtgtgcttgtcacctctgataccatgtaagattgtggaatgcttcttgtattgcatagggatagttacataaccgaatgggccggcagcccaacagtggtgccgacccacacacacagagtacacactgtctaaca

SEQ ID NO: 90261 - DNA, 2486 bp, Zea Mays
cactcacatgccatgctgccaatgccgcctcctgcctaccctggtcttccaataaatcaacctgctccccgacgcggcgaggctcggccatgcccgtgagctgtaggcgcacccggaggccgcagcacagcagccacggatgaggaggcctccaatcgtggcgcgcgtgcgccgctcgctcttcctcctcctctgctgctgttgctgcctcgccgcctggtcgtcgccgccggccgtgcgcgcactcccgctgtgcaccgacgggcgggcgccggtgccgctgaacaggacgctgggcttctgctccgcttacggcgggggcggcagcagtagcagctgctgcgacgccgcagcggacgccgcgctgcggaagaggttcaacgccatgaacatctctgacgcggcctgcgctggcgtcatcaagtctgtcctctgcgcggaatgcagtccattttcggctgagttgttcaactcaagctcaaagattcagatggttcctctcctgtgcaactatacttcttcatcaagttctgctcaatcaaaagattctacacgagattactgtaaactagtttgggagacttgcaaaaatgtgacaatagtgaactctcctttccaacctcccttgcaaggaagtgcaagactgcctagttcatcgtcaaagctcacagatgtctggcagtcagaacatgacttctgcacatcatttggtggctcatctggtgagcagtctttatgtttcaatggaaatggaattttcttcaacagcacagaaccatcacccacacctaaagggatatgccttgagagaatcagcaatggatcttatctgaacatggcttcacatcctgatggatccaacagagttttcttgtctagccaagctggaaagatatggttggccagcatcccagaacaaggctctgggggcactctacaatatgatgaggcaaacccatttcttgacataactgatgaagtttatcatgattctcagtttggcctcatgggtatagcatttcacccaaagttcgctactaatgggcgcttctttgtttcttataattgtgatagaactcaatctcctaaatgtgctggtaggtgttcatgtaattctgatgctaactgtgatccgtcaaagctcggcactgataatggtgctcagccatgtcaataccaagttgttgtttcggagtattctacaaaaatctcctcacctaacgtttctatggcaacatctgccaatccatctgaggttagaaggatttttacaatgggactgccgtatatagctcaccatggagggcaaatactatttggaccaacagatggatacctttaccttatgatgggggatggtggaagtgaaggcgacccttttaatttctctcaaaataagaaatcacttttggggaaaataatgaggcttgatgttgacagcacacaaggccaaagtcaaaccacaaatcagagtttgtggggtaactattctattccaaaggacaatccgtttgctgatgatagtgactttcaaccagagatatgggccttgggatttagcaacccgtggagatgcagctttgactccgagaggccttcgtacttctactgtggagacgttgggaaggacgcatacgaagaggtagatttagtcaccaagggtggaaactacggatggcgtgtatacgaggggccatacatctttcacccgcaaaagtcgcctggagggaatacttcgcctgagtccataaacgcaatcttccccgtcatgggctacgaccattctgctgtgaacaaggaaatcgggtcagcatcgatcacaggcggatatgtgtaccgaggttccgctgacccctgcttgtacggaaggtacctctacaccgacctgtactcatcgctgatgtggacgggcacggaggccccagaggggagcgggaactacacgtcggccgtgaagccggtgagctgctccaaggcctccccgatcggctgcgagtccgtcgccgggagcacggacccgctgctcgggtacgtcttctcgttcggggaggacagccgcaaggacgtcttcgtcctggcgagcaagggcgtgtaccgcgtcgtcaggcccagcctctgcggctacacctgccccgcggagagaccggcgaccgacaacggcaccgcgccaggtccaggcgggccgtcgtcgggcgctcccgccgcgacacggctagggaggtcggtggcggcggtagcggtagctctggcgttgatcccgtgtgtgctgttactgtgaccttcagatgtgtgtctcgtgcgatgtagtaggatcagtcgtagctgaagctactgggagctggaagagtacatacgtatagcgtgagtaacgaacactcaaaaacagttgtgctatgtggatgcctctggacaagacaaagagcaatgggtagttttggcgcggcgctggaacgttcggttcaggaaagggttgttggaaggcgcgg

SEQ ID NO: 90262 - DNA, 1679 bp, Zea Mays
actctccagtgccctgccaatcccccgctctcccgcctaccgccaggcccaggcgccagcctccaaagtccaaacccagctagagcttagagctagcatggagtccgccgccccgtgcccgcgcgcgcacgcgcaccccgtggacctccgctggctgctctccgtcgccgccggcggcctcttcgcgctgctgctggtgctgctggccacctccccgtcgttccggctcgcctccacctcgccctcaccccgcctcttcctcggccccgcgtccggctcctcccgggcgcgcccaccactcttcgtcgagcccgccctgtcccgcccggcggcgccgtccccgcccgcgtccgcctcgctcccgcgcttcgcgtacctcatctccggctcggccggggacgccggcatgatgcgccgctgcctgctggcgctctaccaccccaggaaccgctacgtgctccacctagacgcggaggcgcccgacgccgaccgggcggggctggccgccttcgtcgccgcgcacccggtgctcgcggcggcgcggaacgtgagggtggtcgagaaggccaacctcgtcacctacaggggccccaccatggtgaccaccacgctgcacgccgccgccgcgctcctgtggggcgagggcaggggccgcggcgccgactgggactggttcatcaacctctccgcctccgactacccgctcgtcacgcaggatgatttgatgcatgtgttctccaagctgccgcgcgatctcaacttcatcgaccacacgagtaacatctcctggaaagcgtttgcgagggcgatgccggtgatcatagacccggcgctgtacatgaagaaaaagggcgatctgttctgggtgccggagaggcggagcttgccgacggcattcaagctgttcactggttccgcgtggatggtgctgtcccgggcgttcgtggagtacctgatctgggggtgggacaacctcccgcgcacggtgctcatgtactacgccaacttcatctcgtccccggagggctacttccacacggtggcgtgcaacgccgacgggttccggaacaccacggtgaacagcgacctgcacttcatctcctgggacaacccgcccatgcagcacccgcaccagctcaccgtcggcgactgggaccggatgctcggcagcggcgcgcccttcgcgcgcaagttccgcagggacgacccggtgctggacaggatcgacgccgacatcctcgcgcggggccccggcacggtggcgcccgggggctggtgcggccgcggagcagccggcggcggcgggcaggggcagagcaacgggaccgacccgtgcgcggccgtcggggacgcggcggtcctgcggcccggcccgggcgccgagcggctgcagcggctcgtcacgtcgctgctgtcggaggagaacttccggcccaggcagtgcgtagtagaaaacgagaactgagccgggctggcagggcagggcaacgagcctgctactagcggtactacgggagtatgcatgatacagtgataccgtgcctaaaaatgtatggtacatgatgctatgtgccgggtcttctctgcggtacacgcgaaggcatgtacgagtacttggacgaaaattacacctagacattcatgtatctgctaatatatactacacctttcttttctcc

SEQ ID NO: 90263 - DNA, 1632 bp, Zea Mays
tgccaatcccccgctctcccgcctaccgccaggcccaggcgccagcctccaaagtccaaacccagctagagcttagagctagcatggagtccgccgccccgtgcccgcgcgcgcacgcgcaccccgtggacctccgctggctgctctccgtcgccgccggcggcctcttcgcgctgctgctggtgctgctggccacctccccgtcgttccggctcgcctccacctcgccctcaccccgcctcttcctcggccccgcgtccggctcctcccgggcgcgcccaccactcttcgtcgagcccgccctgtcccgcccggcggcgccgtccccgcccgcgtccgcctcgctcccgcgcttcgcgtacctcatctccggctcggccggggacgccggcatgatgcgccgctgcctgctggcgctctaccaccccaggaaccgctacgtgctccacctagacgcggaggcgcccgacgccgaccgggcggggctggccgccttcgtcgccgcgcacccggtgctcgcggcggcgcggaacgtgagggtggtcgagaaggccaacctcgtcacctacaggggccccaccatggtgaccaccacgctgcacgccgccgccgcgctcctgtggggcgagggcaggggccgcggcgccgactgggactggttcatcaacctctccgcctccgactacccgctcgtcacgcaggatgatttgatgcatgtgttctccaagctgccgcgcgatctcaacttcatcgaccacacgagtaacatctcctggaaagcgtacgtgctctgctctcgctcgcattggttgcagacttgcagctcctatacgtgcgcgtgcgctctcaacggatctttgttcttggcgctactgagattatgtatgatatcgtcaggtttgcgagggcgatgccggtgatcatagacccggcgctgtacatgaagaaaaagggcgatctgttctgggtgccggagaggcggagcttgccgacggcattcaagctgttcactggttccgcgtggatggtgctgtcccgggcgttcgtggagtacctgatctgggggtgggacaacctcccgcgcacggtgctcatgtactacgccaacttcatctcgtccccggagggctacttccacacggtggcgtgcaacgccgacgggttccggaacaccacggtgaacagcgacctgcacttcatctcctgggacaacccgcccatgcagcacccgcaccagctcaccgtcggcgactgggaccggatgctcggcagcggcgcgcccttcgcgcgcaagttccgcagggacgacccggtgctggacaggatcgacgccgacatcctcgcgcggggccccggcacggtggcgcccgggggctggtgcggccgcggagcagccggcggcggcgggcaggggcagagcaacgggaccgacccgtgcgcggccgtcggggacgcggcggtcctgcggcccggcccgggcgccgagcggctgcagcggctcgtcacgtcgctgctgtcggaggagaacttccggcccaggcagtgcgtagtagaaaacgagaactgagccgggctggcagggcagggcaacgagcctgctactagcggtactacgggagtatgcatgataca

SEQ ID NO: 90264 - DNA, 105 bp, Zea Mays
ttaatgatgaacaaaaaaatattaatagcaacagggagtgcgagggggacctgtatcactatttttaatcttgtgtcactgtacatactacaaaaaactaatgag

SEQ ID NO: 90265 - DNA, 1286 bp, Zea Mays
atggcgccagaagcaccttcccgccgcggcgacaacacgcacatgaagctgctgtgcagccacggcggccgcttccagccctgcggcccagacggagagctccggtacgtcggcggcgagacgcgcgtcctcgtcgtgccgcgcacggtgtccttccgagacctggcggcgcgtctggcggagatggccggaggctcggtgcaggtgcgcgccatcaggcaccgcctcgcggacgagggcgtcgaggacgtgatcgtgacggtcacctgcgacgaggaggtcgcgcacatgcgcgacgagtacgaccgcctgcgcgccacgcggccggccgcgaggttccgggtctatgtcaccaccaccgcatcgccgtcctccgccggttcgaagacagcgacgacggccgggctcccaccccgggcgccgtcgatgcggcgcgtgcagagcgagctggaggtctccgcgagagcgcacaaccagcaccggccggcgcagcgcgtccacagcgcgccggagctggcgggaggcgtccacatgcagatgcagccgtccttctacaaccaccatcgccaccagcactgttaggatccaggcactctcgactcaattttactccggaacgatcaccacggatcaccggccgccaacaaacttacagttcagacttgtgttctgtctattcctctcagttcgccgccaccttctcctagtgtaagccaatacttcttattacagtctgttacaaggccacttgggccaaataaacttagccactcacagctcgggccatatcgctctcttactccttctgagcccgtcgaggcctgcttctggcttcacatccttctcctttcccgcactggtattcttcgcttcttccgcgtcctggttgctgatcaccgggacactgacattttccctcccttgagttccagcttgtccccaagctggtgcaaaggaaaaatgtcgcttgatgtccgcctcctcttcccatgtagcgtagccatggatgtaggctagcccgtccactgagatgattgttgctaccagcatgcagttttcccatcgcagaggaggcaatcctgagataaaatacatagatactaccagccacgtatggtgttgaaccggcaatggaaaacgttcagagtatttcacccggtcttcccaattacgtatcgtaggatcaaagctaccttcactttgcccggcaggaaatgacaagttcgaaaattcgtgaagacctattttatctgtaaacaagttaaacccaaacggatgcctggtcg

SEQ ID NO: 90266 - DNA, 598 bp, Zea Mays
ggaagaactagctccgaataccaaatgttaggatccaggcactctcgactcaattttactccggaacgatcaccacggatcaccggccgccaacaaacttacagttcagacttgtgttctgtctattcctctcagttcgccgccaccttctcctagtgtaagccaatacttcttattacagtctgttacaaggccacttgggccaaataaacttagccactcacagctcgggccatatcgctctcttactccttctgagcccgtcgaggcctgcttctggcttcacatccttctcctttcccgcactggtattcttcgcttcttccgcgtcctggttgctgatcaccgggacactgacaagcactgctgctgctccggcccgcgacgtgacccgtatacgcccgcgccagtaacacctgcacgcccgatgtacgcgctgccctacatgtccaagaaggtagccgctcctccttcggtgtccgcggcagggcgggtggcggcggtttccaatgcagcagccgcgagggatcagaaggcgacgagcagagacgtcgaggcagccgtggagagcagaagagcgatctgggagttggagtga

SEQ ID NO: 90267 - DNA, 1873 bp, Zea Mays
tttgggtactataggaacaaacccgtacccataaacccgctgggtacagatttatgcccattaacaaacccacgggtatgaaaattggcccaaacccgtaccctaatggggtaaaaacccatcgggtttcgggtttcgggtacccattgccatctctacccacacgccacacacgcccaccgcatcggagcagaacccaccaaaccctacgtcgccgcggcggtcggagcgggcagggaccctggactggaggatggtggcgatctcgatgtaccgcggcaacctccacattggcggccccgacagcggcgcctctgccccgcgccgatgggaggcgccccggccgaccctcgacgtgaagcggttccgccgcctcctgcgcaaccgcttccgtgctgtcgcgcgcctcgccgggacgccgctggggcaggcctccccgtcctcctcgggcatggatggcggccgtggcgccgcggaccccgagcgggaggcaccggacgaggagggaggagcgggcgacgggggagaagaggagcaggagcagttgcagcacgaccaggaccaggaccagcaacatcaggaggagcaggggaacgtggaggcggaggcggaggatccggaacagcaggaggaagaagaggagggggcggtggaggacgcggacatggaagatgcgggggaggtagtcgttgatggcgatgcggaagaaggtcagggtgaaagtgaaggtgttgacccaaagccggaggaggaggcgagttatcctgatggaattgatgacaagaacagaaaacttaatgaaaagctggacgccctaaataaaaagaagcatggccttgtgcagatgctgaagcaggtcttaaatgctgaagaagaaatccgaaggcgcaacatgcaggcttcattgcgcgctgccatgccccagccatcagaaaacgcaacagatggaagttctgtttctaggttggcccctagaatgactgttgatgtcaattttggtgatgttgctggcgattcagatgctggttccaaccagggcactcctggacgccccttgcatcacttccacagtatctctccttcaacagcctcttttgcgaggtcaccgtttggttctctacagggccacactccaaggagtccggcaacattctctacggcaagtccatcacgcttcgccacaaatatacacccaggacaacctcctgctctttattcagcatcgttgccaggaagtaactatgtagccacatcaccttccccggccgcatctggtggttcctcctcggtgttcagggaccctcggccacctaactctacataggttctatgctttgctcggagttctactcattggtaatgttgctaaattctctacccagggatttaggtaatgtcgtgcttcgggcaacactagtgttaaaacaaattcgtgtctctgtgaacggtaaataacgtgatagcactgaaattcaaaattagtatattaatttcacaattatattatattaaaaacaaggcttgtactcggtctaggggaaagatcacctccaatcgttgccccgactaattgcaaacttcccttttcccatctttatttactgctgaaaaagattgtttcatttttctgcggtactgctttaagcttccgaccaaatgatgaaacaagcaacttcatcatatttgctacatgttctcaacatgtttatgcacaacccacaagatgaaacgtcgacagatgtagaaatgagataacagcttgattagctacatcgcgtgtagagagagtaacaatggcggtgttccagctcgttcaaggttcacacaattccttttcggccgtcgaagactcgaaggcagggaactacaggaa

SEQ ID NO: 90268 - DNA, 1776 bp, Zea Mays
ttcaagcaggtttgccgtcacatgttaagcaaggtacggtgatctgacatctatcccaagtaacattgcaacctgcaactgcaacattgctctttggaattccacctaacatccattgttgcaagaaggatcaaggaacaaccatggcgccgcatgtcctcgtcgtgcccttccccggtcagggacacatgaaccccatggtacagttcgccaagaggctggcatccaagggcgtggccaccacgctcgtcaccacccgcttcatccagaggactgccgacgtggacgcgcacccagcgatggtcgaggccatctccgacgggcacgacgagggagggttcgcgtcggccgcgggcgttgccgagtacctggagaagcaggcggccgccgcgtcggcgtcgctggcgtcgctcgtcgaggcacgcgcgtcgtctgcggacgccttcacgtgcgtcgtgtacgactcgtacgaggactgggtgctgcccgtggcgcggcgaatgggcctgcccgccgtccccttctccacgcagtcgtgcgccgtcagcgccgtgtactaccacttcagccaggggaggcttgccgtgcctccgggggcggccgcggacggcagcgacggtggtgctggtgccgccgccctgagcgaggcgttcctggggctgccggagatggagaggtcggagctcccgtcgttcgtgttcgaccatggtccgtacccgaccatcgccatgcaagcgattaaacagttcgctcatgcgggaaaggatgactgggtgctgttcaactcgttcgaagaactggaaaccgaggttttggctggcctgacaaagtacctgaaggcccgagccatcggcccatgcgtgccgctgcccaccgctggaaggaccgccggcgccaatggccggatcacctacggggccaacctggtgaagccggaggatgcgtgcaccaagtggctagacaccaagcccgaccgctccgtggcctacgtctccttcggcagcctcgcgtccctgggcaacgcccagaaggaggagctcgcgcgcggcctcctcgccgccggcaagccgttcctgtgggtggtgagggccagcgacgagcaccaggtcccgcgctatctcctggccgaggcgacggcgacgggcgccgcgatggtcgtgccctggtgcccgcagctggacgtgctggcgcacccggccgtgggctgcttcgtcacccactgcggttggaactccacgctggaggcgctcagcttcggcgtgcctatggtggcgatggcgctgtggacggaccagccgaccaacgctcggaacgtcgagctcgcctggggcgcgggcgtgcgcgcgcgccgcgatgctggcgcgggcgtgttccttcgcggggaagtggagcggtgcgtgcgcgccgtcatggacgggggcgaggcggcgtctgctgcacgcaaggcggcgggggaatggagggacagggctcgcgcggcggtggcacccggtggcagctctgaccgcaacctggacgagttcgtgcagtttgtgcgcgccggcgccacggagaagtgagaggcgctggctgtgaagtgtgaagggaggtgatgttgcagggtcccagatgtgacgacgcgatgcgaaggagaaacgtttcgaaactggaagcaaaaaacggtcgaaagttggtgcctctacttggtttggtttatgctttgggtccaccagccataataatatataggaaatgactggactgaatcaaacgaagaagagaaacaaaaataagaga

SEQ ID NO: 90269 - DNA, 2398 bp, Zea Mays
ttcaagcaggtttgccgtcacatgttaagcaaggtacggtgatctgacatctatcccaagtaacattgcaacctgcaactgcaacattgctctttggaattccacctaacatccattgttgcaagaaggatcaaggaacaaccatggcgccgcatgtcctcgtcgtgcccttccccggtcagggacacatgaaccccatggtacagttcgccaagaggctggcatccaagggcgtggccaccacgctcgtcaccacccgcttcatccagaggactgccgacgtggacgcgcacccagcgatggtcgaggccatctccgacgggcacgacgagggagggttcgcgtcggccgcgggcgttgccgagtacctggagaagcaggcggccgccgcgtcggcgtcgctggcgtcgctcgtcgaggcacgcgcgtcgtctgcggacgccttcacgtgcgtcgtgtacgactcgtacgaggactgggtgctgcccgtggcgcggcgaatgggcctgcccgccgtccccttctccacgcagtcgtgcgccgtcagcgccgtgtactaccacttcagccaggggaggcttgccgtgcctccgggggcggccgcggacggcagcgacggtggtgctggtgccgccgccctgagcgaggcgttcctggggctgccggagatggagaggtcggagctcccgtcgttcgtgttcgaccatggtccgtacccgaccatcgccatgcaagcgattaaacagttcgctcatgcgggaaaggatgactgggtgctgttcaactcgttcgaagaactggaaaccgaggttttggctggcctgacaaagtacctgaaggcccgagccatcggcccatgcgtgccgctgcccaccgctggaaggaccgccggcgccaatggccggatcacctacggggccaacctggtgaagccggaggatgcgtgcaccaagtggctagacaccaagcccgaccgctccgtggcctacgtctccttcggcagcctcgcgtccctgggcaacgcccagaaggaggagctcgcgcgcggcctcctcgccgccggcaagccgttcctgtgggtggtgagggccagcgacgagcaccaggtcccgcgctatctcctggccgaggcgacggcgacgggcgccgcgatggtcgtgccctggtgcccgcagctggacgtgctggcgcacccggccgtgggctgcttcgtcacccactgcggttggaactccacgctggaggcgctcagcttcggcgtgcctatggtggcgatggcgctgtggacggaccagccgaccaacgctcggaacgtcgagctcgcctggggcgcgggcgtgcgcgcgcgccgcgatgctggcgcgggcgtgttccttcgcggggaagtggagcggtgcgtgcgcgccgtcatggacgggggcgaggcggcgtctgctgcacgcaaggcggcgggggaatggagggacagggctcgcgcggcggtggcacccggtggcagctctgaccgcaacctggacgagttcgtgcagtttgtgcgcgccggcgccacggagaagtgagaggcgctggctgtgaagtgtgaagggaggtgatgttgcagggtcccagatgtgacgacgcgatgcgaaggagaaacgtttcgaaactggaagcaaaaaacggtcgaaagttggtgcctctacttggtttggtttatgctttgggtccaccagccataataatatataggtgagtgcccgtgcgttgcaacgggatcatataataccaataaaaaaatatatataacacggaatgacaggttaactttgcagcgttaataagtagtagagattttaccaatgaaattacacggagcccaaaagagtaaaatttgttgaaattatatggagaagggggtcacatatggacgatgtgcacataaaggtgattagagatgaagcagtattggacaccgaggaaagcggcgacacggcaccgcgcaacgtgctgacgaggaacttgagcggggaggaggtctggaccttgaagacgactgagagggatgtgtgcagggagcggaggcagaggtctacatggcacttggagttggcttgaagttgatcaccacttcatcctcctccacctctaggagaatcactccctccttcagacaaggataccaacaacactcatgcagtgtttccccctaggtaacaggtcagttgtacgatactggatagttacaacaacctgaaaatcattgataagtcatatgtatatacaacggatcttggtaacaaaccacatgctcccatgaattcaacttgtgttgcttaacttaaaagggttgtaggtgctcacttatggctctgctagacccataaaccagaaactgtttcttaggatctttgatcttcag

SEQ ID NO: 90270 - DNA, 1155 bp, Zea Mays
atgaaggcggcgccgatcgccaagtcgaggcgggagccgccttccatccctcccaactacgtcagcctccagcagctccttgagcttcgcctcaaagagaaggaggaggaggaggagaagcggcagcgggaggaggaggccgccgcagccatggccgccgcggttaagcgggaggcggcgctaagggcggaggaggaggccatggccgccgcggttaagcgggaggcggcgctgaaggcagagactaagggacgatcggtctcgcgcgaggccttctgtggggccaaggataggcagcatggggggcagggccaccggtgggtggccgtggtgcatcgagcgccgccgacgtgcggggaagttgcggcagggaagagggaatggatggtaggaggtagccgtggcaagaaggggctggacgatgtcgcggacagtgcaccccatccccgtggcggacgcaagtacccgcggaaggggaagaggaaggggaataagaagggcgagccaggtaatctggccgaggcagctcctccaacatcgaacggcggcaaggtggacatcaagagcgaactcaaggcgatggggaaggcctcggttgcgccactcgatccggccaaggcggccgtggcatcatccccgggccacctgacctgcaaggggaggaaggggaaaggcgcgggtaaccggagcgcagagacgagccggggcgatggtccggtgaaggtgaagacggccggtccgtcgctgccgcgaggcgtcaagtcgggcaacgcggggaaaccgaaacctgcagcgcccaggctcgcagacgccgggacaggcagcgattctcctgatgggaaggctccggccccgtccccggccccggccccggctctgaacccttccacctcgcccgccgatggcaggagcaaatcgaagagcggtggcatgctccgcaagaccatggaggcgaagccagagggcctagtcgaagggcagcgccggcaaccggtggtggaggtccaggccgtgaccgggccgaatccacggattgcgaggaggtcggctcaaccctggcgcccccgcggcattagggctgcacagccgcacgggcttgtgtgggtgcccaaggcagcggtggctggaccatcctccagcggcgaggacaaataa

SEQ ID NO: 90271 - DNA, 213 bp, Zea Mays
atggtgccactgcgagcagctccgccccctgcccccccggtcggcggatcccccaccccgccagggatgctaaaggtcgcggcaagtggctctactgccactccactccgcggcggtgccagcgttgatgaccacctctcggcctactgctacttcttctccagcatgggtctaatccatgtcgcgatacggggtttggacattttgggctag

SEQ ID NO: 90272 - DNA, 1050 bp, Zea Mays
tcccagtgccagtggcgacgacgggcgattgcgagccaccgccctcgcgaagcacctcggacacggcgactgccgactgacccggtacactgtttctccctccccatttctctctctcctgcgctgggtttaacgcagcggtaggcgatttcccccgatgcccccgtcgtgggtttgtccccgtggaaagaagcaccgctcccgtggaaacaagaagtcgttctagggatccaagatggcggcgcggatgctcatcgccgatccgcccagaatactacgccgtcaagcccccaagccccatgcacccacctctccagccactcctcccgctgccaaaaagccagatctggttgagcgcactgcagatttcgcggtaattgtttcatcgagactgccgtctccagcgcccggtggaccgccgccggtgtgcagcgacgacatagaactcgtcccagagactccacagttcagggtcagcttgattaggcaatatggttatccctccaccagctagggctcctgcaatcaccaagttcctcaagccgtatattttgaagatgcatttcacaaacagttttgtgagcgctcaggtcatccacacaccgacagccacggtcgcatgctctgcaagctctcaggagaaactcctgaggccaagcatggagtcgacacgggatgttgctgcggctgcaaagattgggaagttgcttggagagcgcttgctgttcaagggtatccctgcagtatctgtctccatgtcaagagaccagaagtaccatggcaaggtcaaggccgtgatagattctctaagaggtgttggtgtgaaattgctgtagggaaaactgactgttttatgagaggttatgttggggcctcatgtttacctccgaagctgcttggcggtccattagtttcgtgactgaattttcttatgggtgctgctgaacaatatcttgaaccatgtaagtccttgttcggttgttcctatacatcatggattggaaaagaaaatatgaaagattttgacttggaatggattgaaactcatcc

SEQ ID NO: 90273 - DNA, 632 bp, Zea Mays
gagccaccgccctcgcgaagcacctcggacacggcgactgccgactgacccggtcagcttgattaggcaatatggttatccctccaccagctagggctcctgcaatcaccaagttcctcaagccgtatattttgaagatgcatttcacaaacagttttgtgagcgctcaggtcatccacacaccgacagccacggtcgcatgctctgcaagctctcaggagaaactcctgaggccaagcatggagtcgacacgggatgttgctgcggctgcaaagattgggaagttgcttggagagcgcttgctgttcaagggtatccctgcagtatctgtctccatgtcaagagaccagaagtaccatggcaaggtcaaggccgtgatagattctctaagaggtgttggtgtgaaattgctgtagggaaaactgactgttttatgagaggttatgttggggcctcatgtttacctccgaagctgcttggcggtccattagtttcgtgactgaattttcttatgggtgctgctgaacaatatcttgaaccatgtaagtccttgttcggttgttcctatacatcatggattggaaaagaaaatatgaaagattttgacttggaatggattgaaactcatccaa

SEQ ID NO: 90274 - DNA, 2963 bp, Zea Mays
aagccctctgctctgatcgtcaagacacaaatttgacagagtatatagagcacatcacgtctgtgtcactgtgtatagagatatggacccagtccctcctgtactcgtatggaacagacaacccagtcagcccgtttctgattcttctgtcctcaacatcctgcgagcgcccccgtcccgccgcttccagaacctcatacaaccttcgagatgcgatgctccagccacagcttcacgttcacgggctccccactagcgagccatataaaatcctcctctcccttatctcttcctcaacctcacgccatttcccagcctgaacagcccccaaaaccaaacgaaaatcccatcgcccacacactccaatccacccttgttcattcctctcccttcctacttggtcagtcgacctctcaccgcaccgccgtcggcccatggcgaccacgaccttccccacctcgaccccattcttcgcggcccaccacggtccccgccggagccgaccctccatctccgccgcggtctacgcccgcggccgccgatggcgcccgctgcgggtggcgtgcgagaaggtggtaggcatcgacctgggcaccaccaactccgcggtggccgctatggagggcggcaagcccacgattgttaccaacgcagagggggcgcggaccacgccctcggtggtggcgtacaccaagtccggcgaccgcctcgttggccagatcgccaagcgccaggccgtggtcaacccggagaacaccttcttctccgtcaagcgcttcatcggccgcaagatgaacgaggtcgacgaggagtccaagcaggtctcgtatctcgtcatcagggacgacaacggcaacgtcaagctcgattgcccggcgattggcaagcagttcgcagctgaggagatctccgcacaggtgctgagaaagctggtggatgatgcatcaaagtttttgaatgacaaggtcacaaaggcagtgatcacagtccctgcttacttcaacgattcacaaaggacagcaaccaaagatgctggccgcattgctgggctggaggttctgcgtattataaatgagcctaccgccgcatcactagcatatggttttgagaaaaagaacaatgaaacaattctggtttttgacctcggaggtggcaccttcgatgtttcagttcttgaagtcggtgatggtgttttcgaggtgctgtctacatcaggtgacactcaccttggtggtgatgactttgacaagagaattgtagattggctcgctgggaacttcaagaatgatgagggtattgatttgctaaaagataagcaagcactgcagcgattgacagaagcagctgagaaggcaaagatggaactgtcatctttgacccaaacaaacatgagcttgccttttattacagctactgcagatggtcccaagcatattgagactactcttaccagggctaaatttgaagagctatgctcagatctccttgacaggctgaggacccctgtggacaatgcccttagagatgcaaagttgcaattcaaagatattgatgaggttattcttgttggtggctcaactagaataccagctgttcaggagcttgtcaagaaaatgacaggaaaggaccccaatgtgacagtcaaccctgatgaggttgttgcacttggagcagctgtgcaggctggagttctgtctggtgatgttagcgacattgtacttcttgatgtgacccccttgtccctaggtttggagacactgggtggtgtcatgaccaagattatcccacggaatacaaccttgcctacctcaaagtcggaagttttctcaacagcagctgatggccagactagtgtggagatcaatgttctccaaggagaaagagagtttgtgagagacaacaagtctattggtagcttccggcttgatggaatccctcctgccccacgtggtgtaccacagatcgaagtcaagtttgatattgatgctaacggtatcctctctgtcagtgctgtggacaagggtacagggaagaagcaggatatcacaattactggtgctagcactctgccaaaggacgaggtggagaggatggttggcgaagctgagaagtttgcaaaggaggacaaggagaagcgagacgccattgacaccaagaaccaagccgagtcggtcatctaccagaccgagaagcaactgaaggaactaggggacaaggtcccaggtgacgtcaaggggaaagtcgagtcgaagctgcaagagctcaaggatgctgttgctggtggctccacgcagacgatgaaggacgccatgagtgcgttgaaccaggaagtcatgcagatcgggcaggccctctacagccagcagggtgccccaggcgcaggacctggtgcagctgatgcttcttctgctggttcagcgggcacttctgagaagccaggtgacggaggcgatgtgattgacgcagattttactgacagcaaatgagggggcatgctaggtattagatggaggcggttttgccgcgagggagataatttgtttccacaagattgtctaggatgtggatgttctactttttggtagattggcacctaactgtggaatgaatatacataggtccttttcttctgctatcaagagcattcgacgtttgacctggcagtgtttctgggttaatctacatcttccataactttcttggtgggcggtcatggagtggaggcgacagtgtaacagtggcttacaaccttcgtatctcgaacaataataatgtagcgtgcatttgcctgggttcgaacacgggcgcttaaaacagggccgccagttgatcagatcagggctctctcagtctcccttaaatccagtttttttaagaaaaacacaaaaacatgtctccaacggttctctaaatccagttttttttagaaaaacacaaaaaacgtgtcaaaacaaaaaaaaaaa

SEQ ID NO: 90275 - DNA, 325 bp, Zea Mays
gtagcacaaacaatctagattttagacatcactacatcgacaagcactcatccatgaaccatgatccattcatccatccatcaggaaagtcataagtacttcaggactgatagaagaaatggagaaatggagttttctcaccttccttggtcaccatctgagttcgttggcgcctgagaatccatggtcgtcaccgtcatctgggcagggcgtagcatatgactggttattttagagttttgttttttactagtctgctagttgccttgttgggctaggacctggggcctggtgcgctgtcgtgctgggcttggtggccggcttg

SEQ ID NO: 90276 - DNA, 1675 bp, Zea Mays
gccgcaacggccgccggtcgtcgttggccacgtcacccgatcccggcatccccagcccgaagcatcacaacctgatcctcctcccccacacggccacaccacaattctcagaaaaaatccctcccgctcccaccaccgccgcagccctctcctcctccgcctccgcatcacattccacttccattcccgcggcccgcgccgccatcatggccaccgcctccctcctcgaggccactcgcctcctttccaccccgcgcccgccccgccgcagcctccacacccacctcctcaggaccccgcgcctctccgctctccgcgctcacctccaccgttccgcaactctcgacgcgcaggagccgacggcgaggcctggcgcgctcctggtcctcgacgcgctcaggaggtccgtggtcgactccctcgcggcgctcaagcggcccgcgctcgcgctcctgctggccggcgcgctgctcgccgcggcgtcaatgggcgggccgcacgccgcggcgctggccgcttcgggcgggcgcgtcggcgggtccgccttctcctcccgctcctcctcacctccgtcctacggctacagcgcgccggcgcccaggggcgggtacacggccgcgccctactactcgccttcgcccttcgtgtccttcggcccggccgtcggcatcggcttcgggggatcgggtttcctcgtgaccctcattggcttcgcggcattcctctatctcgccgggttcctgtccgactcgtcaggcggtaccagtgtgcttacagagacggataagaccaccgtcctcaagctacaggttggcttgctgggcatggcacgatcatttcagaaggagcttgaccaaatagctgagaaagcagatacatctactccggctggcttgagctatgtgttgacagagacaacattagcattacttcggcatccggattgttgtatctcagcttactcttcggtggatgtgaaacgtagcgtggatgatggtgagaaacgtttcaatcagctttcaattgaggagaggggcaagtttgatgaagagacacttgtcaacgtgaacagcatcaagaggaataaaggaggcagccaaagatcaagtggttttagcaacgagtacattgtgataaccatattggttgctgctgagggagtacataagctgccggttataaatagcagcaatgacttaaagacagctctacaaaagatgggtgccataccatcaagcaaaatactggcagtcgaggtcctgtggactccgcaaaatgagaatgacacattgtccgagcgagagctccttgaagattacccgctcttaaggcctctgtagaaagataaaagttacagattgcccgtgcaaaggaagaacacgccgtagattcagttttggcggttttcttattagttatagcacagatcctgcgtttgtataataagtgtataataatttgtaattggcgtctctgatagccttcatttcagaacatggaacgtgcaaatctgcaattgtctgtcagtagtcttgttcaatcttcctgacacaataacacaaaattgtaaatagattgttcagagaaaaaataaaacaggacatgctgcatttgtgcgtgtacgcgttccaccaaggatatttcaaataaaaatatttgatgaatattgcatgct

SEQ ID NO: 90277 - DNA, 2023 bp, Zea Mays
ttttcttgtttttgtggaaaacacgatctatgttggtctgctgctagttgctagattgacgcaagcaacttcctaacccaaatagtatatcatgacagtcaagcaacggaactcataagatacctgtaccgttgccggccttacctaacacgccaattatccacatttgatgatttcagtctgaacaccgaatccacagcgcattctcttaaacaaagccctaaacaacacaatcgtctacgtgttgcaatggcaggatcgattcctgtcgaagtaggaaccggcagttcaccagcatctaccaactcgttcgatttccatcgcggaccactcttataaaacccacacaggtcaaagcctgaaatcggcgaaaagaagaagaaaaaaggcagcggcaacagaacactacccattccgggaacttcctggcaagctaggtggtctggtcacacgtcacgtctaagcaaacacaagcaagtttgaaatggcggcgagagctagggcagcggcgccgttctggctcctggccgcggccgcggtcacgctgctggtggcggcggcgtccgcgcagtccggcggcagcagcagcgacgactgcacgtcggcgctggtgagcctgtcaccgtgcatgggctacatcagcggcaacggcacgtcggcgcccagcgcatcgtgctgctcgcagctcaaggccgtggtgcagtccaaaccgcagtgcctctgcgccgccctcggcagcgacgcctcgtcctccctcggcggcgtcaccatcgaccggtcgcgcgcgctcggcctccccgcggcttgcaacgtccagaccccacccgtcagccagtgcaacaacgggtcgtcgggcggcggatcgaaggcgacgcctttcctgccatctggtggtgcgtcgctcggggggccggcggctcttgtgctcgggctcgccgcggctgctgtttacgccgtggcagctacgtgagcgtttgtgttgtgtgattcagggatcaggatgcgttgcgtcgtgtcaactttcgcttttcagaacgggcaggggggattttgagtgctttgtgtctatggctttgtcgcatttgtgaaattggttgattcggtctacggtcgcaataaatttgccgtaatggtttcacttactttcgtactctccctgtattaatttaagagtatcttcaacattaccttaaatcataacactatcttaaaaatataggacttaacttaaaaacagctctaataatgctatgctttataattttttattaaaaagatgtagggcacaccgcaaagtaacacaaatatactgcacctgtactagtgctatattcttgttttctacattattctcaatatttgcaatttacttcctaaaatataggatttagggcttaatgttggagcacaatttatttttaatgctctaaacaatctaaatgatgtagtattttaattttttggtgcacagcaacagtattgtatttgttcaagcgtgaaacactacttgtactcagcagacatgaatagtgcagaaacagaattacacgactgggctaaaattgataaaacagttgtgggccccccaccagtatcctgtgatcgcataagtagcatcgctgagaaacaactaacacattccaacctcaaacgagttcatgcctcaggcagcaacaactgcggttgcagcttcagcaggtgcattgtcaccgacgagttcacgcctggcgtactccctcgccccgtccttgtcaacaatcttgataacaaagttctgaggcgcgacaaccaatcgcagccgaatctccttgatgcacttgtcaacaagatctactgcttcctcaacagtcatgtccgggtggtacaacttgtccataagagacaaacagaagtatgatccgtacccaaaagcacctttgtcaattttgtgcaaggttgcaatgtagtcgatgtagtagagggaagcaccaacatccttatcataaccaccaagaataatattgaccatatatggattctgaca

SEQ ID NO: 90278 - DNA, 125 bp, Zea Mays
caactctaacctaattcaacttgtttgggacaaagtctttgttgttgtaatcagttttaaactgttgttaagtgcaaaacctgacatgtcttctatagatacactggatcgacattgcattactt

SEQ ID NO: 90279 - DNA, 1420 bp, Zea Mays
cgcaccatcatcaccagttcagtccaccgttccgccggcccgcccgtacccgcctgcgcctacacatcgctgctccaggtccccatggcgaagactacgcaacccaccgcggggatgcgggatcccctgctccccacctccaccgccgcctcaccgccgccctacctcgacccgcatcccgccgactcctacacctacacggtcttccttgtccccgttcgcctccgccgcggcctctgtcgcggcggccgttgcatcgtcccctgcctcaccgttctcttcctcctcgcgctcgcgggcttcctcctctggcccgcggacccggacatctccctggcccgcctccacctagcgcacgtctccgtcgtggcacgccctgccgtcgccgtcactatatccgccacgctcaaggttcgcgttcgcaatcctgacctcttcgcgctcgactacacccgcctcgacgtcgctatcggctaccgcggtgcggggcttggccgggtaacatccggcggcggacgggtccgggcgcgcgctgtctcgtacgtcgacgccaacctgcagctcgacggcatacgcgtcgtcgaggacgcgatgtacctgctcgaggacctcgcgcaaggatccgtgcccttcgacaccatcgccgaggtcgagggccacctccacttccttttcctcagcatcccggtcaaggtgaatggttcgtttcttgttttttatattgttatatatgcagatctcatgaattgaattataaactgtatcagttttcggacttagacgcgtcttgtctttttccatggtattgcgaaagcccatatgactacgtctctacgacgttaaatttggtagggtattgacgtgaggtgaagcatttttggaattttcactgccgacaagagtttactattacccgcataatttatctgatatgattgttaaggtgtaaggtccatacaatggctagtgcattataaagaaaaacaacacagaacaatgcagaaaaaaagagaggagagaagacctactcaatcttcttgcattgatctagatatctttcatctgtcagacatggtatggccatcatattcagaacattcatggtgtaatgttagcaggatacatgctcgaattctctcattcatgattcactaaatgatatatttgtttttttatatctgcaaaaggacataatgagacatgtcttaaatacttagcatttagcttccattttgattcattgttacttctaccatgatcagtgacaagttacctcctgtatgcagatatcatttttctataaaactttgattcaagatgtaacagtgatttagtatgttgcctctctaagaatgcattgtatcaaacatatcctttgtttgacttctttttacgaatttgaaacaaattgttatccttt

SEQ ID NO: 90280 - DNA, 1117 bp, Zea Mays
cgcaccatcatcaccagttcagtccaccgttccgccggcccgcccgtacccgcctgcgcctacacatcgctgctccaggtccccatggcgaagactacgcaacccaccgcggggatgcgggatcccctgctccccacctccaccgccgcctcaccgccgccctacctcgacccgcatcccgccgactcctacacctacacggtcttccttgtccccgttcgcctccgccgcggcctctgtcgcggcggccgttgcatcgtcccctgcctcaccgttctcttcctcctcgcgctcgcgggcttcctcctctggcccgcggacccggacatctccctggcccgcctccacctagcgcacgtctccgtcgtggcacgccctgccgtcgccgtcactatatccgccacgctcaaggttcgcgttcgcaatcctgacctcttcgcgctcgactacacccgcctcgacgtcgctatcggctaccgcggtgcggggcttggccgggtaacatccggcggcggacgggtccgggcgcgcgctgtctcgtacgtcgacgccaacctgcagctcgacggcatacgcgtcgtcgaggacgcgatgtacctgctcgaggacctcgcgcaaggatccgtgcccttcgacaccatcgccgaggtcgagggccacctccacttccttttcctcagcatcccggtcaaggtgaatggggagaatatcttgcgtaatgcatattaatccacacaaccaaaccatagtacatcaggactgctatcctgagtgaattgcttatggcgtggaaatgtggaagggtgtaagctatgttgccttgcgaatggatcgtttgatttgtttctaaccttcgcttccagtcgtggttgtaaaagtaagaaccaaccaaggggtgtttgaatgtaattgagctaatagttagttcgctaaaaaattactaagtagaattagctaactaacaaataacaatctaactattagataatttgatgaaaatagcttgtttggttggctttaatccgtaccgacttctatagtgttttgtctctatgaattgcagctgcagcagtttgaatatctggctttaatctaaagcgaacagccgttagcactt

SEQ ID NO: 90281 - DNA, 1110 bp, Zea Mays
cgcaccatcatcaccagttcagtccaccgttccgccggcccgcccgtacccgcctgcgcctacacatcgctgctccaggtccccatggcgaagactacgcaacccaccgcggggatgcgggatcccctgctccccacctccaccgccgcctcaccgccgccctacctcgacccgcatcccgccgactcctacacctacacggtcttccttgtccccgttcgcctccgccgcggcctctgtcgcggcggccgttgcatcgtcccctgcctcaccgttctcttcctcctcgcgctcgcgggcttcctcctctggcccgcggacccggacatctccctggcccgcctccacctagcgcacgtctccgtcgtggcacgccctgccgtcgccgtcactatatccgccacgctcaaggttcgcgttcgcaatcctgacctcttcgcgctcgactacacccgcctcgacgtcgctatcggctaccgcggtgcggggcttggccgggtaacatccggcggcggacgggtccgggcgcgcgctgtctcgtacgtcgacgccaacctgcagctcgacggcatacgcgtcgtcgaggacgcgatgtacctgctcgaggacctcgcgcaaggatccgtgcccttcgacaccatcgccgaggtcgagggccacctccacttccttttcctcagcatcccggtcaaggggagaatatcttgcgtaatgcatattaatccacacaaccaaaccatagtacatcaggactgctatcctgagtgaattgcttatggcgtggaaatgtggaagggtgtaagctatgttgccttgcgaatggatcgtttgatttgtttctaaccttcgcttccagtcgtggttgtaaaagtaagaaccaaccaaggggtgtttgaatgtaattgagctaatagttagttcgctaaaaaattactaagtagaattagctaactaacaaataacaatctaactattagataatttgatgaaaatagcttgtttggttggctttaatccgtaccgacttctatagtgttttgtctctatgaattgcagctgcagcagtttgaatatctggctttaatctaaagcgaacagccgttagcactt

SEQ ID NO: 90282 - DNA, 861 bp, Zea Mays
atgtccgaatgtccactgatccattactcggcatggctccatctccggcaggcacacccaagcactgcgaaggaggagcgcaagtcgctggcgcggctgatcgacgcgcgcaagctcacggtggaggccgcggcgcacgccgtgcagaacgagcgcatgtcggtgcgcgccgtggtgcaggtgctcttctcggagcacggcaagctcaaccgcctcgcggagctgagcgcctccttcagcggccagcgcagccccagccctagccccaaccctgcgctggagctccccggtcgctgcccctccaagcgcgaggtcctcgcgcagcaccaggaggtgcgccgcctccgcgacgacgtcgccaggctccaggtgcagtgcaacgcgctgcaggcctaggtggacaggctgggctccgagaggcgtcgacgcagcgggggcggcggtggcgggttcttcaagtggagcgcgttctggttcggcggcggcatgggcgccgacgtaggtcgacgacttggagagcggcatggagcaccggacgccgcccaaggggaagaagagcgccacggcgacgcccaatgccaagtggcgcaagtccacgtcctgagatgacaggggtgttgtgttgaagggatggcgatcgacgactgttaatcatgttttctgctttttggctggggtttgtgattcctctgagtttgaacgtcatatgttgtgttgctgtcatctcgagtttgtgttcgtggtgaaactatcagactggaaattgtaccacgcggctagaagcacctaccgttgacaggcagaagccatgcacgaacagattccaacatggaaaatgcaaaagtcgatgtttagagatgc

SEQ ID NO: 90283 - DNA, 1620 bp, Zea Mays
tccctgcccgtcctccacctgtccgagacacttacaataatccttgcccaatcccgtctttagccgctagggttacgcgtccacggcgacgacctctgcgcagagcgtgctgcgattggccggccttcctgggatcctccccgcgcccgacacccggaaacgcgcgcgcgcgcgagggagagacagagtgaggaaacgagggaaggagacgacgcgctcgcctattggccgccggctccgctccttcgcgcccagtgcgacggccacggcctgagcggcgctgccagcaaggcggctagtatgagcagcatggagtcgcggccgggccgaacgaacctggtggagcccatagggcacggcgccgcgctgccgtccggcggccaggcagtgcagccgtggtggacgagctccggggctgtgctcggtgcagtctcgccagccgtcgtggcggtggcgcccgggagcgggacggggattagcctgtcgagcagcccggcaggtggtagtggtggtggcggcgcggctaaaggagccgcgagtgacgagagcagcgaggattcacggagatctggggaaccaaaagatggaagcgctagtcaagaaaagaaccatgccacatcgcagatacccgctctggcgccagagtatttggcaccatactcgcagctggaactgaaccaatcaattgcttctgcagcatatcagtacccagatccttactatgcaggcatggttgctccctatggaagtcatgctgtggctcattttcagctacctggactaactcaatctcgaatgccattacctcttgaagtatccgaggagcctgtttatgtaaatgccaagcagtaccatggtatcttaagacgacggcagtcccgtgctaaggctgaacttgagaaaaaggtggtcaaagccagaaagccataccttcacgagtctcgtcatcagcacgcgatgaggagggcaagaggaaacgggggacgcttcctgaacacaaagaaaagtgacagtggtgctcccaatggtaaggctgaacctgagaaagctagtacaattgttgcataatctcttcatactgcacttgatatgagtgcacgcatttctgtttctttataccctgctcccgcatgccctaggaggcgaaaacgccgagcatctccatgtccctcccgacttactacagctacgacagaacgaggcttgaagtagcggtatggctctggcatccttgaacagcagttcctgtccacgggcgtaggcattcgagaccggattcatatagctctccacagcatacgcgcagccatctctgcggtaacgcacgttctcctgaacgagctttgtagcgagataggtatgcaagtgcaatctgggcgcaggaatccatcatcaagtgcccaatgcccatggggtaggtacgctgtttcaggcaattcattcttggctttcacgttccacccttgtgtaactggtgtgttgtaaatgtgtggaaaactaagcttgtgctctgtatcgggccgttcagcggaactgcaaaacgcctgtataattaagatcgaactttggattaactcggtaatgctttgtctggttttcttttagcttttcaactgtaac

SEQ ID NO: 90284 - DNA, 1559 bp, Zea Mays
tccctgcccgtcctccacctgtccgagacacttacaataatccttgcccaatcccgtctttagccgctagggttacgcgtccacggcgacgacctctgcgcagagcgtgctgcgattggccggccttcctgggatcctccccgcgcccgacacccggaaacgcgcgcgcgcgcgagggagagacagagtgaggaaacgagggaaggagacgacgcgctcgcctattggccgccggctccgctccttcgcgcccagtgcgacggccacggcctgagcggcgctgccagcaaggcggctagtatgagcagcatggagtcgcggccgggccgaacgaacctggtggagcccatagggcacggcgccgcgctgccgtccggcggccaggcagtgcagccgtggtggacgagctccggggctgtgctcggtgcagtctcgccagccgtcgtggcggtggcgcccgggagcgggacggggattagcctgtcgagcagcccggcaggtggtagtggtggtggcggcgcggctaaaggagccgcgagtgacgagagcagcgaggattcacggagatctggggaaccaaaagatggaagcgctagtcaagaaaagaaccatgccacatcgcagatacccgctctggcgccagagtatttggcaccatactcgcagctggaactgaaccaatcaattgcttctgcagcatatcagtacccagatccttactatgcaggcatggttgctccctatggaagtcatgctgtggctcattttcagctacctggactaactcaatctcgaatgccattacctcttgaagtatccgaggagcctgtttatgtaaatgccaagcagtaccatggtatcttaagacgacggcagtcccgtgctaaggctgaacttgagaaaaaggtggtcaaagccagaaagccataccttcacgagtctcgtcatcagcacgcgatgaggagggcaagaggaaacgggggacgcttcctgaacacaaagaaaagtgacagtggtgctcccaatggaggcgaaaacgccgagcatctccatgtccctcccgacttactacagctacgacagaacgaggcttgaagtagcggtatggctctggcatccttgaacagcagttcctgtccacgggcgtaggcattcgagaccggattcatatagctctccacagcatacgcgcagccatctctgcggtaacgcacgttctcctgaacgagctttgtagcgagataggtatgcaagtgcaatctgggcgcaggaatccatcatcaagtgcccaatgcccatggggtaggtacgctgtttcaggcaattcattcttggctttcacgttccacccttgtgtaactggtgtgttgtaaatgtgtggaaaactaagcttgtgctctgtatcgggccgttcagcggaactgcaaaacgcctgtataattaagatcgaactttggattaactcggtaatgctttgtctggttttcttttagcttttcaactgtaacacggccacagctgattcatgtgatgtgcttgcatatctttccttgtgccaa

SEQ ID NO: 90285 - DNA, 1556 bp, Zea Mays
tccctgcccgtcctccacctgtccgagacacttacaataatccttgcccaatcccgtctttagccgctagggttacgcgtccacggcgacgacctctgcgcagagcgtgctgcgattggccggccttcctgggatcctccccgcgcccgacacccggaaacgcgcgcgcgcgcgagggagagacagagtgaggaaacgagggaaggagacgacgcgctcgcctattggccgccggctccgctccttcgcgcccagtgcgacggccacggcctgagcggcgctgccagcaaggcggctagtatgagcagcatggagtcgcggccgggccgaacgaacctggtggagcccatagggcacggcgccgcgctgccgtccggcggccaggcagtgcagccgtggtggacgagctccggggctgtgctcggtgcagtctcgccagccgtcgtggcggtggcgcccgggagcgggacggggattagcctgtcgagcagcccggcaggtggtagtggtggtggcggcgcggctaaaggagccgcgagtgacgagagcagcgaggattcacggagatctggggaaccaaaagatggaagcgctagtcaagaaaagaaccatgccacatcgcagatacccgctctggcgccagagtatttggcaccatactcgcagctggaactgaaccaatcaattgcttctgcagcatatcagtacccagatccttactatgcaggcatggttgctccctatggaagtcatgctgtggctcattttcagctacctggactaactcaatctcgaatgccattacctcttgaagtatccgaggagcctgtttatgtaaatgccaagcagtaccatggtatcttaagacgacggcagtcccgtgctaaggctgaacttgagaaaaaggtggtcaaagccagaaagccataccttcacgagtctcgtcatcagcacgcgatgaggagggcaagaggaaacgggggacgcttcctgaacacaaagaaaagtgacagtggtgctcccaatggcgaaaacgccgagcatctccatgtccctcccgacttactacagctacgacagaacgaggcttgaagtagcggtatggctctggcatccttgaacagcagttcctgtccacgggcgtaggcattcgagaccggattcatatagctctccacagcatacgcgcagccatctctgcggtaacgcacgttctcctgaacgagctttgtagcgagataggtatgcaagtgcaatctgggcgcaggaatccatcatcaagtgcccaatgcccatggggtaggtacgctgtttcaggcaattcattcttggctttcacgttccacccttgtgtaactggtgtgttgtaaatgtgtggaaaactaagcttgtgctctgtatcgggccgttcagcggaactgcaaaacgcctgtataattaagatcgaactttggattaactcggtaatgctttgtctggttttcttttagcttttcaactgtaacacggccacagctgattcatgtgatgtgcttgcatatctttccttgtgccaa

SEQ ID NO: 90286 - DNA, 768 bp, Zea Mays
atgaggaagatagacaaatacagaggcatagttggctttttagatctagagatgatcattttaaagagaatcaatgaagaggctgatgaagtcaaagcatacattgtgaaagcattgcttgctcagcaggacgaggagtgcatatttgttgtttgccaggaaggggcttttggtgcttatgtcgacaaaaaaggtcaccataacaagaattttggtcgcacagttatatggaaacattttcaggcacacatacaaccacctggcagtatgctttgcggacaatatgtgatgtaccacatgttatcctttgcggataatcttagtttggaccgtgatcgatatcctcagggtcgtgctggttttgcaacctgtccattattgcctgatgagatagcaaatgtccgagaacggttgctcgacttcttcatgaatgagctcataccatacatgaatttgcaacgccatgtacttgttgatggcaagatgccatttccatccctaagacaaacgggaactaaacgttgcctccgtcttcacccaattagggatgaggatgctaagtttaagctctgcaaggccaacgacaccatcaagatcgatctggagaccaacaagatcatggacttcttcaagtttgacgtcggcaacgtggtcatggtgaccggcgggaggaacatcgggcgtgtaggagagatcaagaactgggagaagcacaagggcagcttcgaggtcatcgatgtgctgcttggagctttttgctatgtctag

SEQ ID NO: 90287 - DNA, 747 bp, Zea Mays
gaggacctcgtaaagggaatatccacagacctctctgtctctccctctcccgtgggtagcagggtgggtagctctcctcctcctcctccccctccccggccgtggtccgtgggtatggaggagaatcaagagaagtttgctccggagagcagcggcggcgacggtggtggctcggtgagaacgatctgcgtcttctgcggcagcaggccggggaaccggccgtccttcagcgctgcggcgctcgacctggggaagcagctggtcgagaggcagatgaacctggtgtacggcggcggcagcggcgggctgatgggcctggtgtccaaggccgtctacgaaggcggccgccacgtcctcggggtcatccctaccgccctcctacctgaagaggtagtaatgccgaatctccgtcgttctggcctgtcgtcgcacgagctagctaggaaaccacctgcacgggtttcagtgtgtgtgtgtgtgcgcgcgcatgaactaaacgtgtacgtgtgtgtgtggacgacctgctgcaggtgtcaggggagacattgggagaggtgaaagtggtcagggacatgcatcagcgcaaggcggaaatggcgaaacatgccgacgctttcatcgccctgccaggtcagtcgttagctagtaatactgtgtaccagcagtattgtattgttctggatttcgttcttgctaagacgacaacagctatcgccttcgtcgtcgctagctagtaattaatgtata

SEQ ID NO: 90288 - DNA, 720 bp, Zea Mays
gaggacctcgtaaagggaatatccacagacctctctgtctctccctctcccgtgggtagcagggtgggtagctctcctcctcctcctccccctccccggccgtggtccgtgggtatggaggagaatcaagagaagtttgctccggagagcagcggcggcgacggtggtggctcggtgagaacgatctgcgtcttctgcggcagcaggccggggaaccggccgtccttcagcgctgcggcgctcgacctggggaagcagctggtcgagaggcagatgaacctggtgtacggcggcggcagcggcgggctgatgggcctggtgtccaaggccgtctacgaaggcggccgccacgtcctcggggtcatccctaccgccctcctacctgaagaggtgtcaggggagacattgggagaggtgaaagtggtcagggacatgcatcagcgcaaggcggaaatggcgaaacatgccgacgctttcatcgccctgccaggtcagtcgttagctagtaatactgtgtaccagcagtattgtattgttctggatttcgttcttgctaagacgacaacagctatcgccttcgtcgtcgctagctagtaattaatgtatagtgttagcagtgtgagggcatgtacagtgggtatcttaagttgtgtcttagagtgtgtctacgggggtgaatgtaaaaaatctcaagacatgtatcttgacgaagacacagtg

SEQ ID NO: 90289 - DNA, 1071 bp, Zea Mays
gaggacctcgtaaagggaatatccacagacctctctgtctctccctctcccgtgggtagcagggtgggtagctctcctcctcctcctccccctccccggccgtggtccgtgggtatggaggagaatcaagagaagtttgctccggagagcagcggcggcgacggtggtggctcggtgagaacgatctgcgtcttctgcggcagcaggccggggaaccggccgtccttcagcgctgcggcgctcgacctggggaagcagctggtcgagaggcagatgaacctggtgtacggcggcggcagcggcgggctgatgggcctggtgtccaaggccgtctacgaaggcggccgccacgtcctcggggtcatccctaccgccctcctacctgaagaggtgtcaggggagacattgggagaggtgaaagtggtcagggacatgcatcagcgcaaggcggaaatggcgaaacatgccgacgctttcatcgccctgccaggtggttacgggacaatcgaagaactgctggagatcatagcgtgggcgcagctgggcatccacagcaaaccggtggggttgctcaacgtggacggctactacaacagcctgctctcgctgttcgacaaggctgtcgaggagggcttcatcgacaccaaggcacggaacatcttcgtcctcgctgacaccgccgccgacctgctgactaggctcaccatgatggcgcgcctggcagccgacgacgacgatgctactactacccccagaggagacggagacggagacggagacgaacacaagggggccaccaccgctgcaggcgtcaaaaggaaaaggggctagatcgattatagttgttgctgttgttgttgtattcttgtgcctatccatccgtgcatgcatgcatgtatcctctctagctttctagtaggtttcgttcctgcatgcaatctgtggatcctgctgtaaccaagctagtacgtatctcctaagtactaactactagtgaagctgcagtgtgtacctgtcgtgattaattaataataagccatgcagctacatatttatttgatgtacatctaa

SEQ ID NO: 90290 - DNA, 774 bp, Zea Mays
cctagcttgtcgtatttaactgccatttaatttaaataaatacgcctcatgcatgccctcatctatagtttctagcacattatattatatagttaagcgccggccggccggccggcatgccccacgcatctctgttgtgcccaataataatcttaatctcctctagctatagttgctgatcgacgcgaaagagagaggtgtgtggtttaaaggaggaactaatcaatcaacgctgcgttacgtacgtggccgtcgtcggcgcatgcatgcatcaggtggggttgctcaacgtggacggctactacaacagcctgctctcgctgttcgacaaggctgtcgaggagggcttcatcgacaccaaggcacggaacatcttcgtcctcgctgacaccgccgccgacctgctgactaggctcaccatgatggcgcgcctggcagccgacgacgacgatgctactactacccccagaggagacggagacggagacggagacgaacacaagggggccaccaccgctgcaggcgtcaaaaggaaaaggggctagatcgattatagttgttgctgttgttgttgtattcttgtgcctatccatccgtgcatgcatgcatgtatcctctctagctttctagtaggtttcgttcctgcatgcaatctgtggatcctgctgtaaccaagctagtacgtatctcctaagtactaactactagtgaagctgcagtgtgtacctgtcgtgattaattaataataagccatgcagctacatatttatttga

SEQ ID NO: 90291 - DNA, 905 bp, Zea Mays
accccagtccccataccacaccaccaccgcggcacacacaaaccaaccacaggcaataaacactaaacagctcccactcccagtaaatttctcgtctcccaatctccgattcgaggaagccggaggaggggatttcgagccgcggaatcgggacattagagtggccctcacccggcgctggaattgccgagagggactgggttggagtggagttcgggaggtgtgagagaaggcggcgatggggcggctgttcctgatgcacctggacggcaacgtctacagctgcaagcactgcaggacccagctcggcgttgccagcgacatcatctccaaggccttccactgcaggcacgggaaggcgtacctcttccataaggttgccaatgtgacttctggagtaaaagaagatcgcatgatgatgacaggaatgcatactgtttctgatatcttctgtgttggctgtggatccatcgttggatggaaatatgaggctgctcatgagaagagccagagatacaaggaaggaaagtttattctggagaggtacaaggtgtcgggccctgacggaagccaatactggattccacaagatcctcacttgggtggaagcgacgccgatgatatatgaagcgcaagtcaacaagttcaagcctgctgttcgtcgcctcccctgtagataacctgggtgtttttgctctttagtcagccgggattgctcccattgaaataatccccggcataaattattgttgttcttgatgacatgatcatatccttcctattgcccttggaagttgttggatgtttctattgtatatgcgtaaccggtgttgcttataagttcatcgagttgtatgccaagcgctaatgaccaaataattaaagtttgttaattgtctgatcga

SEQ ID NO: 90292 - DNA, 830 bp, Zea Mays
ggcaaaaaaccaatgtacgtggcttggacaacttgatgacctcttgccaacaagaggtcaaaatttggtagttggtgattcgatatcaaaacacttcattagctccaatattatgcatttcactgtttggtattacggtgcagcgttttccagagataagtcatatttcttacagtattttgtcagacagcagatgtatcattaactcatgtctgttatacccagtgccaatgtgacttctggagtaaaagaagatcgcatgatgatgacaggaatgcatactgtttctgatatcttctgtgttggctgtggatccatcgttggatggaaatatgtaagatttgcaacggttatttcgtagtgttcttcgtatattgccttgcatctatgtttttatgatgctcttctctaggaggctgctcatgagaagagccagagatacaaggaaggaaagtttattctggagaggtacaaggtgtcgggccctgacggaagccaatactggattccacaagatcctcacttgggtggaagcgacgccgatgatatatgaagcgcaagtcaacaagttcaagcctgctgttcgtcgcctcccctgtagataacctgggtgtttttgctctttagtcagccgggattgctcccattgaaataatccccggcataaattattgttgttcttgatgacatgatcatatccttcctattgcccttggaagttgttggatgtttctattgtatatgcgtaaccggtgttgcttataagttcatcgagttgtatgccaagcgctaatgaccaaataattaaagtttgttaattgtctgatcga

SEQ ID NO: 90293 - DNA, 1072 bp, Zea Mays
aaaccaggtcctcgctcggtttggtttgcttaccactccgtcctagcagcacggtcctcgattcttccgatcgctccggcagggcacacaccgaagaaggtggttagcggcctagcgccgccgaagaaagtatggcagcagccaccacgcctgaggagaacgccgccgccgcggccgccgtggacgccatcactgagacgaccaatcgcttcaccgtcaacacggacgccgccggtgccggtcctctcaagctcgacgacgtggacggcaacgtctacagctgcaagcgctgcggcacactcctcgccgtcgccgacgacatcgtctccaagagcttccattgcaagaacgggaaggcttacctcttcgataatgttgtcaatgtaaccgttggagagaaagaagaccgcatgacgatcacagggatgtattccgtttctgatattttttgtgttggctgcggagagattgttggatggaaatacgaggctgcacatgagaggagccagaaatacaaggaaggaaaatttgttctcgagaggtaccagttgcttggagcagaatgaagacttgaccgccgagtgctatacacggtgctcggtggctggctggaagagagactagtgatgcatactgcatataactttcttaccgtgtggatatatgaattttaatacgattcgacaagcttaaactcgtctgtggaccctgtaataaccgatccctcctgccatgttcttgaggccgggtgctgtgacttcatatatacattaattatgtatgtatagacatggatgtttgttgtatgtatgtgtagaccgtactagttgtgtgattgtgtcaagttctatggcgatgatgtggatgcgtgtatgtatatgtgtatgtctatttttgttttcgcccttgcccttcacaaatcacaaccaactgctgactattgttcatcgtccagccagttttatggtagagaaaatgagccgtcaaccccccgaagcggcccagcccaatgtgcgggatcgggctaggaacatcagacatgacgttgagtgagatcgccatcaccatcacg

SEQ ID NO: 90294 - DNA, 3187 bp, Zea Mays
caaagccacgactccctcaccccgcaggcccgcacttcccccagtctactctcttttcagtttctctctccccactttccccatttttaccgcacatctctccttcctcggcgtctcgcacaccccagcaccttcgtctcccctcccctcccccaacaatcggaaccggataggaagttcggcttcctcccggacgactcggcgcaaggtcgcagcttttctctcgatttttcgcgcttccccgttttgacgcttgcttcgcatggggattctggagatctttggggcggttcgctgctgagatggttcgcctcatcacgcgctgctgtgactcccaacagttcttccgatccgaggagcccctgttatgaacggcatgccgatctctgcgtcctctgcggcaagcgtcgacagtggcgcggtggcggccggcacgcccatgaagaatgcaacggcggcggacgctctcgccgagatggcgagacatcttaccgtcgacacggaagacaccttcgcgggcctgctggagctcgccgctgacgacgacgcagaggggctgcgcctcgcgctggagcgcgcgccacctgccgccgcggacgaggctggcctctggtacggccgccggaaggtcctggagcaccgcaccccgctgatggtcgctgccacctatgggagccttgccgcgctccgcctgctagtgtccatctcgtatgtggacgtcaaccgccgctcgggcacggacggcaccactgccctccactgcgccgcctctggtggctcacggacggctgttgagtcggtcaagctgcttctgggagccggggcagacgctaacaccatggatgacgccgggcgtcgtccggctgatgtgatctctgtgccaccgaagatgtttgatgccaagttcgcccttcaagatcttcttggattccccaagtctgagcatggcatgctccgggtggtgacaaggtccaccaactcgatctcatcgcctgtttcatcccccactgcagaggatgcacggtcaccgtctgcttctgtgatgatgatgacaaagttcgctgacttgcctagggttgcgacatcggagaagaaggaatatccagtggatccatcccttccagacatcaagaacagcatatatgcttccgatgagttccgcatgtactcgttcaagatccgcccttgctcacgggcatactcgcatgactggactgagtgcccatttgtccacccaggagagaatgctcggcgccgagacccccgcaagtaccactacagttgtgtgccatgcccagatttcaggaagggcgtatgccggcgcggagacatgtgtgaatatgctcatggagtgtttgagtgctggctccatccagcacagtaccggacgcgcctatgcaaggacggcacaagttgcaatcgtcgcgtctgtttctttgcccacacaactgatgaactccgtccattgtatgtctcgactggatcagcggtgccatctccaagagcttcagcaacagctgctatggagatggctgcagcaatgggcttgatgcccggttccccatcatcggtttccgcggtaatgtccccgtttaccccaccaatgtccccttcgggcaatgggatgcccccttcattgggctggcagcagccaaatgttccaactttacatcttcctggcagcagccttcagtcaagcaggctccgaacatcacttagtgcaagggatatgcctgctgatgactactccatgatgcgggatcttgattcccaacttatgaatgatctttgctattcccgtctcagttcatccacagggaaccactctgctagaaccaagtccctgaatccatcaaacctggatgacctcttctctgctgaaatgttatcatccccaaggtatagtaatgctgaccagggtgcaatgttttcaccttctcacaaggctgctatcctgaatcagttccagcagcagcagcaagcactgctgtctccaatcaacacaggagtttactctccaaagggcgtggacaaccagcagttaccttcacactcatcgctgctgcaagcatcactcgggatgccctcccctggccggatgtctccacgatgtgtcgaatcgggctccccaatgagctcccacctagccgctgctcttgtccagcgggagaagcagcagcagacaatgagaagtctcagctctcgtgaccttggtcctagcgcggcacgagcttcggctcttggctcccctctaagctcatcatggtctaagtggggatctccttcggggacaccagattggggcataaatggtgaagaattgggtaagctccggcgctcatcgtccttcgagctgaggtctggtggtgacgaccctgatctctcttgggtgcatacactggtcaaggaatctccaccggagaagcaagttactacggctgaatcaattagttccgttggaccctcaccactaatgcctcccggcatgaacaatggcgacggttctggcctgagcacccagctggatggacacgaccaagccgcggttataggagcgttgcttgaacagatgcagcttgaccagcagattggtagtctagcaacatagactcacgacgcgattgaggtactcaacaaagatggatagctgaaggcggtgatattcagagattggttttctttaatttttttttgggggggggggggggggggggggggtaaatcctacacattattatttgaggttcctttaggttaaaagagtgaagctcctcggttggggtttgttcctaggccaacccaggtagagagaatcgcaccccggcagcatcggttcatcgactgaagcattaaccctcttaagaaaaaaaaaagttcgctgtgttggaaattcttttcctttctccctagcggtgtttattttgttcattatggtatcgatacctgatgtacttactgatggtgtaagtgggatcctatagtaggtctgtcaagttcaaaaggtatttttttttcttcaccctttaccatttgtcgtggattatctcgtggccttgttttggttagaccttgaggccggcgtaatcctcgtggatgatatttgcaaataaatgtaatatttgctttcgaacttactgctactgttccaatctcgccatccatattcatctggtctacgttcacctgt

SEQ ID NO: 90295 - DNA, 1724 bp, Zea Mays
attcagatatttcgggtactcagttaataataacctactctctgatgtctgatgtcgcaactcgcaactctagctcccagcctcccagtcttcccaggcggccggcggcgtcctaccagtccaagcctgaagcctcccaggccaatcctcccaggcggcgtcctcactcctctcccagtcccaggcggcaggcgcagccggccaggcggctgcaggcacacgcgcactggcgcaccgcggcaccgcgcactcgcgcaccagcaggcagcagccggccagtcccactgctccacaccgccccgaccaaccttcacacctagccggcccaaccccacgcacggacgttgaatcaggctagtcctcccagtctcccactcccaggcagcagggcggcaggcgcaggcgcgcagccaccagccggccaagcgctaccgcctttcccctctcctcctctcttttcccctcccttttccagcacggggagcgacctgcgctgccgccacgatgccgaagcactaccgccctgcgggtaagaagaaggaagggaatgcggcaaagtacatcacgaggaccaaggcggtcaactacctgcaagttagcctcgcaatctttaggaagctatgcattctaaagggtgtctttccacgtcagccaaagaagaaggtggaagggaaccacaagacctactaccacacaaaggatattgcattcctcgctcatgaccctttgatcgagaagttcagggagattaaggtccatcgaaggaaggttaaaaaggctgttgctaagaaaaacagggatcttgcagacaggctgttgaatcggccaccaacttacaagcttgataggcttgtccttgaaaggtatccaacattcgttgatgctcttcgtgacttggatgactgccttacaatggtgcatctgtttgcggcattacctgctgttgacggtgaacgtgttgaggtcaaacgaatccataactgccgcaggttaagccatgaatgcttgacatttatttccgtgaagggcatatattatcaggctgaagttcaaggacaaaagatcacctggctaactccgcatgctcttcagcaagtattaactgatgatgttgatttcaatgtgatgctttcttttctagaattctatgagactcttctaggatttgtgaacttcaaaatctatcattcaataaatgtaaattatcctcctattctggatccacgtctggaagctttagctgttgagctctatgcattgtgccgatacatgtctgctggttccagaagaatgattgggaattcacaaactgacgaagtaatggaagataaggatgagaaaagtaaagctgaggaagtaattgaggaagagaaggttgtgaagaataaagcaagctcaaaagcagatgaatctgagttcagattagcacagcttcaacatcagctcccaaccaatgaacctggtgcactgatgaatcttgtagaagaatcaactgccgatgatgcagatgatgatgatactaaagattgtaaaggtttatttaagaacttaaagttctacttgagtcgagaggtagggagtccctgttatttataattccagcatttggagggactgtttcatgggaaggagaaggagctccatttaaagaaatagacgaagatatcactcaccaggttgattccatttgcaataatttattacaccaaagtttaactatatag

SEQ ID NO: 90296 - DNA, 1957 bp, Zea Mays
attcagatatttcgggtactcagttaataataacctactctctgatgtctgatgtcgcaactcgcaactctagctcccagcctcccagtcttcccaggcggccggcggcgtcctaccagtccaagcctgaagcctcccaggccaatcctcccaggcggcgtcctcactcctctcccagtcccaggcggcaggcgcagccggccaggcggctgcaggcacacgcgcactggcgcaccgcggcaccgcgcactcgcgcaccagcaggcagcagccggccagtcccactgctccacaccgccccgaccaaccttcacacctagccggcccaaccccacgcacggacgttgaatcaggctagtcctcccagtctcccactcccaggcagcagggcggcaggcgcaggcgcgcagccaccagccggccaagcgctaccgcctttcccctctcctcctctcttttcccctcccttttccagcacggggagcgacctgcgctgccgccacgatgccgaagcactaccgccctgcgggtaagaagaaggaagggaatgcggcaaagtacatcacgaggaccaaggcggtcaactacctgcaagttagcctcgcaatctttaggaagctatgcattctaaagggtgtctttccacgtcagccaaagaagaaggtggaagggaaccacaagacctactaccacacaaaggatattgcattcctcgctcatgaccctttgatcgagaagttcagggagattaaggtccatcgaaggaaggttaaaaaggctgttgctaagaaaaacagggatcttgcagacaggctgttgaatcggccaccaacttacaagcttgataggcttgtccttgaaaggtatccaacattcgttgatgctcttcgtgacttggatgactgccttacaatggtgcatctgtttgcggcattacctgctgttgacggtgaacgtgttgaggtcaaacgaatccataactgccgcagcggatatttattattttcttatcatatgatgaaccatgaatgcttgacatttatttccgtgaagggcatatattatcaggctgaagttcaaggacaaaagatcacctggctaactccgcatgctcttcagcaagtattaactgatgatgttgatttcaatgtgatgctttcttttctagaattctatgagactcttctaggatttgtgaacttcaaaatctatcattcaataaatgtaaattatcctcctattctggatccacgtctggaagctttagctgttgagctctatgcattgtgccgatacatgtctgctggttccagaagaatgattgggaattcacaaactgacgaagtaatggaagataaggatgagaaaagtaaagctgaggaagtaattgaggaagagaaggttgtgaagaataaagcaagctcaaaagcagatgaatctgagttcagattagcacagcttcaacatcagctcccaaccaatgaacctggtgcactgatgaatcttgtagaagaatcaactgccgatgatgcagatgatgatgatactaaagattgtaaaggtttatttaagaacttaaagttctacttgagtcgagaggtgcctagggagtccctgttatttataattccagcatttggagggactgtttcatgggaaggagaaggagctccatttaaagaaatagacgaagatatcactcaccagctgaaaacttgcccaacacattagaatatattgaaggcgaggttgaagctcttgacgaagttattggtagccatgctgacttctgcgccctggtagcttctcggggcacagctaccgcttttctgaaagctggttgcacgcatggaaaaattgttaataggcccaactacagcttatcatcatcagatctgatagatattccaagcctagctcgaagtatcggaaatagatttatgacccagatttgggt

SEQ ID NO: 90297 - DNA, 2823 bp, Zea Mays
attcagatatttcgggtactcagttaataataacctactctctgatgtctgatgtcgcaactcgcaactctagctcccagcctcccagtcttcccaggcggccggcggcgtcctaccagtccaagcctgaagcctcccaggccaatcctcccaggcggcgtcctcactcctctcccagtcccaggcggcaggcgcagccggccaggcggctgcaggcacacgcgcactggcgcaccgcggcaccgcgcactcgcgcaccagcaggcagcagccggccagtcccactgctccacaccgccccgaccaaccttcacacctagccggcccaaccccacgcacggacgttgaatcaggctagtcctcccagtctcccactcccaggcagcagggcggcaggcgcaggcgcgcagccaccagccggccaagcgctaccgcctttcccctctcctcctctcttttcccctcccttttccagcacggggagcgacctgcgctgccgccacgatgccgaagcactaccgccctgcgggtaagaagaaggaagggaatgcggcaaagtacatcacgaggaccaaggcggtcaactacctgcaagttagcctcgcaatctttaggaagctatgcattctaaagggtgtctttccacgtcagccaaagaagaaggtggaagggaaccacaagacctactaccacacaaaggatattgcattcctcgctcatgaccctttgatcgagaagttcagggagattaaggtccatcgaaggaaggttaaaaaggctgttgctaagaaaaacagggatcttgcagacaggctgttgaatcggccaccaacttacaagcttgataggcttgtccttgaaaggtatccaacattcgttgatgctcttcgtgacttggatgactgccttacaatggtgcatctgtttgcggcattacctgctgttgacggtgaacgtgttgaggtcaaacgaatccataactgccgcaggttaagccatgaatgcttgacatttatttccgtgaagggcatatattatcaggctgaagttcaaggacaaaagatcacctggctaactccgcatgctcttcagcaagtattaactgatgatgttgatttcaatgtgatgctttcttttctagaattctatgagactcttctaggatttgtgaacttcaaaatctatcattcaataaatgtaaattatcctcctattctggatccacgtctggaagctttagctgttgagctctatgcattgtgccgatacatgtctgctggttccagaagaatgattgggaattcacaaactgacgaagtaatggaagataaggatgagaaaagtaaagctgaggaagtaattgaggaagagaaggttgtgaagaataaagcaagctcaaaagcagatgaatctgagttcagattagcacagcttcaacatcagctcccaaccaatgaacctggtgcactgatgaatcttgtagaagaatcaactgccgatgatgcagatgatgatgatactaaagattgtaaaggtttatttaagaacttaaagttctacttgagtcgagaggtagggagtccctgttatttataattccagcatttggagggactgtttcatgggaaggagaaggagctccatttaaagaaatagacgaagatatcactcaccaggttgattccatttgcaataatttattacaccaaagtttaactatatagacggagacattgtgtaccatccctaaagtaagatgccactctaagtaccacgacagcaatgccatactagggcaatagttactacaatacaatttttgtatgtggctaactgttcatattttacactctaccatcatatgatcatatctagcgaagtaaaataaaatggcctgtggatttttttatgcttgctagtatccatattgtaataaaaaataggagtataatatcacatcctcacactataacagtttaaagaatgaattgctcaaacaactagaaaaatctgagcaggaaaagaaacaccttgaagcaagtcttaaaactgagatgcaaaataattcaaatttgcaaaaatccttgaaggagcttcaagagaaatgcctaagcttcggcagccgatgcgtgcagcggctgaaggatgtgtttcattctattggagccagctctgaaaaatttacactttcagctgaaaacttgcccaacacattagaatatattgaaggcgaggttgaagctcttgacgaagttattggtagccatgctgacttctgcgccctggtagcttctcggggcacagctaccgcttttctgaaagctggttgcacgcatggaaaaattgttaataggcccaactacagcttatcatcatcagatctgatagatattccaagcctagctcgaagtatcggaaatagatttatgacccagatttgggtaaatggcgggcggaaaatggcgggtgacgaagctcgaagtcatcttaagccggtaaaaagcttatatttgttacttttaccttcttcttgaaatttgcacctttcttattctgttctttaatactcgtaggatgacgaagctgaagtataacaaatctgaagtatgacgaagctgaagcttgatagttgctacaatattctttcctgtaaaaattctggagagacttttgtaatattattatgtaaaaactcatgtaaatttgtacataccttgtaatatattttgtttccgctatctgtgtacaatctgctttgttgtggacgaaacttcttttttgagccgaaggcgaaaaacatattcccttcttttcgtacataac

SEQ ID NO: 90298 - DNA, 909 bp, Zea Mays
cagtgtcgtgctgctcctcttgctcgcactaatcctagagtgtttgtcctccagcttggcgcccatgccgttgtagatgcacacgtcagaatgcggttcggagctccgccccgaagcaaaagatccggtgcgagtgcgaagcgggcattccatttccagcgatgctgagcgcgacccgcgagtggtgcccaaccaccaggccacacggcaccaccgacaacctgtcctccggccggacacgctgctgcgcggggcccgccgcggccccatgcctcggcgccgccccaactgcacgcaactccagccgcgcataaactcggccgcccccgcacgcgtcgccacccttcatccattccatcatcttcgcttccactccccacgttccctacttgctccaagccccggccagatctgctcgcccgcggggaagagggcctcctctcctcctcctccctttgctcgcgctctggtcgaggaggcggaggccggtgccggcaggcggggaggtaggtagcagcttgtggttgcgggagggaagctgtgcgctaggctgccatggcggtggagaagacgctgcccggcgcgagtgcggggaggaccgtgctggtcacgggcggggcgggctacatcggtagccacgccgtgctgcagctcctcctcgcaggcttccgcgtcgtcgttgtcgacaacctcaacaactcctccgagctggccgtccgccgcgtcgccgtgctcgcgggggaccactcccgcaacctctctttccacaaggtgacgaggccgccgcggtgggggcaagggggacattacagggagggcacgtcgcgatgcgagattgccgagggggagcgatgcgagattgccgcgcgggagagggcgagggcgggatgtcgagtggaggcatgttga

SEQ ID NO: 90299 - DNA, 2420 bp, Zea Mays
catataaaccaaaaccctaaaacccatctcctcctctcttttcccctcccttttccagcacggggagcgacctgcgccgccgccacgatgccgaagcactaccgccctgcgggtaagaagaaggaagggaatgcggcaaagtacatcacgaggaccaaggcggtcaactacctgcaagttagcctcgcaatctttaggaagctatgcattctaaagggtgtctttccacgtcagccaaagaagaaggtggaagggaaccacaagacctactaccacacaaaggatattgcattcctcgctcatgaccctttgatcgagaagttcagggagattaaggtccatcgaaggaaggttaaaaaggctgttgctaagaaaaacagggatcttgcagacaggctgttgaatcggccaccaacttacaagcttgataggcttgtccttgaaaggtatccaacattcgttgatgctcttcgtgacttggatgactgccttacaatggtgcatctgtttgcggcattacctgctgttgacggtgaacgtgttgaggtcaaacgaatccataactgccgcaggttaagccatgaatggcaagcatacatatcccgaacccattctctgaggaagacatttatttccgtgaagggcatatattatcaggctgaagttcaaggacaaaagatcacctggctaactccgcatgctcttcagcaagtattaactgatgatgttgatttcaatgtgatgctttcttttctagaattctatgagactcttctaggatttgtgaacttcaaactctatcattcaataaatgtaaattatcctcctattctggatccacgtctggaagctttagctgctgagctctatgcattgtgccgatacatgtctgctggttccagaagaatgattgggaattcacaaactgacgaagtaatggaagataaggatgagaaaagtaaagctgaggaagtaattaaggaagagaaggttgtgaagaataaagcaagctcaaaagcagatgaatctgagctcagattagcacagcttcaacatcagctcccaaccaatgaacctggtgcactgatgaatcttgtagaagaatcaactgccgatgatgcagatgatgatgatactaaagattgtaaaggtttatttaagaacttaaagttctacttgagtcgagaggtgcctagggagtccctgttatttataattccagcgtttggagggactgtttcatgggaaggagaaggagctccatttaaagaaatagacgaagatatcactcaccagattgttgataggccgacacaaagccatgttttcctctccagggattatgttcaaccacagtgggtctttgattgtgtaaatgctcgtatcatattgccaacagaaggttatcttgttggaagagtacctccaccacatttgtctccttttgtggacaatgatgccgagggctacatgcctgagtatgcagagacaataaagaggctccaagctgctgctcgcaatgaggtgttgcctcttccaggtattggtgatgaagatctagacaattcactggtagcagcaatgatggatcgaacagcttctaacgaagctgctgaaaagaagaggaagctggagatgctagagaagcaatacatcgatgaactgaagaaggaaattgatggcgttgctttctctagtttgtcaaacaaggaagcagataaatcaccgaatgcaaaagatgatactcagtcagatcgtgaggaggatgccagtaaacaagaggaggatgatgatgatgatattggtactgctctcatgtctcgcaagcagagaggcctttataaggctatgaagatgggcaaagaaaagaaaaaggagaaagttgagctactcaagaagagaaaaaagaacgcggattctggcgcttcttccaagaagcggcactgatgtgtcacaaatcttcatcgcattggtgtgtcatctctagtagaaatgttaccatgatcagctctgcgtgccaatcccccatgatgggtgggttgccttttgatatctgctatgtatgcttaagatgagttcaaggatatgtaacatgaaacttgaatagaaaagttttgatctgtcttacgaagcatttagactcgttattattgtgaaacttgaatagaaaagttttgacctgtcttacgaagcatttatagttattattgagaagcctggatatattgctcgccccgttttataggaaagaattattttttgggtctccgtagacgaagtttttctggttggcagggttaataattttatgcttgcactgggttggcttggcgtttgcagagaagacacgacgagccacggcatttgcttgacttgctggtataggcgcttgtcttatactcttatctggatatttgtca

SEQ ID NO: 90300 - DNA, 1777 bp, Zea Mays
ccgccgcctccgtcctttctctctcttaccccttcacccggacccgcgcccgcgccaagccaacgccacgccatgccgctggctcctctgtcgctggaaccccctcccttccgtctcatccgccccgccaccggcagcggcggacgcgtcctcccggtcccagggcctgcaccgcgcctatgtcgatcgctgagggcggctccggtggcacccgacaccacggaggagccgtttgcggccgcgcggggccggctagagtcgctgagccaggtcacaggagtgctgggcacgcagtggggcgacgaggggaagggaaagctcgtcgatatcctctcccagcgcttcgacgtcgtcgctcgctgccagggtggggctaacgctggacataccatatacaattctgaagggaagaagttttcacttcatcttgttccatcaggcatccttaatgaaaacactcaatgtgtaattggtaatggagcagttgttcatcttcctggattcttcaaggaaatcgatgggctagagtctaatggaatttcttgcgagggaaggcttttggtatcagatcgtgcccatcttttgtttgatcttcatcaagttgttgatggtcttagggaggcagagcttgggaattcctttataggaacaacaaagagaggaattggaccatgctattcgaacaaggttacaaggaatggacttagagttggtgacctgcgacatatggatatctttggtgcaaaactcaacaccctattaagagatgcagctctacgcttcaaagattttgaatatgataacaagattctgaaagaggaagttgagaagtataaaaagtttgctgaacgattggaacctttcatcaccgataccgtgcatttcgtgaatcagtcgattttgcagaagaagaaaatattggttgaaggtggtcaagctaccatgttagacatagactttgggacctacccctttgtcacttcctctagtccctcagctggtggaatctgtaccgggcttggtattgctcccagaagtctcggtgatatcattggagtggtaaaagcctacacaactagggttggatccggtcctttcccaacagaactattgggtaatactggcgatttgcttcgtgcttctggaatggaatttggtaccacaacaggtcgccctaggcgttgtggctggcttgatatagttgccctgaaatactgttgccaaatcaatggtttctcgtctttgaatctcacaaagctcgatgtcttaactggactcaaggaaattaagctgggtacctcatactacaccgatgatggtaactctgtccaatcattcccagcagatctctctcttttggagcaagtaaaggtcaaatatgaggccctgcctggatgggaggaagacatttcgtcaatacgagattacagtgatctcccagaaacagctcgtcgctacgtggagaggatagaggaactggtcggcattccagtacactacattggtgtcgggcctggacgcgacgccctcatatacaaataataactcgtctggctctggtttcaaagatctctcgcttagttcaataatgtaattgctttggttactaataaaacaggctgatcgtggaagatgtagaattcagcatcctttgctaagtgagttcaaattagctgcatctctccataaaatgccttttgcatttgttatttttactggccaactaatctaaacatctcatttcaaaaacttgacagaccaaaaatgggcaagaatt

SEQ ID NO: 90301 - DNA, 1167 bp, Zea Mays
acctccgatctcccatttcctcacaacctcacccggctccatccacgcggctccaacgccagccacagcacgagccatggactcgcgcgtcgtggacggcgcaggtgggggtgccgacgcctccttgccggccgatccgccgagccccgtgcccgatccggccgcgggcgggatggatgcgcgcctcccatcggacctgcttcgtgcagtgctgcaaaggctgccgccgatcgacctcgcgcggtccgcctgcgtctgccgagcgtggcgcgcggttgcctccgaccgcgccgtggtcgaggccgccttctgtgcgccctggggagtgcggcgcgtcgtcggagagccggcgacgggggccttctggcgggccgcctcccttgggagatttgcgctgtcgcatgcgatccgccgcggggataccgtccccggtgtcgctctcaagtactccgtgcaggtgaccgatatcaaacgattcaacaacatgatgagtgaccatggcatctattcgagggagaggcttctggttccgatcagcaacccagaaatccttcttggcagcacctgctacatcgagatggaccataacgctaagagagaggttgcaatcttttaccccgagggacgcccaggtggcaaaactgactctgtggcaagcattgtctctgcggagaggagaaacaaaaggattctcgagtcggtgaggcggagcctgcacgtcgatgatggcactgctgcgtactacttatctgttactgagggtgatccgagggctgccatgacggagtactccgaggacctgaggtgggagcagcaacgcgcaggtcggtagattcatatatattccaatggcatatgttaagatcatggtgcttgatccttatcatttggtgtatatattgtacaatctggatggttgtaagtataaatacaaactttggtctaatgaatatagatgcatgtacatgataacaattgccaaatggcatcggtgctgagaacaaaaatcgcgccgggtgataattggctggtgaaaagtattacatgacattcgtgaacctgcttgtttgtaagtaacattgtttgttgttgctaaattccttgcggaatactcgattatgctgccgatttttagtttctgtatttaataatttaaagataaaaata

SEQ ID NO: 90302 - DNA, 2891 bp, Zea Mays
tcccacagccacagcctcacacagacaccaacgccactgcactgcaaaagcaagagcagctagctagtaaagatgctgagcgggatcatcgacgggctgacgggggcgaacaagcatgcgcggctcaagggcacggtggtgctcatgcgcaagaacgtgctggacctcaacgacttcggcgccaccgtcgttgacagcatcagcgagttcctcggcaagggggtcacctgccagctcatcagctccaccctcgtcgacgccaacaacggcaaccgcgggcgggtcggggcggaggcgaacctggagcagtggctgacgagcctgccgtcgctgacgaccggcgagtccaagttcggcgtcacgttcgactgggaggtggagaagctgggagtgccgggggccgtcgtcgtcaagaacaaccacgccgccgagttcttcctcaagacaatcaccctcgacgacgtgcccggccgcggcgccgtcaccttcgtcgccaactcctgggtctaccccgcgggcaagtaccgctacaaccgcgtcttcttctccaacgatacgtacctgccaagccagatgccggcggcgctgaagccgtaccgcgacgacgagctccgcaacctccgcggcgacgaccagcagggcccctaccaggagcacgaccgcgtgtaccgctacgacgtctacaacgacctcggcgagcccgacggcggcaacccgcgccccatcctcggcggctccgccgaccacccgtacccgcgccgctgccgcacgggccgcaagcccaccaaaaccgaccccaactcggagagccgactgtcgctggtggagcagatctacgtgccgcgggacgagcgcttcggccacctcaagatgtccgacttcctgggctactccatcaaggccatcacgcagggcatcatcccggcggtgcgcacgtacgtggacaccaccccgggcgagttcgactccttccaggacatcatcaacctgtacgagggcgggatcaagctgcccaagatccaggcgctcgaggacatgcgcaagctcttcccgctccagctcgtcaaggacctcctccccgccggcggggactacctgctcaagctccccatcccacagatcatccaagaggacaagaacgcgtggaggaccgacgaggagttcgcgcgggaggtgctcgccggcgtcaacccgatggtgatcacgcgcctcacggagttcccgcccaagagcacgctggaccccagcaagtacggcgaccacaccagcacgatcacggcggagcacatcgagaagaacctcgagggcctcacggtgcagcaggcgctggacggcaacaggctctacatcctggaccaccacgaccgcttcatgccgttcctcatcgacgtcaacaacctggagggcaacttcatctacgccaccaggacgctcttcttcctgcgcggcgacggcaggctcgcgcccctcgccatcgagctcagcgagccgtacatcgacggggacctcaccgtggccaagagcaaggtctacacgccggcgtccagcggcgtcgaggcctgggtgtggcagctcgccaaggcctatgtcgccgtcaacgactctggctggcaccaactcgtcagccactggctgaacacccacgcggtgatggagccgttcgtgatcgcgacgaaccggcagctgagcgtgacgcacccggtgcacaagctcctgagctcgcacttccgcgacaccatgaccatcaacgcgctggcgcggcagacgctcatcaacggcggcggcatcttcgagatgaccgtcttcccgggcaagtacgcgctgggcatgtcctccgtggtgtacaagagctggaacttcaccgagcagggcctccccgccgacctcgtcaagaggggcgtggcggtggcggacccgtccagcccgtacaaggtgcggctgctgatcgaggactacccgtacgcgagcgacgggctggccatctggcacgccatcgagcagtgggtgggcgagtacctggccatctactaccccgacgacggcgcgctgcggggcgacgaggagctgcaggcgtggtggaaggaggtgcgcgaggtcgggcacggcgaccacaaggacgcgccctggtggcccaagatgcaggccgtgtcggagctcgccagcgcctgcaccaccatcatctggatcgcgtcggcgctccacgccgccgtcaacttcggccagtacccgtacgcggggtacctcccgaacaggcccacggtgagccggcgccggatgccggagcccggcagcaaggagtacgaggagctggagcgcgacccggagcgcggcttcatccacaccatcacgagccagatccagaccatcatcggcatctcgctcatcgagatcctctccaagcactcctccgacgaggtgtacctcggccagcgcgacacccccgagtggacctccgacgcccgggcgctggcggcgttcaagaggttcagcgacgcgctggtcaagatcgagggcaaggtggtgggcgagaaccgcgacccgcagctgaggaacaggaacggccccgccgagttcccctacatgctgctctatcccaacacctctgaccacagtggcgccgccgcagggctcactgccaagggcatccccaacagcatctccatctgagcgactggtaccactaccaccccaggagtgctacgtacgagctggtacatgaataagctaatataagcaatcgtgtaaacgggaagagagcggccggcacgagacggaccatgtattttgcgtaaacgtgtgggctggtgaatcgaattactaccacgtaataagtgaagtgcttgttgcaatcattggcctgccagcttcaagattcttgcagttactattct

SEQ ID NO: 90303 - DNA, 2368 bp, Zea Mays
catgccacgctgatctttctgtcttttggtgccgccccgattccgaacggcggcgcagacgtacctgccaagccagatgccggcggcgctgaagccgtaccgcgacgacgagctccgcaacctccgcggcgacgaccagcagggcccctaccaggagcacgaccgcgtgtaccgctacgacgtctacaacgacctcggcgagcccgacggcggcaacccgcgccccatcctcggcggctccgccgaccacccgtacccgcgccgctgccgcacgggccgcaagcccaccaaaaccgaccccaactcggagagccgactgtcgctggtggagcagatctacgtgccgcgggacgagcgcttcggccacctcaagatgtccgacttcctgggctactccatcaaggccatcacgcagggcatcatcccggcggtgcgcacgtacgtggacaccaccccgggcgagttcgactccttccaggacatcatcaacctgtacgagggcgggatcaagctgcccaagatccaggcgctcgaggacatgcgcaagctcttcccgctccagctcgtcaaggacctcctccccgccggcggggactacctgctcaagctccccatcccacagatcatccaagaggacaagaacgcgtggaggaccgacgaggagttcgcgcgggaggtgctcgccggcgtcaacccgatggtgatcacgcgcctcacggagttcccgcccaagagcacgctggaccccagcaagtacggcgaccacaccagcacgatcacggcggagcacatcgagaagaacctcgagggcctcacggtgcagcaggcgctggacggcaacaggctctacatcctggaccaccacgaccgcttcatgccgttcctcatcgacgtcaacaacctggagggcaacttcatctacgccaccaggacgctcttcttcctgcgcggcgacggcaggctcgcgcccctcgccatcgagctcagcgagccgtacatcgacggggacctcaccgtggccaagagcaaggtctacacgccggcgtccagcggcgtcgaggcctgggtgtggcagctcgccaaggcctatgtcgccgtcaacgactctggctggcaccaactcgtcagccactggctgaacacccacgcggtgatggagccgttcgtgatcgcgacgaaccggcagctgagcgtgacgcacccggtgcacaagctcctgagctcgcacttccgcgacaccatgaccatcaacgcgctggcgcggcagacgctcatcaacggcggcggcatcttcgagatgaccgtcttcccgggcaagtacgcgctgggcatgtcctccgtggtgtacaagagctggaacttcaccgagcagggcctccccgccgacctcgtcaagaggggcgtggcggtggcggacccgtccagcccgtacaaggtgcggctgctgatcgaggactacccgtacgcgagcgacgggctggccatctggcacgccatcgagcagtgggtgggcgagtacctggccatctactaccccgacgacggcgcgctgcggggcgacgaggagctgcaggcgtggtggaaggaggtgcgcgaggtcgggcacggcgaccacaaggacgcgccctggtggcccaagatgcaggccgtgtcggagctcgccagcgcctgcaccaccatcatctggatcgcgtcggcgctccacgccgccgtcaacttcggccagtacccgtacgcggggtacctcccgaacaggcccacggtgagccggcgccggatgccggagcccggcagcaaggagtacgaggagctggagcgcgacccggagcgcggcttcatccacaccatcacgagccagatccagaccatcatcggcatctcgctcatcgagatcctctccaagcactcctccgacgaggtgtacctcggccagcgcgacacccccgagtggacctccgacgcccgggcgctggcggcgttcaagaggttcagcgacgcgctggtcaagatcgagggcaaggtggtgggcgagaaccgcgacccgcagctgaggaacaggaacggccccgccgagttcccctacatgctgctctatcccaacacctctgaccacagtggcgccgccgcagggctcactgccaagggcatccccaacagcatctccatctgagcgactggtaccactaccaccccaggagtgctacgtacgagctggtacatgaataagctaatataagcaatcgtgtaaacgggaagagagcggccggcacgagacggaccatgtattttgcgtaaacgtgtgggctggtgaatcgaattactaccacgtaataagtgaagtgcttgttgcaatcattggcctgccagc

SEQ ID NO: 90304 - DNA, 3072 bp, Zea Mays
catacatacaccaaccgtgcgtgaaggaaggcctttgctcgccgccacatcacattggcaggcgaggcgagggagcgagcagcagggcaaggcatccacacccacacccaccggacactccctgagaagcgagaagcgagaagcgaagagcggccggccaccatgttctggcacggggtcgcggaccggctgacggggaagaacaaggaggcgtggaacgagggaaagatccgcggcacggtgaggctggtcaagaaggaggtgctggacgtcggcgacttcaacgcctcgctcctcgacggcgtacacaggatcctcggctgggacgacggcgtcgccttccagctcgtcagcgccaccgcggccgaccccagcaacgggagccgcggcaaggtcgggaaggcggcgcacctggaggaggcggtggtgtcgctcaagtcgacgacggacggggagaccgtgtaccgggtgagcttcgagtgggacgggtcgcagggcgtcccgggcgccgtcctggtcaggaacctgcagcacgccgagttcttcctcaagtcgctcaccctcgagggcgtccccggcaggggcaccgtcgtcttcgtcgccaactcgtggatctacccgcacaatctctactcccaggaacgcgtcttcttcgccaacgacacttatctgccaagcaaaatgcctgcggcattggtgccttaccggcaggacgagctcaagattctccgcggcgacgataatcctggaccatacaaggagcacgaccgcgtctaccgttacgactactacaacgacctcggtgagccagacaagggtgaagaccatgcccggcctgtcctcgggggcagccaagaacacccgtatccccgtcgctgcaggaccggccggcgtccaacagagacagaccccaactcggagagcaggctgtttctgctgaacctgaacatctacgtcccgcgcgacgagcggtttgggcatctcaagatgtcggacttcctcgggtactcactgaaggcgatcatcgaggctgtccttccgacgctggggacgttcgtcgacgatacgcccaaggagttcgattcgttcgaagacatccttgggctctacgagccgggtccagaggcgcccaacaacccactggtagcagaggtcaggaagagaatccccagcgagttcctcagaagcattctgcccaatggtagccatgaccaccccctgaagatgccccttccaaatatcatcagatcagatgtgttgaaaaaggctccagagtttaagtttggctggaggaccgacgaagagtttgcgagggagacgcttgcaggcgtgaacccagtgctcatcaaacgtctgacggagttcccagctaaaagtaccctggacccaagtcaatacggagaccatacgagcaagatcaccgaagctcacatccagcataacatggaaggcctgtcagtgcagaatgcactgaagaagaacaggctcttcatcctagaccaccatgaccatttcatgccgtacctcaacaagatcaacgagttggaggggaacttcatctacgccagcaggaccctactgttcctgaaggacgatggcacgctgaagcccctggccgtcgagctgagcctgccccaccctgatggccagcagcacggcgcggtcagcaaggtgtacaccccagctcactccggcgctgagggccacgtctggcaacttgccaaggcttatgcctgcgtgaacgactccgcctggcatcagctgatcagccactggctgaacacgcacgcggtgatcgagccgttcgtcatcgcaacgaaccggcagctgagcgtggtgcatccagtgcacaagctgctgagcccacactaccgtgacacgctgaacatcaacgccctggcacgccagacgctcatcaacgccgacggcatcttcgagcgcaccgtgttccctgcaaagtacgcgctggggatgtcctccgacgtgtacaagagctggaatttcaacgagcaggctctcccagcagacctcgtcaagagaggtgtggctgtgccggaccagtcgagcccctacggtgtccggttgctgatcaaggactacccttacgccgtggacgggctggtcatctggtgggcgatcgagcggtgggtcaaggagtacctggacgtctactaccccaacgacggcgagctccagcgcgacgtggagctgcaggcgtggtggaaggaggtgcgcgaggaggcgcacggcgacctcaaggaccgagactggtggcccaggatggacgccgtccagcggctggccagggcgtgcacgaccgtcatctgggtagcgtccgcgctgcacgcggccgtcaacttcgggcagtacccgtacgccgggtacctgccgaaccggccgaccgtgagccggcggccgatgccggagccgggcagcgacgactacaagaagctggaggcggggcagaaggaggcggacgcggtgttcatccgcaccatcaccagccagttccagaccatcctgggcatctcgctcatcgagatcctctccaagcactcctccgacgaggtgtacctcggccagcgcgacgagcctgagcgctggacgtcggacgccagggcgctggacgcgttcagaaggttcggaagccggctggtggagatcgagaagcggatcaggacgatgaacgacagcccgacgttgaagaaccggaaggggccggtggagatgccgtacatgctgctgtaccccaacacgtcggatgtcaccggcgagaagggcgaggggctcactgccatgggcattcccaacagcatctccatatgagcctcctcactgcctgagcggatggtttgtagatgttctgttacgctgtgtgtaatgtgtcgtttattcgttggttttgtcagtctcagggtagggaatggagatgttgattggatccatgatctgtagggttgagagaggagtcacgtctggagaatgttgtcaatgtgtgtttctttcttgttaagaataaaagttcgtcagctcatttatctctactacttattaaagaataaacaaaagaaa

SEQ ID NO: 90305 - DNA, 871 bp, Zea Mays
aaatcgctcggcgcctactactagcccgaaacctaggtggtgggaactcgggatacgaggtcctcttctccgccgcttgtcctcggcaagcacaaacgcggtaagccaccaaccgcctttcgatcgccgggctccatccctaagccatctcgccgcctcgtgagtcgtgagccgtgagccaaccgacctgccatcatcaattagtgacttcctgaacctgcttcgtgcgtcctaccactccaaagttccaacaatcaagagatttaaacaaagccttccataacttgttgccaataagtgcaggatttggaggccactgggctttggaaattcaaagtagactgcttggatcataacgagagagcacaaagggcctgggttttgtaaacagttggctttcactagagtcgatccattccatactgagcttttgcatatcatcaattcatcacacaatggatggtgtgcgatgcatggagtccccagctgctggtgatgccccgcatagttctttccgaacccttgggccaacactcctggtttcaatggggtatcttgacttcggaaaatggttggtggcagtggaagctgggtctcggtttggctatgatcttgtcctgctcgtgctgctttttaatctatcagctattctgtgtcagtacctctcgagctgtatcggcattgtcaccaaaaagaatcttgcggaggtaaaaatttactcagtcctctcttgccattgtaaactgtagaattttcaccagaactacggtgtggagatctcagttgataagaatggtgattcattaggatagggtgggcccaccataaatttctgtacccgtaatattggtgttaatttgttttgcgttta

SEQ ID NO: 90306 - DNA, 1071 bp, Zea Mays
atggatggtgtgcgatgcatggagtccccagctgctggtgatgccccgcatagttctttccgaacccttgggccaacactcctggtttcaatggggtatcttgacttcggaaaatggttggtggcagtggaagctgggtctcggtttggctatgatcttgtcctgctcgtgctgctttttaatctatcagctattctgtgtcagtacctctcgagctgtatcggcattgtcaccaaaaagaatcttgcggagatttgccaccaggagtatgatcagaaaatatgtgttgttcttggtcttcaagcaggactgtccttgctaacttctgaatttaccatgattgcaggcatcgtagttgggttcaaccttgtatttgaaagcaacaatcccatcacagtcgtatgttttacaagtgttgtagttaatctgctaccatatacactctcccttctggacaagaggaaggctggaatgtttaatgcctacgcatctggctttacactagtttgttttgtgcttggtttattagtgagccatcccaaaacccctgtcaataccaacgtaatgttccccaagttgagtggtgaaagtgcttactcactgatggtactacttggcacaaatataatagtacacaacttttatactcattcatcagttgttcaggttcagagaagatttcagggtcatacccttggtactctgtttcatgatcaccttttttctgtactatttgcattttctggtatctttcttgtgaattatattctgatgagttcagcagttgatgagtccaaaaacacaatggccattaacttccaagatgctagacagctaatgaatcaggttcatgtcattgttctcttcttatccgtcaagtcttttgtttaattggctatttgttctccgttcaccttcctattaatgtaaagagcagcattcgaattctcaaattataagacatgaccataggtttggtgttgtggcatgctactatacttgcatgtttggattttcaactttgtgaagttattgtattataagtacattacctattttttgggttgacca

SEQ ID NO: 90307 - DNA, 97 bp, Zea Mays
atgttctttctcctcactaagtatgcaccttttcctcttgttgcctgccgcagacccactagtagcacctgcagctgcctcctagctcttcggagcc

SEQ ID NO: 90308 - DNA, 186 bp, Zea Mays
atggcgtccaaattcaaccaggagtggcagatcatcactcttggagtccgaccgcttcggggtcatattcctctagatcgacctaccaagccttctcataacataaaggatgaggctgaaacttggtgcagggttggtgtcaagggccttattgccatctcgcgaggctatggtggtgatcattag

SEQ ID NO: 90309 - DNA, 3894 bp, Zea Mays
tccgccttcgcctcgcctcaccgcgccgctcccaaaattccccgccccacggcttccccccgcaaaacccaccccacgaaacccaaaaaatcccgcgcggacacccgaatccccccgccttcccgctcccctcgcgctgcgccgatccgttcccccatggatccgcagtcggacgcgggcgcggcggtggtgctgggcgccgacccggcggcgctgacggcgctgctggcggacctcacctccccggccaacgaggcgcggtcgcgggcagagcagcagttccacgccttccgcaggtcccatccggacgcgctcgcgctgagcctcgcgcacctgctgctctccccggcgcacccctccgcgcccatcgccgccgtgctgctgcgtcgcctcatcgcgccgtcatcccagtccttcgtctaccctgcgctgtcgcccgccacgcagtcctcgctccgcgcgctgctgctctcggccgcttccgcgcctgcgctccccaggtctgtctctaggaagctctctgacgccgtcgccgagctcgcgtccttcctcctgcccgccaacgcgtggcccgacctactcagtttcctgtacaagtccatagattccacgtcctccccgccgggattgcaggagtcggcgctcaacatcctggcccggctggcctcccacctcgcggccagcttccccaacctccacgggctcctccacgccgctctctcccacccttcttccgccgatgtgcgcgtcgcggggctcaatgcggccatcagcctcatccagtcccttccttctgccgcggcccgcgaccaatttcaggacctcctcccggccatgatgcgcgctctcgccgagtcactcaactgcgggaacgagggctcagcccaggaggctctggagatgatgatcgagctcgctggcgcagagccgcggttcctgcgccgccagctgcctgacgtggtcgcgtccatgctgcagattgccgaggccccaggactagaggatggcacccgccaccttgccgttgagtttgtcgtcacccttgccgaggcacgggagcgtgcacccggaatgatgcggaagctgcctcggtacgttggtcggctatttgcggtgctcatgagtatgctgctcgatgtccaggatgaaccggcatggcatgccgcagtgtcagaggaggaagacgccggagagacgggaagctatgtttttgcacaggagtgtctggaccggctgtcaattgctgttggtggtaatacgattctgtccgtggcagctgagttgctcccatcgtttttctcctctgaagattggaagagacgccacgcggcactagtgaccatagctcagattgcagagggctctgctaagatgatgattaagaatctggagcaggttgttgggatggtgctgaattctttccaggaccctcacccacgggtgaggtgggcagcaattaatgcaatagggcagctttcaacggacctggggccagagttgcaaaatcagttgcaccatgttgtgctaccttcattagcttcagcaatggatgatgtccagaacccacgtgtacaggcacatgctgcatcagctattctgaacttcagtgaaaactgcagacctgatattttgacaccatacttggatgtaatagttgggaaacttctattgttactccagactgggaaccaaatggtgcaagaagctgctttaactgctttagcatcagcagcagattcttctcaggaacacttccaaaaatattatgatgcagtaatgccatacctcaaggctattctcatgaatgcaactgataaatccaacagaatgttgcgtgccaaatccatggaatgcatcagtttagttggtatggcagttgggaaacaaaagtttaaggatgatgctaagcaggtgatggaggtccttatgacactgcaaggatctcagatggaggctgatgaccctataacaagctacatgctgcaagcatgggcaagactgtgtaaatgccttggtcaggatttcttaccatacatgagtgttgttatgccccctctgctccagtctgctcagctcaaaccagatgtgagtgtcacttctgctggaccagaagatgaaaatggtgaatctgatgacgagggtgtcgagactattacactaggtgataagaggatcggcatccgaactagtctactagaggagaaagctacagcatgtaacatgctgtgttgctacgctgatgagctcaaggaaggatttttcccatggattgatcaggtcacgactacgcttgtacctctcattaagttctattttcatgaggaagttaggaaggcagctatttcagcaatgcctgagcttctacgttcagcaaaattggctatagaaaagggccaagctcaaggtcgtgataaatcctatcttaagcaactgtctgattacatagttccagcccttgttgaggccatgcataaagaacctgagccacaaatttgtgcaagcatactggaatcattgaatgaatctatacagctatcaggaacacttcttgatcaaaatcaagtaagatctgcagtggaaggtgtcaaagaagttatagttgcaagcactaacaggaggatagaacgaacagaaagggcaagggctgaggactttgattctgaagaagaggagctactcagagaagaaaacgaacaggaagatgaaatctttgaccaaattggtgattgtctaggcactctcgttaaaaccttcaagacttcttttattccgttcttcgatgaactctccatgtatttgacacctatgttgggtaagaataaatcaccagaagaaagaaggattgccatatgcatttttgatgatgttgctgagcattgccgtgaagcagcagttaggtattatgatacataccttccttctctattagaagcctgcatgagtgaaaatccagatgtcaggcaggctgcagtgtatggaattggcatttgtgccgaatgtggtggttctgcatttaggcctcacactggggaggccctatccagattatacaatgtaatcaaacatcctaatgccctggatttggataatgcaatggcctatgacaatgctgtttctgctcttggaaaaatatgccgatttcatcgtgatatcattgatgtatctcaggtaattcctgcctggttaagttgccttccgataaaaaatgatttaattgaggccaagcttgtccatgaacagctgtgtgtgatgcttgagcagtctgagagggagcttttgggtcataataatcagtatcttccaaagattgtgtctgtttttgcagagatattatgtgcgggcaaagatctagcaacagaacagactgccagcaggatggttaatctactaaggcaacttcaggcaacattgcctccttcagtattagcctcgacatggtcttctctacaaccacagcaacagctcgctctacagtccgtgttgtcgtcatagctaacctaaaatagcctcaactgtgtaaagcatatgagtcttcacagcttgacctttcgtgttctatttatgcgcttttgagccagagccagggttcctggggtttgctttcgcgttcatgtgcccttaggttttgtacaaggggcactgcttgcatccggtgtgtaatatcggctgcagttgcagaactgcacggatgtgtacgagactgggctctctccacatcgtcgattaagttgtaaagcagtatatcttgctcgcttagtaattttagttgggttgaaagaattgtaaattaaaacaattttggtagttgattttaatgtcgtatttcttataccatcagcatgggaaattttgtgttcaaaaaaagaagagaaaaagcagcttggttatcttgtg

SEQ ID NO: 90310 - DNA, 1350 bp, Zea Mays
ggccaccgccgaccgcggcagcgtcgtggctggcttggcaggcagctccaggctccagcgaagccgatggcaaaaaaggcgggactcgcgcaagcaagcgtggacgcgtacgttgagcagagctcgcggcgcaaggaacacgaggccgcgctaaaaactgctcctactccgggttgtagcgtgcttcacgcacgcacgttgctggataggtttgccgcgcgcgcttgcttgccccgtggtccacgcggccggcggcacccgcgcctcgcccgacgctctatttaaaagccacgcctcggcccccttctccctccgatctctctctctctcgttctgctcacatcgacgcggttcggttccagtttcactcccactgccgtctcggcaacctcccctgttccacgcttcgtcctcgcctgccaggctgccatggccgcgacgtcccccttcgactgcgtcctcctaggtgagcgtcgaccgccgccagctcgcatgcagtttagttgccgctgtcgatggttttacaatatgtaactcgctgccgtggcccgcgcgccggcgcagacctcgacgacaccctgtacccgggcgacaccggcatcggcgcggccctgaggcgcaacatcgacgagttcctccaggccaagctcggcgtgtcggccgacgaggccgccgccacgcgcgccgagctcttccgcgcgcacggcagctccctcgccgggctcatcgtacgtgacgacgtttccgacaaatactaactaataagcttctccgaccgtgtgtgttccggattctgacgactgggtacaacgaacgacgtgccgtgttcttgttttcgattcccgcaggcgctcggctacgacgtgcacccggacgagtaccacaggtcagcacgcaaaaaaaaaaaaaaaactgcggcggagtcaagtgcagtgcatttcgtcggaaactgtcgggggtttgttaatccgcttctcttgcacttccacctgcagctacgtgcacggcaggctaccgtacgacaggatcgcgcgcgacccgcagctggcgcggctgctgcagagcatcccgcagcgcaaagtgctgttcaccaactcggaccgcgcgcacatggagcgggcgctggagcggctgggcgtggacgaggccgccttcgacgccgtcgtgtgcttcgagaccatgaacccgcacctgttcggcgacgacggtggcgaccggcgcccggccgtggtgctcaaaccggcggtggacgcaatcgtcgccgggctgcgcgccgctggctccaacccacgccggacggtacgtgatagctggcccggccagtcactgctcgctcacttcttcttatta

SEQ ID NO: 90311 - DNA, 1675 bp, Zea Mays
ggccaccgccgaccgcggcagcgtcgtggctggcttggcaggcagctccaggctccagcgaagccgatggcaaaaaaggcgggactcgcgcaagcaagcgtggacgcgtacgttgagcagagctcgcggcgcaaggaacacgaggccgcgctaaaaactgctcctactccgggttgtagcgtgcttcacgcacgcacgttgctggataggtttgccgcgcgcgcttgcttgccccgtggtccacgcggccggcggcacccgcgcctcgcccgacgctctatttaaaagccacgcctcggcccccttctccctccgatctctctctctctcgttctgctcacatcgacgcggttcggttccagtttcactcccactgccgtctcggcaacctcccctgttccacgcttcgtcctcgcctgccaggctgccatggccgcgacgtcccccttcgactgcgtcctcctagacctcgacgacaccctgtacccgggcgacaccggcatcggcgcggccctgaggcgcaacatcgacgagttcctccaggccaagctcggcgtgtcggccgacgaggccgccgccacgcgcgccgagctcttccgcgcgcacggcagctccctcgccgggctcatcgcgctcggctacgacgtgcacccggacgagtaccacaggtcagcacgcaaaaaaaaaaaaaaaactgcggcggagtcaagtgcagtgcatttcgtcggaaactgtcgggggtttgttaatccgcttctcttgcacttccacctgcagctacgtgcacggcaggctaccgtacgacaggatcgcgcgcgacccgcagctggcgcggctgctgcagagcatcccgcagcgcaaagtgctgttcaccaactcggaccgcgcgcacatggagcgggcgctggagcggctgggcgtggacgaggccgccttcgacgccgtcgtgtgcttcgagaccatgaacccgcacctgttcggcgacgacggtggcgaccggcgcccggccgtggtgctcaaaccggcggtggacgcaatcgtcgccgggctgcgcgccgctggctccaacccacgccggacgctgttcctggacgacagcgagaggaacatcgccgcggggaaagcgctcggcctccgcaccgccctggttggcaagagggcgaggagcaaggaagcggactacgcggtggagagcatcggcgcgctccggcgggccatcccggagatctggggcgaggccgctgaacgctcctccgacaagctgccggtgccggccgtgagcgtggtgaggtcgacgacgtccgacctggactccatcatcatccagcccacgtccatccacgcctaatatataacctcatcgtccctagctccccacccccaatcagaatcagcgggtgcgtgcgtgcgtgtgtgaatatctctctctctctctctctctctctctctctctctctgcctgcctgcctcacaggctgaaaggcgtgtacatttctgatcagcaccaccggtcgcccgtcggtgcgcgcgtgcatgtaaagcaggcaccaccagctgcagcccaagtgcgtgcatgagcatgacgagtcatgcaatgtgttgtacgtattttacatgatgataagaataacaaaccgtgtttagctgcagagacccgagcagcggttttaaccaa

SEQ ID NO: 90312 - DNA, 1566 bp, Zea Mays
ggccaccgccgaccgcggcagcgtcgtggctggcttggcaggcagctccaggctccagcgaagccgatggcaaaaaaggcgggactcgcgcaagcaagcgtggacgcgtacgttgagcagagctcgcggcgcaaggaacacgaggccgcgctaaaaactgctcctactccgggttgtagcgtgcttcacgcacgcacgttgctggataggtttgccgcgcgcgcttgcttgccccgtggtccacgcggccggcggcacccgcgcctcgcccgacgctctatttaaaagccacgcctcggcccccttctccctccgatctctctctctctcgttctgctcacatcgacgcggttcggttccagtttcactcccactgccgtctcggcaacctcccctgttccacgcttcgtcctcgcctgccaggctgccatggccgcgacgtcccccttcgactgcgtcctcctagacctcgacgacaccctgtacccgggcgacaccggcatcggcgcggccctgaggcgcaacatcgacgagttcctccaggccaagctcggcgtgtcggccgacgaggccgccgccacgcgcgccgagctcttccgcgcgcacggcagctccctcgccgggctcatcgcgctcggctacgacgtgcacccggacgagtaccacagctacgtgcacggcaggctaccgtacgacaggatcgcgcgcgacccgcagctggcgcggctgctgcagagcatcccgcagcgcaaagtgctgttcaccaactcggaccgcgcgcacatggagcgggcgctggagcggctgggcgtggacgaggccgccttcgacgccgtcgtgtgcttcgagaccatgaacccgcacctgttcggcgacgacggtggcgaccggcgcccggccgtggtgctcaaaccggcggtggacgcaatcgtcgccgggctgcgcgccgctggctccaacccacgccggacgctgttcctggacgacagcgagaggaacatcgccgcggggaaagcgctcggcctccgcaccgccctggttggcaagagggcgaggagcaaggaagcggactacgcggtggagagcatcggcgcgctccggcgggccatcccggagatctggggcgaggccgctgaacgctcctccgacaagctgccggtgccggccgtgagcgtggtgaggtcgacgacgtccgacctggactccatcatcatccagcccacgtccatccacgcctaatatataacctcatcgtccctagctccccacccccaatcagaatcagcgggtgcgtgcgtgcgtgtgtgaatatctctctctctctctctctctctctctctctctctctgcctgcctgcctcacaggctgaaaggcgtgtacatttctgatcagcaccaccggtcgcccgtcggtgcgcgcgtgcatgtaaagcaggcaccaccagctgcagcccaagtgcgtgcatgagcatgacgagtcatgcaatgtgttgtacgtattttacatgatgataagaataacaaaccgtgtttagctgcagagacccgagcagcggttttaaccaa

SEQ ID NO: 90313 - DNA, 1686 bp, Zea Mays
ggccaccgccgaccgcggcagcgtcgtggctggcttggcaggcagctccaggctccagcgaagccgatggcaaaaaaggcgggactcgcgcaagcaagcgtggacgcgtacgttgagcagagctcgcggcgcaaggaacacgaggccgcgctaaaaactgctcctactccgggttgtagcgtgcttcacgcacgcacgttgctggataggtttgccgcgcgcgcttgcttgccccgtggtccacgcggccggcggcacccgcgcctcgcccgacgctctatttaaaagccacgcctcggcccccttctccctccgatctctctctctctcgttctgctcacatcgacgcggttcggttccagtttcactcccactgccgtctcggcaacctcccctgttccacgcttcgtcctcgcctgccaggctgccatggccgcgacgtcccccttcgactgcgtcctcctagacctcgacgacaccctgtacccgggcgacaccggcatcggcgcggccctgaggcgcaacatcgacgagttcctccaggccaagctcggcgtgtcggccgacgaggccgccgccacgcgcgccgagctcttccgcgcgcacggcagctccctcgccgggctcatcgtacgtgacgacgtttccgacaaatactaactaataagcttctccgaccgtgtgtgttccggattctgacgactgggtacaacgaacgacgtgccgtgttcttgttttcgattcccgcaggcgctcggctacgacgtgcacccggacgagtaccacagctacgtgcacggcaggctaccgtacgacaggatcgcgcgcgacccgcagctggcgcggctgctgcagagcatcccgcagcgcaaagtgctgttcaccaactcggaccgcgcgcacatggagcgggcgctggagcggctgggcgtggacgaggccgccttcgacgccgtcgtgtgcttcgagaccatgaacccgcacctgttcggcgacgacggtggcgaccggcgcccggccgtggtgctcaaaccggcggtggacgcaatcgtcgccgggctgcgcgccgctggctccaacccacgccggacgctgttcctggacgacagcgagaggaacatcgccgcggggaaagcgctcggcctccgcaccgccctggttggcaagagggcgaggagcaaggaagcggactacgcggtggagagcatcggcgcgctccggcgggccatcccggagatctggggcgaggccgctgaacgctcctccgacaagctgccggtgccggccgtgagcgtggtgaggtcgacgacgtccgacctggactccatcatcatccagcccacgtccatccacgcctaatatataacctcatcgtccctagctccccacccccaatcagaatcagcgggtgcgtgcgtgcgtgtgtgaatatctctctctctctctctctctctctctctctctctctgcctgcctgcctcacaggctgaaaggcgtgtacatttctgatcagcaccaccggtcgcccgtcggtgcgcgcgtgcatgtaaagcaggcaccaccagctgcagcccaagtgcgtgcatgagcatgacgagtcatgcaatgtgttgtacgtattttacatgatgataagaataacaaaccgtgtttagctgcagagacccgagcagcggttttaaccaa

SEQ ID NO: 90314 - DNA, 1601 bp, Zea Mays
ggccaccgccgaccgcggcagcgtcgtggctggcttggcaggcagctccaggctccagcgaagccgatggcaaaaaaggcgggactcgcgcaagcaagcgtggacgcgtacgttgagcagagctcgcggcgcaaggaacacgaggccgcgctaaaaactgctcctactccgggttgtagcgtgcttcacgcacgcacgttgctggataggtttgccgcgcgcgcttgcttgccccgtggtccacgcggccggcggcacccgcgcctcgcccgacgctctatttaaaagccacgcctcggcccccttctccctccgatctctctctctctcgttctgctcacatcgacgcggttcggttccagtttcactcccactgccgtctcggcaacctcccctgttccacgcttcgtcctcgcctgccaggctgccatggccgcgacgtcccccttcgactgcgtcctcctagacctcgacgacaccctgtacccgggcgacaccggcatcggcgcggccctgaggcgcaacatcgacgagttcctccaggccaagctcggcgtgtcggccgacgaggccgccgccacgcgcgccgagctcttccgcgcgcacggcagctccctcgccgggctcatcgcgctcggctacgacgtgcacccggacgagtaccacagctacgtgcacggcaggctaccgtacgacaggatcgcgcgcgacccgcagctggcgcggctgctgcagagcatcccgcagcgcaaagtggtgcgtatattcagaacagaacagatggaagcgagctgttcaccaactcggaccgcgcgcacatggagcgggcgctggagcggctgggcgtggacgaggccgccttcgacgccgtcgtgtgcttcgagaccatgaacccgcacctgttcggcgacgacggtggcgaccggcgcccggccgtggtgctcaaaccggcggtggacgcaatcgtcgccgggctgcgcgccgctggctccaacccacgccggacgctgttcctggacgacagcgagaggaacatcgccgcggggaaagcgctcggcctccgcaccgccctggttggcaagagggcgaggagcaaggaagcggactacgcggtggagagcatcggcgcgctccggcgggccatcccggagatctggggcgaggccgctgaacgctcctccgacaagctgccggtgccggccgtgagcgtggtgaggtcgacgacgtccgacctggactccatcatcatccagcccacgtccatccacgcctaatatataacctcatcgtccctagctccccacccccaatcagaatcagcgggtgcgtgcgtgcgtgtgtgaatatctctctctctctctctctctctctctctctctctctgcctgcctgcctcacaggctgaaaggcgtgtacatttctgatcagcaccaccggtcgcccgtcggtgcgcgcgtgcatgtaaagcaggcaccaccagctgcagcccaagtgcgtgcatgagcatgacgagtcatgcaatgtgttgtacgtattttacatgatgataagaataacaaaccgtgtttagctgcagagacccgagcagcggttttaaccaa

SEQ ID NO: 90315 - DNA, 1183 bp, Zea Mays
cctccgatctctctctctctcgttctgctcacatcgacgcggttcggttccagtttcactcccactgccgtctcggcaacctcccctgttccacgcttcgtcctcgcctgccaggctgccatggccgcgacgtcccccttcgactgcgtcctcctagacctcgacgacaccctgtacccgggcgacaccggcatcggcgcggccctgaggcgcaacatcgacgagttcctccaggccaagctcggcgtgtcggccgacgaggccgccgccacgcgcgccgagctcttccgcgcgcacggcagctccctcgccgggctcatcgcgctcggctacgacgtgcacccggacgagtaccacagctacgtgcacggcaggctaccgtacgacaggatcgcgcgcgacccgcagctggcgcggctgctgcagagcatcccgcagcgcaaagtgctgttcaccaactcggaccgcgcgcacatggagcgggcgctggagcggctgggcgtggacgaggccgccttcgacgccgtcgtgtgcttcgagaccatgaacccgcacctgttcggcgacgacggtggcgaccggcgcccggccgtggtgctcaaaccggcggtggacgcaatcgtcgccgggctgcgcgccgctggctccaacccacgccggacggagggcgaggagcaaggaagcggactacgcggtggagagcatcggcgcgctccggcgggccatcccggagatctggggcgaggccgctgaacgctcctccgacaagctgccggtgccggccgtgagcgtggtgaggtcgacgacgtccgacctggactccatcatcatccagcccacgtccatccacgcctaatatataacctcatcgtccctagctccccacccccaatcagaatcagcgggtgcgtgcgtgcgtgtgtgaatatctctctctctctctctctctctctctctctctctctgcctgcctgcctcacaggctgaaaggcgtgtacatttctgatcagcaccaccggtcgcccgtcggtgcgcgcgtgcatgtaaagcaggcaccaccagctgcagcccaagtgcgtgcatgagcatgacgagtcatgcaatgtgttgtacgtattttacatgatgataagaataacaaaccgtgtttagctgcagagacccgagcagcggttttaaccaa

SEQ ID NO: 90316 - DNA, 1490 bp, Zea Mays
cctccgatctctctctctctcgttctgctcacatcgacgcggttcggttccagtttcactcccactgccgtctcggcaacctcccctgttccacgcttcgtcctcgcctgccaggctgccatggccgcgacgtcccccttcgactgcgtcctcctagacctcgacgacaccctgtacccgggcgacaccggcatcggcgcggccctgaggcgcaacatcgacgagttcctccaggccaagctcggcgtgtcggccgacgaggccgccgccacgcgcgccgagctcttccgcgcgcacggcagctccctcgccgggctcatcgtacgtgacgacgtttccgacaaatactaactaataagcttctccgaccgtgtgtgttccggattctgacgactgggtacaacgaacgacgtgccgtgttcttgttttcgattcccgcaggcgctcggctacgacgtgcacccggacgagtaccacagctacgtgcacggcaggctaccgtacgacaggatcgcgcgcgacccgcagctggcgcggctgctgcagagcatcccgcagcgcaaagtggtgcgtatattcagaacagaacagatggaagcgaggcacttcacttcacttgggacacgaccctaccagcagctacagctagctaaccatgtgaaattgtgatgcccgcgcagctgttcaccaactcggaccgcgcgcacatggagcgggcgctggagcggctgggcgtggacgaggccgccttcgacgccgtcgtgtgcttcgagaccatgaacccgcacctgttcggcgacgacggtggcgaccggcgcccggccgtggtgctcaaaccggcggtggacgcaatcgtcgccgggctgcgcgccgctggctccaacccacgccggacgctgttcctggacgacagcgagaggaacatcgccgcggggaaagcgctcggcctccgcaccgccctggttggcaagagggcgaggagcaaggaagcggactacgcggtggagagcatcggcgcgctccggcgggccatcccggagatctggggcgaggccgctgaacgctcctccgacaagctgccggtgccggccgtgagcgtggtgaggtcgacgacgtccgacctggactccatcatcatccagcccacgtccatccacgcctaatatataacctcatcgtccctagctccccacccccaatcagaatcagcgggtgcgtgcgtgcgtgtgtgaatatctctctctctctctctctctctctctctctctctctgcctgcctgcctcacaggctgaaaggcgtgtacatttctgatcagcaccaccggtcgcccgtcggtgcgcgcgtgcatgtaaagcaggcaccaccagctgcagcccaagtgcgtgcatgagcatgacgagtcatgcaatgtgttgtacgtattttacatgatgataagaataacaaaccgtgtttagctgcagagacccgagcagcggttttaaccaa

SEQ ID NO: 90317 - DNA, 972 bp, Zea Mays
cgcgcttatagtggccgtccatcatcattaatcatcaatatagatgattggcgctctactgactgtgcctagcgtgcgtggcaattggacccaattttttctcccgaaatggacggcccaatccacgtgctcctgtcgctcggccacaaatatcgtccggggggagctagctggcgcgtacgtttccatatgcactgtacccgtggcataccaaaccataccataccagtggtgcgtcgtgcgtggttgcggccgtcacgtcagcacgcacgttgcatgtctgcccttgggggcgaccacgcacgtcgatgtaacgaccgatacagcagtactcgtcgaccatcatacatacatacacacagttattaactaacaaccatcatacagctagcagtgcatgcgttgatccattcgtcaatctctctgctgtttcccgcacaccaggttggcaagagggcgaggagcaaggaagcggactacgcggtggagagcatcggcgcgctccggcgggccatcccggagatctggggcgaggccgctgaacgctcctccgacaagctgccggtgccggccgtgagcgtggtgaggtcgacgacgtccgacctggactccatcatcatccagcccacgtccatccacgcctaatatataacctcatcgtccctagctccccacccccaatcagaatcagcgggtgcgtgcgtgcgtgtgtgaatatctctctctctctctctctctctctctctctctctctgcctgcctgcctcacaggctgaaaggcgtgtacatttctgatcagcaccaccggtcgcccgtcggtgcgcgcgtgcatgtaaagcaggcaccaccagctgcagcccaagtgcgtgcatgagcatgacgagtcatgcaatgtgttgtacgtattttacatgatgataagaataacaaaccgtgtttagctgcagagacccgagcagcggttttaaccaa

SEQ ID NO: 90318 - DNA, 857 bp, Zea Mays
aatttgccaggaaatcaaagcaaacactggccataaccgcagcatcgtcagccgccggacgggagcagcttaggaagaggaggccgacgccgtactgctagcacaagccaagaaatgggcgcgctctgcctgctctacccatccacgccgccgcgctgcccatgcggcgcccgcgcggacgcgaccgcggccttcgcgccttcccctttcctctcatcatgtgctgccaccggtgcacaaacaaggctgcagctctgcggcaggagccagaggcgcggcggcgtggcgcgggtaggtggcggcggcggtgggggcaagggggagagtggcaagaacggcgcggcggcgttctttgatgaggacggggtggtggacgacatggacgggtacctcaactacctgtccctcgagtacgactctgtctgggacaccaagcctgcctggtgtcagccttggacaatattgcttacgggaactggtgccgttgcctgtagttgggtgcttatccaatctgttgtaattactgctggggtttcttttgtaatatccgcatggtggtacatatttctctactcgtaccctaaggcatacaccgagatgatagcagagagaagaagaaatgtagccagtggagctgaagatacctacgggatggagaaaatccagtgaggatctacggcggcgctgcttgtagagtgcataactctcttgtgttgtgtctagcatttccttgctgagggtgatatttagaaatgaccgcacgctgtggcacgtactagcacgatttgtctgtaaatgtattcgccagaaattgcaacaataccatggaatcatgtcatgtgcttgctttgttcata

SEQ ID NO: 90319 - DNA, 342 bp, Zea Mays
atgaaggtaccaaatcatgatgagctagcaggaattgacaatgcaaaacagagtctgtgtatgatcaaatctttgttgactgagaagcaaaacgaagaagagattgaacagagaagagaactgaaggatgccattgaaattaagctaagagaggaagctatgataagtagggttctaaaggagaagcttgtgtccaaggaactaggcattgaacaattgcagtcagatctagcagcttcagtcaggtttcaagtggtactgcaaaatgagatccagagatttcaaaatgaactacgttgcctcacaaaagtacaagcacttggaagttcaggtgagaggtga

SEQ ID NO: 90320 - DNA, 235 bp, Zea Mays
ttatattaataaaagaaatagtctgattacacgccaaatccattccctgggctactattttgtcacacattcccgccctatgatttgttggcgcaacatgctccacttgtataattgtattgtttctttgtgctcgttattttagtcctccagacctgaaagctgtcttagacaccaccaagcactgaaacactgaaggcacttgtgtcccaaccattacagccctccaaaacac

SEQ ID NO: 90321 - DNA, 826 bp, Zea Mays
ccacaaccctcgcgcaatcaagcgacgagacgaccgaccccaagccaaaggaccaaagcaaggctaggcaagcagcgtcactgaagcggaaaacgcgtcgccttcaccagtctccactccagagaggagagctttgattgctggtggtctggtcggcggcggcggcggcaatggagcccctggaggtggccataacgatcatattcgacgcgctgctgctggtgttcatggtgaagctcttcttcgccatgttccagatgaagctcgtcgtcatcctcttctacctcgtcatcctcctcttcgccatggccttctccggccgggcgcccagcagcttctagctcgacgatcgtagcagcagaggtggcaaaaattgaagctttcttctccctccccctctttcgtttcttctcccccctcttggagggtggatcggtggagtcttgcagcgctacgtacgttctgtgaaaaaagacaatcatctcggtttttggtggatggctagctaatttatttctctctaggaaaaaaaagaataagaagaaccgcgcatgatccgaggcgcaaattgcgtaagcgtgaagagagagaaattagtcagtctagagcttcgatctcccgcgtctcatgcttctattttccatgtatgtaattcgtgctgtacctcctgcctttttgttacgggtttcgtggatcgcagagcagtggtgcatatgaaaagagatggacacggttttcttccttggaaaaacttgttcatgggttcttttttggggtaagctgtaaaatagtgtttctcttggtttttttaatagaaggggctcca

SEQ ID NO: 90322 - DNA, 1465 bp, Zea Mays
ctcccctcgccctctctcccccaccctcactcagactcagcccaccgatcccgtccagctttaccgattcctactctcttgttttctgttttcttggttcgtcccatagagaggagagctttgattgctggtggtctggtcggcggcggcggcggcaatggagcccctggaggtggccataacgatcatattcgacgcgctgctgctggtgttcatggtgaagctcttcttcgccatgttccagatgaagctcgtcgtcatcctcttctacctcgtcatcctcctcttcgccatggccttctccggccgggcgcccagcagcttctagctcgacgatcgtagcagcagaggaaaaaaaagaataagaagaaccgcgcatgatccgaggcgcaaattgcgtaagcgtgaagagagagaaattagtcagtctagagcttcgatctcccgcgtctcatgcttctattttccataaggggctccaacttctcctagaatctcgccacgtggcctccatgataagagagaaggtcccagaagtgccgaaatggtggacttttctcggctgcactgcacgcctcagtgtatcatcaattgactcttttctcgtccgcgtagtagtattttgaggctgccttttccattgcgttgtgctttgtatattcgcggtacattctaggtcgtgatgatgcgaacgatgatgcaaaattggcgccacacacctacagagagaagagtaacgggttccattcgtaaactggagtgacaccattatcggcaacggcgtcaaatggcggcgccgtggaagttgaggaagagcgcgagcagcgacgcgttgaagacggcgttgaacacccagccggccatcccctcgcagccgccagcggcgaagtggagccacagcatcaccacggaggccgcgaagctgaagaggaactgcgcgatctgcagctccgtgacggcgcgcttccaccgcccgggccagcgcaggccgacgctgcaggagaggtagtaggagtacatcacgacgtgcacgccggcgttggtgacgagcgcgacgggcatcagcgactgccgggtggcgagccagaggtagcacatggccacgacgagcgcgtggtggtacacgtggagcagcgtgagcgggcggcgggcgagcaggatgagcagcgtgtcgccgagctcgtacaccttggagaggtagaacacgtgcgcccagaagaagacgggccccgacgcctccgtggcgccccgcggcgggaagcagaaggcccacgcccaccgcggcgccggcgccgtcgcggccgtcgacagcgcgcacccgccggccatggcggcggagagcgccagcaggaccgcgttgtgggcggcggagagcgcgcggagcgccggcggaggcagcgccgggaggcggggcaggacgaggcggcggaggacgagcaccgcggcgaggtagccgcagatgacg

SEQ ID NO: 90323 - DNA, 1345 bp, Zea Mays
ctcccctcgccctctctcccccaccctcactcagactcagcccaccgatcccgtccagctttaccgattcctactctcttgttttctgttttcttggttcgtcccatagagaggagagctttgattgctggtggtctggtcggcggcggcggcggcaatggagcccctggaggtggccataacgatcatattcgacgcgctgctgctggtgttcatggtgaagctcttcttcgccatgttccagatgaagctcgtcgtcatcctcttctacctcgtcatcctcctcttcgccatggccttctccggccgggcgcccagcagcttctagctcgacgatcgtagcagcagagaaggggctccaacttctcctagaatctcgccacgtggcctccatgataagagagaaggtcccagaagtgccgaaatggtggacttttctcggctgcactgcacgcctcagtgtatcatcaattgactcttttctcgtccgcgtagtagtattttgaggctgccttttccattgcgttgtgctttgtatattcgcggtacattctaggtcgtgatgatgcgaacgatgatgcaaaattggcgccacacacctacagagagaagagtaacgggttccattcgtaaactggagtgacaccattatcggcaacggcgtcaaatggcggcgccgtggaagttgaggaagagcgcgagcagcgacgcgttgaagacggcgttgaacacccagccggccatcccctcgcagccgccagcggcgaagtggagccacagcatcaccacggaggccgcgaagctgaagaggaactgcgcgatctgcagctccgtgacggcgcgcttccaccgcccgggccagcgcaggccgacgctgcaggagaggtagtaggagtacatcacgacgtgcacgccggcgttggtgacgagcgcgacgggcatcagcgactgccgggtggcgagccagaggtagcacatggccacgacgagcgcgtggtggtacacgtggagcagcgtgagcgggcggcgggcgagcaggatgagcagcgtgtcgccgagctcgtacaccttggagaggtagaacacgtgcgcccagaagaagacgggccccgacgcctccgtggcgccccgcggcgggaagcagaaggcccacgcccaccgcggcgccggcgccgtcgcggccgtcgacagcgcgcacccgccggccatggcggcggagagcgccagcaggaccgcgttgtgggcggcggagagcgcgcggagcgccggcggaggcagcgccgggaggcggggcaggacgaggcggcggaggacgagcaccgcggcgaggtagccgcagatgacg

SEQ ID NO: 90324 - DNA, 742 bp, Zea Mays
gtttatgtggaccattttcaggcagatatcacttgactgtatgttcctggagtcccagtctatcatcgattatagcatgctcttggggatccattttagagctccccatcacctgaagacatcctcatcacatcagagcagtcttgaaagatgcggaattccagatagtgatctgttgcagtatgaggaaaaaagttcctggaagggatttttgcttgttgctcatgagccaggcgctacagttggtggttcccacataagaggaagtatggttagagcatcggaagctggttatgaagaagttgatcttgttttgccaggcaccggacggttccgtgtgcagttaggggtgaatatgccagctcgagctcggaaagtgcacgaggacacgaacacagaacttgaaaacccagataccattgaggagtacgatgttgttctttaccttggtatcatagacatattacaggaatacaatatgtcaaaaagggtcgagcacgcagtcaaatctctcaagtttgatcccctttcaatatcagctgttgatcctgatttgtattcgaaacgatttgtaaaattcctggagagtgttttccctgaacaggactgagtaggcacaataaagtacatatatagtagtgccgctggcctcatttttcccccttgtataaaatgttaacatgttctcagttattcagcacggcttctgtgcacctccaagtgttattatgttattttacta

SEQ ID NO: 90325 - DNA, 1711 bp, Zea Mays
gggtcgacaacaatttgccgggcacacccaagacccgcggaagccacgacgacaagcctccatcgcctcttgttgtttgcgggccccatacgtcagagaccacaagcccgaggcttaactctccctgccgctaatccctcgcgccgccggagggaagcaagagatagatctgtccgcggccatggcggcggcggcggcggcggcggagcaaggcgtggacgccgcgaggaaagaggaggaggaggagcaggtagtgaatccgtgggaggtgtcggcggggaagggcggcatcgactacgacaagctcgtggaccagttcggctgccagcgcatcgacgacgcgctcgtggaccgcatcgcacgcctcaccgcccgaccaccgcactgcttcctccgccgaggcctcttcttcgcccaccgtgatttgaacgagatactggatttgtatgagaacgggcagaagttctacctctacacggggagggggccctcgtcggaggccctgcacctcggccacctcatccccttcatgttcacaaaatacttgcaggaggcttttaaggtgcccctagttatacaactgactgacgatgagaagtacttgtggaaaaacttgactattcaggaaagtaaaaggcttgcccgtgaaaatgctaaagatattatagcatgtggttttgacattgaaagaacattcattttctctgatttttcttttgttggaggtgctttttatgaaaacatgatgcaagttgccagatgtgtaactatgaataaggctattggaatatttgggttcaatcttgaggatcacataggaaaggttagctttcctccagtgcaggcagtcccatcattcccttcttcatttccccatctcttcgctggcaaggaccaactgcggtgtcttatcccatgtgcaatagatcaggatccatattttaggatgactcgtgatgttgctcctagaattggttatcagaaaccatcactgattgaatctagattttttcctgctcttcagggggagaacacaaaaatgtcagctagtgacgcaaattcggcgatatacgtgacagatagtgctaaagaaataaagacaaaggtgaataaatatgccttctcaggtggccaggactcaatagagctccatagaaaacttggcgctaaccttgatgtggatgtcccaatcaaatacctgaacttcttccttgaagatgatgacgagcttgcgcacataaaaaaggagtacaaggagggaaggatgttgactggtgaagtgaagcaacggcttattgcagttctatctgagattgttgctagacaccagagagctagagctcaagtgaccgaagagatggtcgatgcattcatggcagtgaggcctcttcccaatatgtttggctgagcatcacggcgacaacttgaacaaacatttttgttatcagggagaattttaagagtctttagaattgtcgtgccaccataagtatcccctgtgttttacttcttcgggatttaggcaaacctggccaaacatcccatgtggtggctgtggttgattttgtaaactcatacttgatatggtatcaatgattcaattcagacattttttttcaagcatatgcatgccattgtaatagagagcacctcttttttagttataaacggatgttgcttttgttcaattcaataaccactgtgtttgaat

SEQ ID NO: 90326 - DNA, 1765 bp, Zea Mays
cactaggcctcgccctttcgcccgacacggacatcccctggcccctgccgctccccacccatctccgatctgcgattccttccagccgacgcctccgcatccacctccccggagccaccagcggccagccactggccgtccaaccatcgtccccaagcggcgagttgcggggtgtggcgaagatgatcagcaggcagctcgtgctgacctacctctacctgctgatctacatctgcctctcttcgggcgtcatcctgttcaacaaatgggtcctttctccaaagtacttcaaattccctttccctatcacgcttacgatgattcacatggcattttctggaatcgtgacattcttccttgtccgagtttttaaggttgttgcacccgtcaagatgactttccatatatatgccacatgtgtgattccaattagtgcctttttcgcttcaagtctgtggtttggcaacacggcgtacttgtatatttccgtggccttcattcagatgctcaaggccttgatgcctgtagcaacatttataatggctgttttctgtggtactgacaaattaagatgggacctcttcttgaacatggtattggtcagtgttggtgttgtagtttcatcttatggtgagatccactttaatgtgattggaaccttgtaccaagtcactggtatctttgcggaagccctcaggctggtcctaactcaggtccttctccaaaagaagggcttaaccctgaatcccattacaagcttgtattacatagccccttgcagtttcatcttcctgtttattccatggtatttactggaaaagccagaaatggacgtgactcaaattcaattcaactattcaatatttttcctgaatgcactttctgcattcgcattgaacatatccatattcttagttattggaagaactggagctgtcaccattcgagttgctggtgttctgaaggactggatacttattgctctctcaactattatcttccctgaatccgttattacaagtctcaacataattggatacgcagttgcgctctctggtgttgtcctgtacaattatctgaagatgaaagatgtcagagcaaaccagcttccagcagataataattctgatagggctacaaaggacaagaagtcttctagtatgttcaggcctgacaattccatggacaacagtgatgggactgtagcaggaggcctggcatcagaagctgcagcagttgatgaggaagcccctttgatcccttctgcacgcctctcctacgttacacggacccaaacaggcagctccagtaacagataaccatggtgtacctgttctgtgggttgaccaccatatatttttgttccggtgaacctgaaagaggtgctggtatacgtgtggaaaagaatatggttaaggaagctcctgcaagtcgcacctcatctcataccatgacgacacctggatgtctcctctcgatgtacctttttcgctaggcgtgtatatttcggggagatacctagaggtggattagagaacttgaagagataggctataacttttgcttagtatttggagaaacacgttaggccatgtgttggctatagtatttccttaaccaaacatatggaaatggtgttaaacgttagatgttgtgaagcacttcataggctctaatttgagtgttagtgttgtttccttttcggttctttcattgttcccttaagtactagcggattaccaagtgtgcatccggcaaattttgc

SEQ ID NO: 90327 - DNA, 111 bp, Zea Mays
ccaaaaggcctggggtccattttccttacagtatacaaaacatgagatgcattttacttgcttctattgctatggtctacattagacaggtagcttttattactattctcc

SEQ ID NO: 90328 - DNA, 720 bp, Zea Mays
gattgggctttatatttattgagaaaatatagtcataaatttatagggtacatatgagcagatttaattggattagttaaaatcatagaacaaagttaaataagtgttacaaatccaaatcacaaatgcataggattacaggaaaaaatattacctcaactgcaggatctgattcatatgagccatcatgcttaatggcactaccatttgtcactgcagttctgtagcagtaagagaaagtaaccatatcatgcttcctgaagcaacaaataatactgcggcagcatactactcgactgtactcgttcagaaacaagagtacctgatatattcacattccttcgaaaatgtatgcaggaattcctctttttctaccaagttttctacaaaaatgttctattatagaataaacaaggcttaggagataggaaacattatgtacaatataaatatgtaatattattatgaatataccgagtcagatactgcttcaattcctctttttctggaggaggcccggccactgtagcccctgcttgatgtcaaagttgatgacgtggacgcggtcatggctgccgaacgcgcggagcacccggtcgttgagggtgaagtagaaatacacgtacaagaaagaccgttctaacttggaagaaggaaaaaatcagacaactatatcaactgaacaaagacatcaggcgtcacctggctgctagaacatca

SEQ ID NO: 90329 - DNA, 2928 bp, Zea Mays
atgggaacaagacgacagactgcgcttactgatatatctaaccaaattatcacaggtccgtccaatgaacatgagcgtcatcgggaggagaggaatagaaaacaacgtgaatactgtgcaaaaagaaaggctgaagaaaccaacaaagaaagggaggcgagaaataaaagaatgcgtgattaccgagcgaggaagaaggctgacacggtactatactcgcccagacagacacaggcttatgctactagatcttcgatcgtaatacaaaccaacacacaggtggcagagccggtaacgcctgttgttgcaaggggctctttgcaccaactgccaacatcagtggaaccattttcaaccatttctcaaccttcaacctataatcaatacgatagcaattactgcatctaccatgggcaacctcataatgaaccgagtgggtacatcaatatggatgatgcagatagagaaattctactgcataagcgatgtgaatacaaaaagttgagacaatgtggacaagacgacacgataactggcttaccatggctttctacgctgccagacactctatcaggtgctccattatcaatccagacacaacaacatattgtccatgacacacctacccatgaacctgaattgagagagtatgatactgtattaattgagcctacacaaccaagcctagaaggacatatggagcatccaataacaccacatgatttcaatattgctcaacataatgaatatactagaagtcgggaatttcatggagaagatgatgcatttgaatcatatcgtctgcttgggtactccagtcataccgaagatccatatgactatgtctaccataagttgccagatagacaccatgttctgcgaaaaatacctgactgttgttattgcggagccatgaaatttcaatttgagccacacggaatgtgttgcagaaagggaaagattaaagtgcacatacctgatgttcctactgagttgaaaaggttgttcaccagtcagggagatgacgatgcaaaatattttagaaaaaacatacggttcttcaactctcatttctcctacaccagtcttggagttacattggatcaacgagttagcacagcagctaatacgggtatatatacatttcgtgtccaaggtgccttgtatcatcgtctcgaccatttagtgccaggttctcaaggccctcgtcatttgcaactttacttctatgatacagaagatgctacattggcccacagggcacagagatcaccagaccttgatattaatatcattaaaaatatcttgacaatattagagggaaatccatatgtacaaactttcaatagacttggatccattccaaatctagatgactatgttattgaactcaacactaatgtaacacctgaccaacgaagcacatttctttttgtaatacatgattttaacatgtttattctgcataaacaagtaaatgctacattcaatgctcctgaccacaatgatactcgatctgttaataatgaacatacagctcattattatttggatgaagacaaccaacaagatgactacgacatttcgaatggaggagtggttcaatctgcaaggtttgtgacagtaagggagtattactgtttcttgctacaagctagagaggggggttttaatatcttgttatttggagggcgacttttccaacaatgggtcgttgacatgtatatcaagattgagtctatgaggcttgactggtactctaaccctgttaaccagaaaattatacgggctgaactataccagttcaaggagctcgcacaagcctatgaggttttgagtgatccagagaaacgtgagatttatgatcagtatggtgaagatgcccttaaggaaggaatgggcggtggaggatcccatgttgatccatttgacaaattctcatcatttttggaccctcttttggagcaaggcttgaagtccggtgcctcaatgaggtgccctggttgccagggctcaggcatgaaagtcactattcgtcagttgggcccttccatgatacagcagatgcagcagccttgcaatgagtgcaagaggactagagagagcatcaatgagaaggaccgctgcccagggtgcaagggtgagaaggtcgttcaagagaagaaggttcttgaggttcatgttgagaaggggatgcaacacaaccagaagatcaccttccctggtgaagctgatgaagcaaaggatcactccaaattcaaaagaaagggtgaagatctcctctatgagcataccttgtctctgaccgaagcactatgtgggtgccaatttgttcttacacatctggacaacaggcagcttctcatcaaatcagaccctggtgaagttgttaaacctgaccaattcaaggcgattaacgatgaggggatgccaatttaccagaggcctttcatgaaggggaagctatacatccatttcacggtggagttccctgactcgctggcaccagagcagtgcaaggctctcgagacagtacttccaccaaggctttcatccaagctaacagacatggagacagatgaatgcgaggagacgactatgcatgatgtgaacaacatcgaggaagagatgcacaggaagcaagctcacgctgcccatgaggcgtacgaggaggacgacgagatgccgggcggagcccagagagtgcagtgcgcgcaacagattcagaaacaattggttcgaatctttgttggtggcaacaaagaaagaaactgcatccatatcattcccgtgaaacttctgctgcttctggtgctttatgggattctaccaacatcaacttccttaaatcaggtaccagcagtagtgttcaactgtgagacgaaccaggaagccttgctggaactgaaggttgtcctagcctcctag

SEQ ID NO: 90330 - DNA, 1276 bp, Zea Mays
gaaaaaaaaacaaaaaagccgaacaaaaaacacgacgcggcacagaacatagcaccgcaccaccgcaccgggcctcctccgagtctccgacctcctcctgtcttcggtgtcgtcgcccgcctccccatgaggccgccctcgagacatgcctcgtagcctcggcgtcagtagcagcagcagcaccaggcgctccctccgcgtcgcgccccccgcctcacccccgctgcggcggccgccgtcgccggcatggccatgccgttcgcgcgccgcgacatcgaggcggcgggcgccggcgccagcagcgacgactctcctgccgctaagaagggcaagcccgagctcgcaggggcgcgcccggctttgacgaggtccgaggcgttcgcgttcgcggccgtgctcgcgctcttcaccgccgggatcttctgcgtcttcctcaccgcgccacgcggcgagtttgggcagatcctccgcctcccgcgcagccttgccgacgtccgccttctcaaagacaatcttgctgtttacgcgagagattaccaaacgaattttatattgggttattgctcaatatacatcttcatgcaaacattcatgatccctgggacaatattcatgtctttacttgctggggctctttttggagtgattaaaggtggcattttggtagttttcactgccacagccggtggatcttcttgctattttgtctccaagctgattggcaggcccttggttagttggttgtggcctgaaaaactgagatatttccaatcagagattgctaagaggaaagaaaagctgctgaattatatgctttttctgagaataactccaactttgcccaatacattcataaatatggcgtcaccgattgttgacatacctttccatattttctttgctgcaacactagttggtcttattccagcatcttatattactgtaaaggctggtagagccctaggcgatctgaaatcagttagagagttgtatgacttcaagacattagtggttctgttccttattggatctgttgttgtcgttccaacaatcctgaaaaggaagagaacatacgaatgatgtcttagagcatctacatactttctttagatgttcaaaatgtattaggatttttttaccttttgttttcttgatatcgtatacattttcaattctatacgtagagatgtaaaatcgaatcgaatgctttctaatactagatgatgccatcattgtatctgcatgtctcctgttcattattgacctgtatctgtgc

SEQ ID NO: 90331 - DNA, 1169 bp, Zea Mays
aggccactaggtcatcgaaggttgcctacgcatacgcaaccttatcatcatccgcccttgggttttctatccgatagaccggggacgcacaggcctctcgccctccgcgcggctccacaggagagcaaaaatggcgaccctctccatggtctccgtccccatcgcaccctcctccttgtccctttccacccggggccgcagctcctccgcatccttccccgctaagaagggaggaatcggtcacggtggcttgcggatcgagtgcatccgtattggtggtgttgagattccaaaccacaagagggtggagtactcgctgcagtacatacatggcattggacgctcacgctcacgccagatcctcctggacctcaatttcgataacaagatcaccaaggacctctccgaggaggaggtcatcaccctccgtaaggaggttggcaagtacatgattgagggagaccttgtaacgtccctgatccctttgtcgattattcgctgcagttatttgattcagtagttcatgatgattaacgacttgtatggttaccatagttacttagttaacatatcaatgattccttgaaagctttgaagttcattctgcaggtctgcgtatttaatttcacttccttagtcatagatgattcctgactgtcctaactgtttagttttatatcgatgttggactccaagggagtgaaaacgctgagagctggcacactgctgtttggtatgctttacagaaacgtttcaaccgtgtggcgattgagaggctgaaggagattaggtgctacaagggcatccggcacaagcttggactcccagttcgtggccagaggacaaagaacaactgccggacacttaagggaaagagggcttcagttgccaagaagaagtcacccgcctcccaggatgaataaatcgtattgccatgtattgaagttctctctctctctctctctctctctctctctctctctctgtgtgtgtgtgtgtgtgtgtgtgtgtgtgtagcgctactactgctgggtgttttgtttcgagcttttatgctgccattgacaaatcatggggtagccatcagctgctgcagattttgtagcaatgacatactagctcatatgggtcggttctataaatgaagatcaaattcttgtttacatcca

SEQ ID NO: 90332 - DNA, 986 bp, Zea Mays
aggccactaggtcatcgaaggttgcctacgcatacgcaaccttatcatcatccgcccttgggttttctatccgatagaccggggacgcacaggcctctcgccctccgcgcggctccacaggagagcaaaaatggcgaccctctccatggtctccgtccccatcgcaccctcctccttgtccctttccacccggggccgcagctcctccgcatccttccccgctaagaagggaggaatcggtcacggtggcttgcggatcgagtgcatccgtattggtggtgttgagattccaaaccacaagagggtggagtactcgctgcagtacatacatggcattggacgctcacgctcacgccagatcctcctggacctcaatttcgataacaagatcaccaaggacctctccgaggaggaggtcatcaccctccgtaaggaggttggcaagtacatgattgagggagaccttaaacgtttcaaccgtgtggcgattgagaggctgaaggagattaggtgctacaagggcatccggcacaagcttggactcccagttcgtggccagaggacaaagaacaactgccggacacttaagggaaagagggcttcagttgccaagaagaagtcacccgcctcccaggatgaataaatcgtattgccatgtattgaagttctctctctctctctctctctctctctctctctctctctgtgtgtgtgtgtgtgtgtgtgtgtgtgtgtagcgctactactgctgggtgttttgtttcgagcttttatgctgccattgacaaatcatggggtagccatcagctgctgcagattttgtagcaatgacatactagctcatatgggtcggttctataaatgaagatcaaattcttgtttacatccatttgtattcctctgtcccaacctatgctcgatgcaaggagtccagactgctcctgacgaattactatttaccagatccagtgttctggggattattc

SEQ ID NO: 90333 - DNA, 983 bp, Zea Mays
aggccactaggtcatcgaaggttgcctacgcatacgcaaccttatcatcatccgcccttgggttttctatccgatagaccggggacgcacaggcctctcgccctccgcgcggctccacaggagagcaaaaatggcgaccctctccatggtctccgtccccatcgcaccctcctccttgtccctttccacccggggccgcagctcctccgcatccttccccgctaagggaggaatcggtcacggtggcttgcggatcgagtgcatccgtattggtggtgttgagattccaaaccacaagagggtggagtactcgctgcagtacatacatggcattggacgctcacgctcacgccagatcctcctggacctcaatttcgataacaagatcaccaaggacctctccgaggaggaggtcatcaccctccgtaaggaggttggcaagtacatgattgagggagaccttaaacgtttcaaccgtgtggcgattgagaggctgaaggagattaggtgctacaagggcatccggcacaagcttggactcccagttcgtggccagaggacaaagaacaactgccggacacttaagggaaagagggcttcagttgccaagaagaagtcacccgcctcccaggatgaataaatcgtattgccatgtattgaagttctctctctctctctctctctctctctctctctctctctgtgtgtgtgtgtgtgtgtgtgtgtgtgtgtagcgctactactgctgggtgttttgtttcgagcttttatgctgccattgacaaatcatggggtagccatcagctgctgcagattttgtagcaatgacatactagctcatatgggtcggttctataaatgaagatcaaattcttgtttacatccatttgtattcctctgtcccaacctatgctcgatgcaaggagtccagactgctcctgacgaattactatttaccagatccagtgttctggggattattc

SEQ ID NO: 90334 - DNA, 953 bp, Zea Mays
aggccactaggtcatcgaaggttgcctacgcatacgcaaccttatcatcatccgcccttgggttttctatccgatagaccggggacgcacaggcctctcgccctccgcgcggctccacaggagagcaaaaatggcgaccctctccatggtctccgtccccatcgcaccctcctccttgtccctttccacccggggccgcagctcctccgcatccttccccgctaaggagtgcatccgtattggtggtgttgagattccaaaccacaagagggtggagtactcgctgcagtacatacatggcattggacgctcacgctcacgccagatcctcctggacctcaatttcgataacaagatcaccaaggacctctccgaggaggaggtcatcaccctccgtaaggaggttggcaagtacatgattgagggagaccttaaacgtttcaaccgtgtggcgattgagaggctgaaggagattaggtgctacaagggcatccggcacaagcttggactcccagttcgtggccagaggacaaagaacaactgccggacacttaagggaaagagggcttcagttgccaagaagaagtcacccgcctcccaggatgaataaatcgtattgccatgtattgaagttctctctctctctctctctctctctctctctctctctctgtgtgtgtgtgtgtgtgtgtgtgtgtgtgtagcgctactactgctgggtgttttgtttcgagcttttatgctgccattgacaaatcatggggtagccatcagctgctgcagattttgtagcaatgacatactagctcatatgggtcggttctataaatgaagatcaaattcttgtttacatccatttgtattcctctgtcccaacctatgctcgatgcaaggagtccagactgctcctgacgaattactatttaccagatccagtgttctggggattattc

SEQ ID NO: 90335 - DNA, 964 bp, Zea Mays
aggccactaggtcatcgaaggttgcctacgcatacgcaaccttatcatcatccgcccttgggttttctatccgatagaccggggacgcacaggcctctcgccctccgcgcggctccacaggagagcaaaaatggcgaccctctccatggtctccgtccccatcgcaccctcctccttgtccctttccacccggggccgcagctcctccgcatccttccccgctaagaagggaggaatcggtcacggtggcttgcggatcgagtgcatccgtattggtggtgttgagattccaaaccacaagagggtggagtactcgctgcagtacatacatggcattggacgctcacgctcacgccagatcctcctggacctcaatttcgataacaagatcaccaaggacctctccgaggaggaggtcatcaccctccgtaaggaggttggcaaaaacgtttcaaccgtgtggcgattgagaggctgaaggagattaggtgctacaagggcatccggcacaagcttggactcccagttcgtggccagaggacaaagaacaactgccggacacttaagggaaagagggcttcagttgccaagaagaagtcacccgcctcccaggatgaataaatcgtattgccatgtattgaagttctctctctctctctctctctctctctctctctctctctgtgtgtgtgtgtgtgtgtgtgtgtgtgtgtagcgctactactgctgggtgttttgtttcgagcttttatgctgccattgacaaatcatggggtagccatcagctgctgcagattttgtagcaatgacatactagctcatatgggtcggttctataaatgaagatcaaattcttgtttacatccatttgtattcctctgtcccaacctatgctcgatgcaaggagtccagactgctcctgacgaattactatttaccagatccagtgttctggggattattc

SEQ ID NO: 90336 - DNA, 1346 bp, Zea Mays
ttgccgaagcttgcaccggtgcacggacaccaccacctgctcccccatccggcggcacccgggccgccgcgcccgcgcgctctatccaccactcaaataaacgcgatatgctctgccttgctggcctgctattgaaaatcacacgacttccaccgcaatcgcacgcaaaaatcccgctcgagcttccaccgtctccctccgcttccccgtgcggcggtgccgggtcgcgccgtgccatggcgcccgccttctcggtctcgtgcgcgcccggatcctcgcgcccgctggccgccagccccggccccagcgtcgtcgtcgtcgcctcctcccaacttcccgcgtcgtcgcggagcagcgaacgcaggagagcaccaggcctcgcgctcgccgcggccccgggtgtcggcggtagggatggcggtggcaggtggagagcaggcatctcgtccttccccttcctgccgccgttcttcacagggaacaagggggagaaggacgctgagaaggcgatgaggctcaaggaggagctcctcgacgccattgcaccgctggaccgtggcgccgaggccacgcccgaggacaaggagcgcgtcgagcagattgttcagcaactggaggcggtgaaccaggtgaaggagccgctcaagtccgatctcctaaacggcaaatgggagcttctctataccacctccacaagtatactgcagccacagaggccaaagtatctgaggccgtttgggaagatttaccaatcaatcaacgccgacaatttgagagcccaaaacatggaaacttggccctactttaatcaggttactgccaacttggtacctctgaattctagaagagtggcagttaaatttgactacttcaagatatttggtttgataccgatcaaagcacccggaagtggtaaaggtgaacttgagattacttatcttgatgaagagctcagggtttcgagaggcgacaagggaaacttgttcgtactgaagatggtcgacccagcatacagggttccattataataatgttatgataacatttaggagtcagctatgtgtaacattcttcttcctcgcatgaagactgaggtaatgtaaggcgtgtaaatattaaatatcacatctgaaagataaattttttggggggaagctgtacattttctgagaaaccagtaagacttccgcgtccaaaatgaggcccaagatttaagcatagacgatagagaacatgtcgtgtgaagactaacacacatcaatgtatagaaaatgcaatgataatccattttgatccaactacatcgtcactctgaaaaatatcagtagctgcttttggattctcat

SEQ ID NO: 90337 - DNA, 2358 bp, Zea Mays
atggagaacagggatagcttcactcgccccccagcgccctcctacgcccacggaacccaaaccgctaagggcgtcgcggtccctaccggcggggacacggccgccaccaacctgacgtcgtcgtcagggttgtcctcgtctctcacgctctcccctccccacttcctgcaacagattcatgcagctgtcaagcggcagaggcctttcggtccaatgcagtctaaacttccaagagcaacacgggtcctggtttccggaggtgagcgtgcaaataaaattggtgccaacccttctgtttcgaaagaccaggaacgaattgttacgcagcctcagagaggcatgttgggaccctctatgctgccaaatgtgacgcctgatcaacagaaagtcgatagcacttctaaattagggtcctctgccccagatgagttgatgttgacagcaccctcaatgctaaaaagtaccactgatacctgtgcacaacgtgttggccagcagaaaaacaaggctaatctgttgatggatacagagaagtcagctttcgatgctttgtcatctcaaattacatcatgcaatgcattgatgggggaaagtttcaagaaaggacagcttgattcggttgttaatccacagttgacgtcacaaagagataattttcctgcaaatcaaggagctcagaatgatcaccagaagaaccatcaggagcttcaaactgttgatatagcagctgatatggatatcgaatatgatgcgtctaatttgtctcggagagggatccaagaggctcgtaatcagaatcatggaaagcatatgattcctttctctgccattggttcatctgtgactgctatgtctcttcactcgggacctactgtccaaagttcacagactccacaggttggcggatacacttcaccagtgcagataccagaatctgctgtagaatcctccaagggtgcactgggccatggtgctcaaaaggagcatgctggtgcaactggtgttggtgactggaatccccacaaccagcaggttcaaaatctaggtaatggtgccacggacaaagctgtttctagcattggcagattgcgttctgaaggattacctgcaaatgatcagtctacatctgccagggatggtggtggttcccgaccaaacaagggtgagaaggagcgccgtaaaaagaattatgatcctaatgttttctttaaggtgaacgggaaactttatcagaaacttggtaaaataggatctgggggtagcagtgaagtacataaagttatatcatcagattgcataatatatgccttgaaaaagatcaagcttagaggtcgtgattaccctactgcatatggtttctgtcaagaaattgagtacttaaataagttgaaaggaaggagcaatatcatacaaatgattgattatgaggtcactgataaaagtctacttctagaaagtaccgtgtcacccagggatgggagaattaaggatgatcactacatttacatggttctggaatatggtgaaattgacttggctaacatggttgctcagaagtggaaggagaggaacaactctactatgaaaattgatgaaaattggctgcgcttttattggcagggtaggcctcgtgctatggtgagagctgtctcattgagtcaccaggtcgcggcattgaagcagcgtagcatttgcggcggaaggcttcaaatacttgaagctgtcagtacaatacacgaggaacgaattgtccactctgatttgaagcctgcaaactttatgcttgtgaggggctcacttaaactaattgactttggcatcgccaaggctataatgaatggtacaacaaacattcaacgtgatgctcaggctaattgtggttctcactgcactgagcaggtagggactctcaactacatgtcacctgaagcgttcatgtgcaatgatacagactcggatggtaacattattaagtgcgggctcccctcagatatctggtctcttggctgtattctttaccagatggtgtatggcaagacaccatttgcagactacaagactttctgggacaaatataaaggagtgactgataggaaccacaagatcatgtatgaaccagttgacaacccatggctcattgatttgatgcaaaggtgtctcgcctgggaccgaaatgaacgatggagaacacctcagcttcttaagcacccttttctcaatcctccagttccaagggatttacctccctctgacgatgatccatataggttgctcattgagaggatcagagtccactgggataacccaatggttcaaaaacttcgtagtttaattgaagaactcgatggggatcagtaa

SEQ ID NO: 90338 - DNA, 135 bp, Zea Mays
gccggcgataaatatttgaaaacggagacctccgttcccaaatatatgataccgttgaaatttttcgaaaactttgatgacttatgttattcaaaatatttatttaaaaatgtaaaattttaaattaagcataac

SEQ ID NO: 90339 - DNA, 2683 bp, Zea Mays
gcgtccgttcccggagcaaaaataaaaaaaatcaaaaacacaaaagaattcgctacttcgccggcgacaggggcgaccgcgcgcgccccggccggtgctgatccggactctcccatgcacccattctgctgtgcgccgctcgtgcctgtatcgcccgtggcctccgccgcggccgcgtcctctgcggtggcgggcgccccggccgtgatgccgccaccgcagcccccgcctcctccgcctcctccgccccgaagcaaccccgcctctggcggtgagaggcgcgcgcgcgcggcgggggtcagcggtggcggaggaggcggttcctcgccgcccgagggggtgaagctgaacgagatcgtcggcggcggcatctcgggaatcctgtacaagtgggtcaactacgggcgcggttggaggccgcgctggttcgctctccacgacggcgtgctctcctactacaagatccacgggcccgaccgcatcatcctatcgcgcgagaccgagcggggcgccaaggtcatcggcgatgattccctccgccgcctcaaccgcccctccacctcctcgtcgtcccactccaacggccaccaccatcctcgaaaccccatcggcgaaatccacctcaaggtgtcgaccgtgagggagagcagatcggacgacaggagattctccatcttctcggggacgaagacgttgcacctgagagcggagaccagggaggacagagctgcgtggctcgaggcgctgcgggcgaccaaggacatgttcccgaggatgtcctccagcgagatggtcgggccaggggacaccgcagcggcagtggccgtctcgaccgagcgcctaaggcagcggctgcagcaggaaggggtcagcgaggcggccattgctgacagcgagatgatcgtgcgggcagaattcgaggctctgcacaagcagcttgtgctctccaagcagaagcacgcgctcctcttggaaactcttcgccagctagagacagaaaaggttgatttggagaatacccttgtcgatgagagtcaaaggcagtcgaaagagtatggatctgcttctaaaccaagacatgagaagtatagtgaaggaagtgctagtgaatctgatgattataatgaaccacaagatcctgctgaagagactgatgatgatgagaacctttattttgatacaagagattttctatcctcaagctcttttaaaagtagtggatctgatttccaaagatctgaagctggttcagatgatgaagacgattatccaatggatggaattgatccttccatgaagtctattgggattagttatccatatgtaagaaggcggaagaagctaccagatccggttgagaaagaaaagggtgtaagtttgtggtcaatgatcaaggacaacataggaaaggatcttacaaaagtttgtctgcctgtttacttcaatgagccactttcatcgttacaaaaatgttttgaagatctggagtattcctaccttattgatcgtgcatctgaatgggggaaaagggggaatagtcttatgaggattcttagcgtagcagcatttgctgtttctggatatgcctctacagatggcaggagctgtaagccttttaacccccttcttggggagacatatgaagcagactatccagacaaaggcctccgttttttctctgaaaaggttagtcatcaccctatggttgttgcttgccactgtgagggaactggctggaggttttgggctgatagcaacctaaagagtaaattctggggtcgttccatccaacttgatcctgttggtgaattaacactggagtttgatgatggggaagttttccaatggagcaaggtgacaacttcaatttacaatctcatattgggcaagctatattgcgatcactatggtactatgcgcattcaaggtaatcgtgagtattcatgtaagcttaagttcaaggagcagtcaattatcgatcgcaaccctcaccaggtgcaaggtgttgttcaagatagaaatggtcgaactgttgctacactatttggaaaatgggatgaaagcatgcactatgtaatgggtgattgctttgggaaaggcaagggaactgaacagttatcggaggcccatttgttgtggaaaagaagcaaaccacctaagtttcccactagatacaatctcactcaatttgcaattacattgaatgaacttacccctggattgaaggagaaactgccacctacagactcaagattacgaccagaccagagatgtctggagaacggtgaatatgaaagggcaaatgctgagaaattgaggcttgaacagagacaacggcaggcacgaaagatgcaggagagcggatggaagcctcggtggtttgcgaaggataaagctactgacacataccgttacgtcggtgggtactgggaatccagagaaaagagcagctgggaaggttgccccgacatcttcggacaagtccctaacgatctgatggtaactgactaggttcgagtaggttataggtcttttgcttctccttatcggtatcacttgattccggaaattttagtggttcatattatagagcaattaagtgcccgttgacaagtaaacattggcagtgcctccggtaatattggtctcgtacataataagaagaaaatggttcggtctcaca

SEQ ID NO: 90340 - DNA, 1899 bp, Zea Mays
atacatgcctgcaacaaagcctttgttgtgtttgtgcaacagcagcagcacagacatttagctccagagtcgggactactagtagccaagatcacacaatttccaagaccaacgcgcttccaaattcccagcttctgcgcagtgtgcatgctctgcccgcttctctgattctgatctgagtctgagggagcaagcgcgactgccacttcacaccttcctccagcgcggcgaagatgtcggtggcggtgtgccgtggcccagctgttccggcgttcgaggcgccctgctggctgcgccctgctgagccgtacaggcagccggaggccgtcgtcgacgtcgaccggcctgcgcaggcggacatatggaacgccatccaggccgacgtgggcaaggtgggcgccggcgccaagaaggcgtccaagccgtacgtgcgggacccattcgtgcgccggtcgtcgatcctgatgagccagaagagcctcgaggtctgcacggagagcctcggcaacgagaccggctccggcgacttcgcgtcatccctggacatgtcctgcctgttcgacgcgccgctgccggcggcggcggatgagtccttctggcagcacgacgcggatcgctgctgcgaggagaaggagcagtgggggagcaaggacctcgcggcggtgaactaccactgctcggccgggacgcggccacggcgccgctcgttcccgccgccgctgccgtccatgtcgcgccgcgacgggccgtgcgtgcagatgcgcccgcgccgccaggacgggcgcctcgtgatcgaggccgtggcggtgcggccgcgcgggtacctccacgcgaggcgccagggcggacgcctctgcctctccttcgtcgagtgctctgcccgcgaccagagcgcggcgaccagggtcactgcggcggcggcggcagaggcgccgtatttctgcgccgtggagcccaggaacgcgcaagaggaagaggcggccgtggaaatggacgacgacgaggtgatggaggatgatgaggaggaggaggaggtggaggtgctggacaggggcaccgtcgttgaggtcaaggtgagcacgcagccgcaggcaccaaccgcggccaaggtgcaccgctcgacgctcgtgatcaacaagttcgtcggcagcacgccgctgtccgtgtatcaaccccggcgccacgccgccaacgcggcacagcccgaggcggaaacctgcgacgagacggcggcgcagtcaccgcgcccgacggccctgcgccgggtgccgtcgtccacgacgactctggcggccgcggtcgccgcagcctcgacggacgacgacgacgagtgcggcgggctgcacctctccgcctccgccgcggctgagaccaagcagctgctgctgtcgttcacgtcgcggaggggcgacgggcaggacctgctgcagagcgtgcggcggtgccggcagctgcggcagaagaagctcttcatcctggagccctactgcattgccacctcctgaacaaaaccgtccatcacagccacactacacagctgcgaatgcgacagttggggtcgccgtcgccattgggttgctagccttaattaatcactagcaaatcaagcacgtccggattagccgattattataataacccttgtcagtccgccgtcgtcacacagacacagtggctgctgcattgctgggcattattccttttttttttcgacacatcctttccatgtgttgattggtatttcgccgtttggtcccttgcagtggcctcgtgcgtgctgtaattgtggttgctctagtactagtttgtcccccccccccccccccccccctcctgtatttgtagtgtgatttgagtactataatttatcagtgaattaacagattttctggtgtggat

SEQ ID NO: 90341 - DNA, 1734 bp, Zea Mays
cttggagtcccatcagtaaagcacatgtttcctttctgtgattcctcaagccccatggacttaccgctttaccaacaactgcagctaagcccgtcttccccaaagacggaccaatccagcagcttctactgctacccatgctcccctcccttcgccgccgccgacgccagctttcccctcagctaccagatcggtagtgccgcggccgccgacgccacccctccacaagccgtgatcaactcgccggacctgccggtgcaggcgctgatggaccacgcgccggcgccggctacagagctgggcgcctgcgccagtggtgcagaaggatccggcgccagcctcgacagggcggctgccgcggcgaggaaagaccggcacagcaagatatgcaccgccggcgggatgagggaccgccggatgcggctctcccttgacgtcgcgcgcaaattcttcgcgctgcaggacatgcttggcttcgacaaggcaagcaagacggtacagtggctcctcaacacgtccaagtccgccatccaggagatcatggccgacgacgcgtcttcggagtgcgtggaggacggctccagcagcctctccgtcgacggcaagcacaacccggcagagcagctgggaggaggaggagatcagaagcccaagggtaattgccgcggcgaggggaagaagccggccaaggcaagtaaagcggcggccaccccgaagccgccaagaaaatcggccaataacgcacaccaggtccccgacaaggagacgagggcgaaagcgagggagagggcgagggagcggaccaaggagaagcaccggatgcgctgggtaaagcttgcttcagcaattgacgtggaggcggcggctgcctcggggccgagcgacaggccgagctcgaacaatttgagccaccactcatcgttgtccatgaacatgccgtgtgctgccgctgaattggaggagagggagaggtgttcatcagctctcagcaatagatcagcaggtaggatgcaagaaatcacaggggcgagcgacgtggtcctgggctttggcaacggaggaggaggatacggcgacggcggcggcaactactactgccaagagcaatgggaactcggtggagtcgtctttcagcagaactcacgcttctactgaacactacgggcgcactaggtactagaactactctttcgacttacatctatctcctttccctcaacgtgagcttctcaataatttgctgtcttaatctatgcgtgtgtttctctttctagacttcgtaattggctgtgtgacgatgaactaagtttggtcatcgcatgatgatgtattatagctagctagcatgcactgtggcgttgattcaataatggaattaatcggtgtcgtcgatttggtgatttccgaactgaatctctgtgatgaacgagatcaaacagtatccgccggtgacggacgttcattactattggcaagcaaagcaagtactaatgtaattcagctgtttgatgacagaatgaaaaaaatgttgaaggctgaagctataacatgctgaaagagaggcttttgctaggtaaaagtctagctcacaaggtcaattccatgatgccgtttgtatgcatgttaaaatctgcacctaatggcgcggctttatatagtcttataattcatggatcaaacatgccgatcatttagttgggttaaaagttcctgttactaatggtttatctaatt

SEQ ID NO: 90342 - DNA, 93 bp, Zea Mays
ctaaatactcttgttatcgtggtggtgtcatataatatctttacaggagtatatataactatcatgcatattgattttttgtcaaagctctaa

SEQ ID NO: 90343 - DNA, 1806 bp, Zea Mays
aagctcttcaccacaaactgacaaacacgacccaggccttcttcctgcgagtttcatttcatttcatcctaccttacctttttactcctccagtccagtcagagaacaccataagtggccgctacacctgctcactccattgcaccactagcaagtagcaacaggagcgcaggcagaactagagcggtcttggtatggcttcttccctcgcgcccgcgtcgtgggcactgccgctgcagatggtcggggctggggcggcagcggcggggccttcctgccgcgcgacgctagccgtcgtcacggagccccgctgggccgcgtcgctgcgccgggcaagggttctcgtggcgctggcgccccggtgcgtggcgctcgacgggcccggcgccagcggcgaggaggaggcgcccaagatcgaggacgagaggaagaagagcggtgagacgaagaagccggcgcgcggccggccggtgtggagccggatcctcttcgcctccaagaagacacgaagtatcatcatcctcaacgccctcacggtcatctatgaggtcgaagccctgacagagcctgcggtcttcaacatggtgcggttcgttgttgcagccatccccttcgtaccattcgcgctccgttccttcggtgaccgcagtgtacgctacgcgggactggagctgggagtctgggttagcttagcttacctttctcaagcaattggattgctctcatctgatgctggccgagcatccttcatcacggccttcacggtcgtagttgtgcctctaattgatggtcttcttggtgcttcgatccccagactcacatggttcggagccatcatgtctctgttcggaattggcctgctggaatgtggtggatctcctcccagtgttggcgatattttgaacttcttcagtgccgtgtttttcgggatccatatgcttagaacagaacaaatatcaaggagtacggacaagaagaaatttttagctcttcttggcttcgaggtccttgtggttgctttctcctccgttctctggtttatgttcaaagatggctacgttgataccagcggatccagctttgaatcttggacgttcgggatgctctgggataccacagtttcgtttccttggataccagcattgtacactggggttctttctacggtgttatgcatgtgggcagagatggtggcgatgggcgatgtttcagcaaccgaaactgcagttgtttacgggttggagccagtttggggagctgcttttgcttggttcctccttggtgaaagatgggatgacgctgcatggactggagctgctctcgtattatgtggcagtttgacagttcagctatttgggtcagctcctgagaagtccaagaaagtcaaaaaacgcagcagcaatgctttagaaactccagtgaaacgacgagactacttatcgttgtctcccataccagttgattccgggaagatcataggaaggcaattagaaagaacaaagcagtataggtagcccaactacaaggcaagaagaaaggaaacgctgcgatgataggggcgcgcatgtaccaaatcattgtcctgaggcatcgtctgtttggctccgtcaatggccatatggggatgctgctcgattgtccgcatggagttttttttttcctttgtccgtattgaaaatggtcgtatttggatttctgttgtctcggttgaccgcattggtagtggcaactcgaggagaatacttagacacatctactggcgtagtaatgacgttcagtgagataacttagtatgttttgggcact

SEQ ID NO: 90344 - DNA, 1832 bp, Zea Mays
aagctcttcaccacaaactgacaaacacgacccaggccttcttcctgcgagtttcatttcatttcatcctaccttacctttttactcctccagtccagtcagagaacaccataagtggccgctacacctgctcactccattgcaccactagcaagtagcaacaggagcgcaggcagaactagagcggtcttggtatggcttcttccctcgcgcccgcgtcgtgggcactgccgctgcagatggtcggggctggggcggcagcggcggggccttcctgccgcgcgacgctagccgtcgtcacggagccccgctgggccgcgtcgctgcgccgggcaagggttctcgtggcgctggcgccccggtgcgtggcgctcgacgggcccggcgccagcggcgaggaggaggcgcccaagatcgaggacgagaggaagaagagcggtgagacgaagaagccggcgcgcggccggccggtgtggagccggatcctcttcgcctccaagaagacacgaagtatcatcatcctcaacgccctcacggtcatctatggtcaagtgatattccggttttgaaagaggtcgaagccctgacagagcctgcggtcttcaacatggtgcggttcgttgttgcagccatccccttcgtaccattcgcgctccgttccttcggtgaccgcagtgtacgctacgcgggactggagctgggagtctgggttagcttagcttacctttctcaagcaattggattgctctcatctgatgctggccgagcatccttcatcacggccttcacggtcgtagttgtgcctctaattgatggtcttcttggtgcttcgatccccagactcacatggttcggagccatcatgtctctgttcggaattggcctgctggaatgtggtggatctcctcccagtgttggcgatattttgaacttcttcagtgccgtgtttttcgggatccatatgcttagaacagaacaaatatcaaggagtacggacaagaagaaatttttagctcttcttggcttcgaggtccttgtggttgctttctcctccgttctctggtttatgttcaaagatggctacgttgataccagcggatccagctttgaatcttggacgttcgggatgctctgggataccacagtttcgtttccttggataccagcattgtacactggggttctttctacggtgttatgcatgtgggcagagatggtggcgatgggcgatgtttcagcaaccgaaactgcagttgtttacgggttggagccagtttggggagctgcttttgcttggttcctccttggtgaaagatgggatgacgctgcatggactggagctgctctcgtattatgtggcagtttgacagttcagctatttgggtcagctcctgagaagtccaagaaagtcaaaaaacgcagcagcaatgctttagaaactccagtgaaacgacgagactacttatcgttgtctcccataccagttgattccgggaagatcataggaaggcaattagaaagaacaaagcagtataggtagcccaactacaaggcaagaagaaaggaaacgctgcgatgataggggcgcgcatgtaccaaatcattgtcctgaggcatcgtctgtttggctccgtcaatggccatatggggatgctgctcgattgtccgcatggagttttttttttcctttgtccgtattgaaaatggtcgtatttggatttctgttgtctcggttgaccgcattggtagtggcaactcgaggagaatacttagacacatctactggcgtagtaatgacgttcagtgagataacttagtatgttttgggcact

SEQ ID NO: 90345 - DNA, 2013 bp, Zea Mays
aagctcttcaccacaaactgacaaacacgacccaggccttcttcctgcgagtttcatttcatttcatcctaccttacctttttactcctccagtccagtcagagaacaccataagtggccgctacacctgctcactccattgcaccactagcaagtagcaacaggagcgcaggcagaactagagcggtcttggtatggcttcttccctcgcgcccgcgtcgtgggcactgccgctgcagatggtcggggctggggcggcagcggcggggccttcctgccgcgcgacgctagccgtcgtcacggagccccgctgggccgcgtcgctgcgccgggcaagggttctcgtggcgctggcgccccggtgcgtggcgctcgacgggcccggcgccagcggcgaggaggaggcgcccaagatcgaggacgagaggaagaagagcggtgagacgaagaagccggcgcgcggccggccggtgtggagccggatcctcttcgcctccaagaagacacgaagtatcatcatcctcaacgccctcacggtcatctatgcaagtgatattccggttttgaaagaggtcgaagccctgacagagcctgcggtcttcaacatggtgcggttcgttgttgcagccatccccttcgtaccattcgcgctccgttccttcggtgaccgcagtgtacgctacgcgggactggagctgggagtctgggttagcttagcttacctttctcaagcaattggattgctctcatctgatgctggccgagcatccttcatcacggccttcacggtcgtagttgtgcctctaattgatggtcttcttggtgcttcgatccccagactcacatggttcggagccatcatgtctctgttcggaattggcctgctggaatgtggtggatctcctcccagtgttggcgatattttgaacttcttcagtgccgtgtttttcgggatccatatgcttagaacagaacaaatatcaaggagtacggacaagaagaaatttttagctcttcttggcttcgaggtccttgtggttgctttctcctccgttctctggtttatgttcaaagatggctacgttgataccagcggatccagctttgaatcttggacgttcgggatgctctgggataccacagtttcgtttccttggataccagcattgtacactggggttctttctacggtgttatgcatgtgggcagagatggtggcgatgggcgatgtttcagcaaccgaaactgcagttgtttacgggttggagccagtttggggagctgcttttgcttggttcctccttggtgaaagatgggatgacgctgcatggactggagctgctctcgtattatgtggcagtttgacagttcagctatttgggtcagctcctgagaagtccaagaaagtcaaaaaacgcagcagcaatgctttagaaactccagtgaaacgacgagactacttatcgttgtctcccataccagttgattccgggaagatcataggaaggcaattagaaaggaagaacaaagcagtataggtagcccaactacaaggcaagaagaaaggaaacgctgcgatgataggggcgcgcatgtaccaaatcattgtcctgaggcatcgtctgtttggctccgtcaatggccatatggggatgctgctcgattgtccgcatggagttttttttttcctttgtccgtattgaaaatggtcgtatttggatttctgttgtctcggttgaccgtgctagagtacctcatgcgtattaggaaatgaggcattggtagtggcaactcgaggagaatacttagacacatctactggcgtagtaatgacgttcagtgagataacttagtatgttttgggcactgctaaccgtaaaggttcatgtattaatatagtgggtaaatggttctagagtactgaactgagcataccattgtatagtactgaaataacaaataccacgcatggtattatttggctcccagtcaatagatccaggaatcaggaca

SEQ ID NO: 90346 - DNA, 1977 bp, Zea Mays
aagctcttcaccacaaactgacaaacacgacccaggccttcttcctgcgagtttcatttcatttcatcctaccttacctttttactcctccagtccagtcagagaacaccataagtggccgctacacctgctcactccattgcaccactagcaagtagcaacaggagcgcaggcagaactagagcggtcttggtatggcttcttccctcgcgcccgcgtcgtgggcactgccgctgcagatggtcggggctggggcggcagcggcggggccttcctgccgcgcgacgctagccgtcgtcacggagccccgctgggccgcgtcgctgcgccgggcaagggttctcgtggcgctggcgccccggtgcgtggcgctcgacgggcccggcgccagcggcgaggaggaggcgcccaagatcgaggacgagaggaagaagagcggtgagacgaagaagccggcgcgcggccggccggtgtggagccggatcctcttcgcctccaagaagacacgaagtatcatcatcctcaacgccctcacggtcatctatggtcaagtgatattccggttttgaaagaggtcgaagccctgacagagcctgcggtcttcaacatggtgcggttcgttgttgcagccatccccttcgtaccattcgcgctccgttccttcggtgaccgcagtgtacgctacgcgggactggagctgggagtctgggttagcttagcttacctttctcaagcaattggattgctctcatctgatgctggccgagcatccttcatcacggccttcacgactcacatggttcggagccatcatgtctctgttcggaattggcctgctggaatgtggtggatctcctcccagtgttggcgatattttgaacttcttcagtgccgtgtttttcgggatccatatgcttagaacagaacaaatatcaaggagtacggacaagaagaaatttttagctcttcttggcttcgaggtccttgtggttgctttctcctccgttctctggtttatgttcaaagatggctacgttgataccagcggatccagctttgaatcttggacgttcgggatgctctgggataccacagtttcgtttccttggataccagcattgtacactggggttctttctacggtgttatgcatgtgggcagagatggtggcgatgggcgatgtttcagcaaccgaaactgcagttgtttacgggttggagccagtttggggagctgcttttgcttggttcctccttggtgaaagatgggatgacgctgcatggactggagctgctctcgtattatgtggcagtttgacagttcagctatttgggtcagctcctgagaagtccaagaaagtcaaaaaacgcagcagcaatgctttagaaactccagtgaaacgacgagactacttatcgttgtctcccataccagttgattccgggaagatcataggaaggcaattagaaaggaagaacaaagcagtataggtagcccaactacaaggcaagaagaaaggaaacgctgcgatgataggggcgcgcatgtaccaaatcattgtcctgaggcatcgtctgtttggctccgtcaatggccatatggggatgctgctcgattgtccgcatggagttttttttttcctttgtccgtattgaaaatggtcgtatttggatttctgttgtctcggttgaccgtgctagagtacctcatgcgtattaggaaatgaggcattggtagtggcaactcgaggagaatacttagacacatctactggcgtagtaatgacgttcagtgagataacttagtatgttttgggcactgctaaccgtaaaggttcatgtattaatatagtgggtaaatggttctagagtactgaactgagcataccattgtatagtactgaaataacaaataccacgcatggtattatttggctcccagtcaatagatccaggaatcaggacatgtattgtgttc

SEQ ID NO: 90347 - DNA, 2085 bp, Zea Mays
aagctcttcaccacaaactgacaaacacgacccaggccttcttcctgcgagtttcatttcatttcatcctaccttacctttttactcctccagtccagtcagagaacaccataagtggccgctacacctgctcactccattgcaccactagcaagtagcaacaggagcgcaggcagaactagagcggtcttggtatggcttcttccctcgcgcccgcgtcgtgggcactgccgctgcagatggtcggggctggggcggcagcggcggggccttcctgccgcgcgacgctagccgtcgtcacggagccccgctgggccgcgtcgctgcgccgggcaagggttctcgtggcgctggcgccccggtgcgtggcgctcgacgggcccggcgccagcggcgaggaggaggcgcccaagatcgaggacgagaggaagaagagcggtgagacgaagaagccggcgcgcggccggccggtgtggagccggatcctcttcgcctccaagaagacacgaagtatcatcatcctcaacgccctcacggtcatctatgcaagtgatattccggttttgaaagaggtcgaagccctgacagagcctgcggtcttcaacatggtgcggttcgttgttgcagccatccccttcgtaccattcgcgctccgttccttcggtgaccgcagtgtacgctacgcgggactggagctgggagtctgggttagcttagcttacctttctcaagcaattggattgctctcatctgatgctggccgagcatccttcatcacggccttcacgactcacatggttcggagccatcatgtctctgttcggaattggcctgctggaatgtggtggatctcctcccagtgttggcgatattttgaacttcttcagtgccgtgtttttcgggatccatatgcttagaacagaacaaatatcaaggagtacggacaagaagaaatttttagctcttcttggcttcgaggtccttgtggttgctttctcctccgttctctggtttatgttcaaagatggctacgttgataccagcggatccagctttgaatcttggacgttcgggatgctctgggataccacagtttcgtttccttggataccagcattgtacactggggttctttctacggtgttatgcatgtgggcagagatggtggcgatgggcgatgtttcagcaaccgaaactgcagttgtttacgggttggagccagtttggggagctgcttttgcttggttcctccttggtgaaagatgggatgacgctgcatggactggagctgctctcgtattatgtggcagtttgacagttcagctatttgggtcagctcctgagaagtccaagaaagtcaaaaaacgcagcagcaatgctttagaaactccagtgaaacgacgagactacttatcgttgtctcccataccagttgattccgggaagatcataggaaggcaattagaaaggaagaacaaagcagtataggtagcccaactacaaggcaagaagaaaggaaacgctgcgatgataggggcgcgcatgtaccaaatcattgtcctgaggcatcgtctgtttggctccgtcaatggccatatggggatgctgctcgattgtccgcatggagttttttttttcctttgtccgtattgaaaatggtcgtatttggatttctgttgtctcggttgaccgtgctagagtacctcatgcgtattaggaaatgaggcattggtagtggcaactcgaggagaatacttagacacatctactggcgtagtaatgacgttcagtgagataacttagtatgttttgggcactgctaaccgtaaaggttcatgtattaatatagtgggtaaatggttctagagtactgaactgagcataccattgtatagtactgaaataacaaataccacgcatggtattatttggctcccagtcaatagatccaggaatcaggacatgtattgtgttccgttgagattgattttgtggctgtgattttatttttttattttttttttggtcgaaggacataatcttgtattctgctcttgtattatgtaagtctatgcttagttgttt

SEQ ID NO: 90348 - DNA, 3068 bp, Zea Mays
cgcagctccccacttctcatcgccccctttttttaatttgtggccatctttggggtggtgggcggaggatttctaactggatggtgaagtttgtctggcgaaaaggacggctgcgacgaacccgtccatcgatccaacgctgtgcgcgcgttgggggagggacctgccaggccccacctgcagcgacagactattgatagatgccttcctctctgatcacctgatggctgatgccttcgcggccgtcttcgcctgccgctgctactactagttgccttcctcgcttccccgtctcgccccagccgcttcccccctcccctaccctttccttccccactcgcacttcccaaccctggatccaaatcccaagctatcccagaaccgaaaccgaggcgcgcaagccattattagctggctagctaggcctgtagctccgaaatcatgaagcgcgagtaccaagacgccggcgggagtggcggcgacatgggctcctccaaggacaagatgatggcggcggcggcgggagcaggggaacaggaggaggaggacgtggatgagctgctggccgcgctcgggtacaaggtgcgttcgtcggatatggcggacgtcgcgcagaagctggagcagctcgagatggccatggggatgggcggcgtgggcggcgccggcgctaccgctgatgacgggttcgtgtcgcacctcgccacggacaccgtgcactacaatccctccgacctgtcgtcctgggtcgagagcatgctgtccgagctcaacgcgcccccagcgccgctcccgcccgcgacgccggccccaaggctcgcgtccacatcgtccaccgtcacaagtggcgccgccgccggtgctggctacttcgatctcccgcccgccgtggactcgtccagcagtacctacgctctgaagccgatcccctcgccggtggcggcgccgtcggccgacccgtccacggactcggcgcgggagcccaagcggatgaggactggcggcggcagcacgtcgtcctcctcttcctcgtcgtcatccatggatggcggtcgcactaggagctccgtggtcgaagctgcgccgccggcgacgcaagcatccgcggcggccaacgggcccgcggtgccggtggtggtggtggacacgcaggaggccgggatccggctcgtgcacgcgctgctggcgtgcgcggaggccgtgcagcaggagaacttctctgcggcggaggcgctggtcaagcagatccccatgctggcctcgtcgcagggcggtgccatgcgcaaggtcgccgcctacttcggcgaggcgcttgcccgccgcgtgtatcgcttccgcccgccaccggacagctccctcctcgacgccgccttcgccgacctcttgcacgcgcacttctacgagtcctgcccctacctgaagttcgcccacttcaccgcgaaccaggccatcctcgaggccttcgccggctgccgccgcgtccacgtcgtcgacttcggcatcaagcaggggatgcagtggccggctcttctccaggccctcgccctccgccctggcggccccccgtcgttccggctcaccggcgtcgggccgccgcagcccgacgagaccgacgccttgcagcaggtgggctggaaacttgcccagttcgcgcacaccatccgcgtggacttccagtaccgtggcctcgtcgcggccacgctcgccgacctggagccgttcatgctgcaaccggagggcgatgacacggatgacgagcccgaggtgatcgccgtgaactccgtgttcgagctgcaccggcttcttgcgcagcccggtgccctcgagaaggtcctgggcacggtgcgcgcggtgcggccgaggatcgtgaccgtggtcgagcaggaggccaaccacaactccggcacgttcctcgaccgcttcaccgagtcgctgcactactactccaccatgttcgattctctcgagggcgccggcgccggctccggccagtccaccgacgcctccccggccgcggccggcggcacggaccaggtcatgtcggaggtgtacctcggccggcagatctgcaacgtggtggcgtgcgagggcgcggagcgcacggagcgccacgagacgctgggccagtggcgcagccgcctcggcggctccgggttcgcgcccgtgcacctgggctccaatgcctacaagcaggcgagcacgctgctggcgctcttcgccggcggcgacgggtacagggtggaggagaaggacgggtgcctgaccctggggtggcatacgcgcccgctcatcgccacctcggcgtggcgcgtcgccgccgccgccgctccgtgatcagggaggggtggttggggcttctggacgccgatcaaggcacacgtacgtcccctggcatggcgcaccctccctcgagctcgccggcacgggtgaagctagacgtcattgagcgctgaatcgcagttagcgaccgggccaaggttctcgccggcgtgatgagatggaacactttgactcccgcggccggatcggcctgtgttcgttcttgtttccgatctcccttctctttcccgttgcttcgatcccgtcaagtatggtagaccgtagcctattgttatgtttaaatgtcaattattatgtgtaattcctccaagcgccgatatccaataaggacgaaccggattttcgttagctcgacctcgaatgagaattttgtatacaatgcatcctcgttagctatgttcatctgttcgaatgcttgtgccctcatgttttcattccgttcgtcctctacacgaatggtgatcactatgtattgtgaacgagctcagtcatgtaggagctgccagattggaattcgcggcttgctttgcctttgaggagtatgaaaatattatatgtttatctcacaagaactggtaaggtctgtttatttcttttccttgccgtgcccatcctgtaagaaatcctccatggccgatgcggaaacatctcgttgctttgccttgcatgtatcccttcgcctgtgtggccgtcctctgccggggctgttcacgatctaaaaataaaaa

SEQ ID NO: 90349 - DNA, 827 bp, Zea Mays
cccctcccctaccctttccttccccactcgcacttcccaaccctggatccaaatcccaagctatcccagaaccgaaaccgaggcgcgcaagccattattagctggctagctaggcctgtagctccgaaatcatgaagcgcgagtaccaagacgccggcgggagtggcggcgacatgggctcctccaaggacaagatgatggcggcggcggcgggagcaggggaacaggaggaggaggacgtggatgagctgctggccgcgctcgggtacaaggtgcgttcgtcggatatggcggacgtcgcgcagaagctggagcagctcgagatggccatggggatgggcggcgtgggcggcgccggcgctaccgctgatgacgggttcgtgtcgcacctcgccacggacaccgtgcactacaatccctccgacctgtcgtcctgggtcgagagcatgctgtccgagctcaacgcgcccccagcgccgctcccgcccgcgacgccggccccaaggctcgcgtccacatcgtccaccgtcacaagtggcgccgccgccggtgctggctacttcgatctcccgcccgccgtggactcgtcctcctcttcctcgtcgtcatccatggatggcggtcgcactaggagctccgtggtcgaagctgcgccgccggcgacgcaagcatccgcggcggccaacgggcccgcggtgccggtggtggtggtggacacgcaggaggccgggatccggctcgtgcacgcgctgctggcgtgcgcggaggccgtgcagcaggagaacttctctgcggcggaggcgctggtcaagcagatccccatgctg

SEQ ID NO: 90350 - DNA, 2238 bp, Zea Mays
ccctcccctaccctttccttccccactcgcacttcccaaccctggatccaaatcccaagctatcccagaaccgaaaccgaggcgcgcaagccattattagctggctagctaggcctgtagctccgaaatcatgaagcgcgagtaccaagacgccggcgggagtggcggcgacatgggctcctccaaggacaagatgatggcggcggcggcgggagcaggggaacaggaggaggaggacgtggatgagctgctggccgcgctcgggtacaaggtgcgttcgtcggatatggcggacgtcgcgcagaagctggagcagctcgagatggccatggggatgggcggcgtgggcggcgccggcgctaccgctgatgacgggttcgtgtcgcacctcgccacggacaccgtgcactacaatccctccgacctgtcgtcctgggtcgagagcatgctgtccgagctcaacgcgcccccagcgccgctcccgcccgcgacgccggccccaaggctcgcgtccacggactcggcgcgggagcccaagcggatgaggactggcggcggcagcacgtcgtcctcctcttcctcgtcgtcatccatggatggcggtcgcactaggagctccgtggtcgaagctgcgccgccggcgacgcaagcatccgcggcggccaacgggcccgcggtgccggtggtggtggtggacacgcaggaggccgggatccggctcgtgcacgcgctgctggcgtgcgcggaggccgtgcagcaggagaacttctctgcggcggaggcgctggtcaagcagatccccatgctggcctcgtcgcagggcggtgccatgcgcaaggtcgccgcctacttcggcgaggcgcttgcccgccgcgtgtatcgcttccgcccgccaccggacagctccctcctcgacgccgccttcgccgacctcttgcacgcgcacttctacgagtcctgcccctacctgaagttcgcccacttcaccgcgaaccaggccatcctcgaggccttcgccggctgccgccgcgtccacgtcgtcgacttcggcatcaagcaggggatgcagtggccggctcttctccaggccctcgccctccgccctggcggccccccgtcgttccggctcaccggcgtcgggccgccgcagcccgacgagaccgacgccttgcagcaggtgggctggaaacttgcccagttcgcgcacaccatccgcgtggacttccagtaccgtggcctcgtcgcggccacgctcgccgacctggagccgttcatgctgcaaccggagggcgatgacacggatgacgagcccgaggtgatcgccgtgaactccgtgttcgagctgcaccggcttcttgcgcagcccggtgccctcgagaaggtcctgggcacggtgcgcgcggtgcggccgaggatcgtgaccgtggtcgagcaggaggccaaccacaactccggcacgttcctcgaccgcttcaccgagtcgctgcactactactccaccatgttcgattctctcgagggcgccggcgccggctccggccagtccaccgacgcctccccggccgcggccggcggcacggaccaggtcatgtcggaggtgtacctcggccggcagatctgcaacgtggtggcgtgcgagggcgcggagcgcacggagcgccacgagacgctgggccagtggcgcagccgcctcggcggctccgggttcgcgcccgtgcacctgggctccaatgcctacaagcaggcgagcacgctgctggcgctcttcgccggcggcgacgggtacagggtggaggagaaggacgggtgcctgaccctggggtggcatacgcgcccgctcatcgccacctcggcgtggcgcgtcgccgccgccgccgctccgtgatcagggaggggtggttggggcttctggacgccgatcaaggcacacgtacgtcccctggcatggcgcaccctccctcgagctcgccggcacgggtgaagctagacgtcattgagcgctgaatcgcagttagcgaccgggccaaggttctcgccggcgtgatgagatggaacactttgactcccgcggccggatcggcctgtgttcgttcttgtttccgatctcccttctctttcccgttgcttcgatcccgtcaagtatggtagaccgtagcctattgttatgtttaaatgtcaattattatgtgtaattcctccaagcgccgatatccaataaggacgaaccggattttcgtt

SEQ ID NO: 90351 - DNA, 452 bp, Zea Mays
ttcttcggcgcagtatctcctaggtctgctagaaagcaatcgcccgcggtattatccatccaccacgctgcatctgcttctcacgccgcctcgccttcctcttccacccctcgccgtccgtcgtcctcagcgcttgtacgcttgcctcaaaacccctggcgccgtgctaaaaccctagccctcgaattccttcccctgcccgcgcggagcagacgagcctgagcccgtcctcctcgtccatggcgtcctcaggggccgccgctaacctctgggtactgcttggtctcggcatcgcgggcgttctcctggcggcgcggcgactgaggcgccctgcgcgccccgatcacggcgccttcgtcgcccgcctcgagctcctcccgccgccccagcctccgccgccgcaggcgccccacccgctcaccggactctgcttcgccatcgctgacgcgtaa

SEQ ID NO: 90352 - DNA, 561 bp, Zea Mays
atgtccctgcgcgcggcgcggctacggcttgtgcagtaccctgccggcgacgacggcggcctctatgacgagcgagatcacgtcgatgacctcgtcgatcatgcacttgttcccgttgaacgtggacgtgccctcccgcagcctggccaggcagtccagcagggcctcgttgcaagccgtgctcaggtagtccatctttgcctggacgcagttgtcgtggtgcatgcagcaggcgtccagcgcgtcgcacggcggctcgccggggcagccgctgtacaggatgccgcagtacttgccgtaccgcaggaacggcggcgtcgtgcagtggtccgactcgcacgtgcggctgcacgcctgctgcttgctcaccccgtcgccggcggactggatgccgatgttgagcgcggcggcgggcggcgagaagagggccgcgcagacaaggatgccgacgaccaccgccgggagtcgccaggaactgccgcgctccatcctcgcgggagctctagaacgaagtctcttccaccacgcgcgtgcgcgctctctctctctctcggtcgctag

SEQ ID NO: 90353 - DNA, 627 bp, Zea Mays
atggcgacacatgaggcacgaggggaagatgttgtcttcgtagccaatgattggcacactgctattttgccatgttatctgaatagcatgtataagccaaatggaattttattgatggggagaaagcttaactggatgaaggcagagatcattgagtgtgatctggttctaacagtcagtccacattatgtcaaggaactcacatctggcccagataagggtgttgagttggatggtgtccttcgcgcaaagcctctagaaattggaatcgtaaatggcatggatgtttatgaatgggatccttcaacagataagtacatcagcatgaaatatgatgcaacaacggtaactgaagcaaggtctctcaataaagagaggttgcaagccgaagtcggattgcctgtggactccagcatccctgttatagttttcgtggggcgtctcgaagaacagaaagggtccgacatactcattgtagcaattccagagttcgtgggcgagaatgtccagataattgttcttatccccatctgttcatccattggaggacttgtcgacacggttgaggagggtgtcaccggattccacatgggttcttgcaatgtcgagatatacccagtttcttag

SEQ ID NO: 90354 - DNA, 1363 bp, Zea Mays
caggtcgcggggccttcatggcagatgacgtggattcgcggcgggccgtcatctctcgattcacagaacatcgcagcggcaatcgatgacaggtatgttccaatgtttggggagaaagagtatgatccgaactgccagtacatgtatgttccaatgagacaccatatggtttgatgaaatttctttagttcagtaaggattctcagttgcttccaaagctactgacactgcaggtaagtagcatagtttgatctaatctgtagtactgtaatcgctctccatatttttcacctgtgtttttgcagaacttgtataatttgttgtgccaaaattttgattctagattggcagaatgctgccatcatgagagaatcagcttgctggcttatagcccaatggcaatgggtatactttcaggaaagtatcacttatctgataactgtggtccactagacgcaagaatgaatcttttcaaaggtactatgttctgaaatttttaaaaggtttatactctagttccaatcctctctttcattttagtttggttccactgacgttagcgctcatcctcctttgtagggagatactctaaaggtgaatcccggtacaaactgcatttgtaatgagacttttattatggctatgtatgagatattgtctcttattagtactggatgatgagatgtgtcttattatgactatggatgagacttttgtgatgtaattgatgagactatggatgagacttttatgatgtaattgatgagactatggatgagacttttgtgatgtaattgatgagactatggatttaaatattgttatgtgattgagtgtgagatgttttatgagaaaatatgttgtgctatatagctgttgatatatttgttatgttgtggaatgtggtgtaaaataaaaataaacaacatttgtaatgctggtcaaattaacttcctagaggcttattaagccgtaggaagttagccagctaacttcctaggggctacagtcagccgtaggaagttagtcagctgacggcactgacggcgtgaagctactaacttccgagaatctactaacttccgaaaggcttttttggctgtaggaagttagctaacttcctagagggctctaggaagttaagctaacttccgacaaaaaaattccgagagccaaacttccgacgggatggcttaacttccgagagtttagctaacttcctagagtttaggcctaacttcctagagtttaggctctaggaagtttactattttggtgtagtatatatcataaaatggtccttacgagtctagctgcatggctgttgcagcgatcctaaatttatggaggaaataaagcattt

SEQ ID NO: 90355 - DNA, 360 bp, Zea Mays
atggctcagcagagggaacgccgcgagctggagctagaagaaggagcacggacgggcggggcctcggccgccgactgggagaagcagagaaagaagctgctatgctgggcagagaggagcggccggcgcgccatgggatcaagggaaaagcactacggcgagcttgagagagagaagcagaaagtgagcgccgccaagagaagggcacgcgcgccatcagagatccggcccgggtgctggacgccggcaggggaggagcttggactgggcgcggcaggggcgagctccatggcacagacaagatccaagcagaggccggacttgggcagctgttggacgagcggacagggagcgccgtga

SEQ ID NO: 90356 - DNA, 710 bp, Zea Mays
atctggccattctctctccgactctcccccaccccagccaccgccaccactgtcatctcctctcctcccttttttcgggtattcttttccccacttcttcgcgctcgctaggcgctccctccattcctagctgaacgtgaagacggacaactagacgagcaatatgagagcggttgaccagaggcggtgaagtgagatgggtaagtcccaggattttagacgactgtcaagtttagtcatccattcattcccttgccaaatcaattcggggaatttagtggcttatgtaattcatattcctctagtactgcggttcggcaataccagcattgttgcaagtgaaagaaaaaacattcgtcttcaatgggacggttgacgccgccgcggcggagtctagaggagccaaccctgtggcggaattccggggcaaggactgcagtgccgccgacctctttcactccttcgtcgaccaagacaaccttgttttttatgttttttggttactttactctgacttgcctatgaatctgaccatctggtgcagtgtgtcaattaatttcaatgcatcaaaaatttgcaacacgccatgtgtttgttttcatattcttaggaccaaagggtctcctttttgcagcatgtactttcgtatcgatatgtaagtgagtcttctaatgtcaaagtaaaactcaattccaggttcttgtgttgga

SEQ ID NO: 90357 - DNA, 249 bp, Zea Mays
atggggacgagcgcggcagggaacaacgccgacagaggaggagctcggccggacgccatggggcgagcagagagctcggagcggagctgggacgacgcgcagaggaggagccggctgcgcgcggctgccaagacaagcgcagaggaaactccgaccgggcgccggaaagaagaggccgccggggcgaagctccatggtcaggagctgggggcgaactcgagcagaaggaagggagcaggcacggcgtaa

SEQ ID NO: 90358 - DNA, 79 bp, Zea Mays
tattatcagatataagaaatcattatgtgtacatcaaaataaacatatttgtacaattagtgatctcttaacgatgtta

SEQ ID NO: 90359 - DNA, 885 bp, Zea Mays
tatacaaacgcgtacacatgcctttattgttctccacatcaacacaaactcatacacgtcagtacgtagtgatcgagtacaccatcattcgatttagttctctatagtgccggccggtctccacacacctaacaccgcctaccagcacgcaggttaaggacgcgacgcttttactttggagagggaaataaaaataataaaaagctggccaccgatcgagcccgtgtgtccggcggtcgtcgtcgccggcgcggctgatcggccgggggcctcacgcggcggtgacagcgatcttcatgccggcctggcagtggcctgggaagctgcagatgaagtagttggcgccgcgcttcagcgtgacgcggtcgttcccggtggtgagcgccctcacgcccttgggcgcgctgcaggacttgtaccccgccgcgctcacgggcaccacgttgtgcgccttggcgttgtacctgaacgctgcacgacgaagaacgcgtgcacacgcaaaacagcagccatccatggtatggaccttaatttagggaacgaagctggaggggccgtgacactgacatgcatgaacaaagagctagtagcactgaccgagcacgtcgccggcgcggaaccgcttgcccttgggccagttggcggtgttgaagctccacccgccgcggtcgccgaccgtgtacaccgccgactcggccaactcgccgtggaggagcacgcagaggaggaccagcgcaagcgcggcggcggcgccgctgccacgagcactgccacttccctgagccgccatggatgctgctctacggtacgatgccgtctctcacgtacacaaggggccgggctagcactggcttggagcgaagtgatgagagtgagcagagctgt

SEQ ID NO: 90360 - DNA, 431 bp, Zea Mays
acccagggctcctggtctcactctcactgctggaatgagtcccttttgctttctgctggcagctgttgtgttcctgctgctattacacagtaaagtccggcatgcagtaggagttcaggtaccacggcaaattgtctagcatccgcatccacttgagaagtctgcttgttcttgttcttagggaaaacaagtcaactcaacacaaggaaaatgcattttgaatgcgtggactggtcctgacggttgatggttatgtgaagttttgcatttggagggtgctgggaggctgcttgatgaaatgcgtgagagaagagaacttgctatgtcgggcatgcacattgttgattgaccgctaatgcagaggatgaaagaaagggaacatggaagatgcaaattgtagtttcataatttcataccagggcgcgtgttct

SEQ ID NO: 90361 - DNA, 1471 bp, Zea Mays
gcagccagggctcgcctcgggggaccgcgtgttgctagcgagctcggtgctgccggctgccgccccagtgcgaggcgatggggaggaggctggacgtgctgctggggcggacgacgaagcagacggcgcggctcaagtcgctgctggggctggcggcgacgcgcctcggcgtggtgcggggccaccgccaggtgcggtgcgggcaggcgcgcggggacgtggagcagcttctccgcctcggccacgcggaccgcgcgctggcccgcgccgagcacgtcgtgcgggagcagaacgcgctcgacgtcctcgccgagctcgaggcctgctgcaacctcatcgccgagcgggccgcgctcgtcgacgacgcgcacaggggggagtgccccgaggagctgcgggaggcggcggcggggctggtatacgccgccgccaggtgcggggaccttccggagctgcaagaggtccgggccatcctcgccgccaagttcggcagggagttcgtctccgccgcgtccaacctccgcagcgggtgcggggtcaaccccaaggtgaggcccggcggcgacccgcgtactctggctggctggccgactgacttctcaaccttggattctcgactaaacttggattctcgacagatcgtgcagaagctgtcgaccaagcagccgagcctggagagccgacagctggtgctacaggagatcgccgccgacaaagggatcgccgtgcgcatctacgagccgcctcctccctacgaggactcggggagctccaaccacagccacaggaagacggagcacgatggcgagaggatcagtaggacgccaccagttgatggccgggacgaagacatctccggccactcggcgcagaggtacaaggacgtggaagcggcagctcaggccgcgttcgagtcggccgcctcggcagccgccgccgcgaaggcggccatggagctctcgcgtggggagcccagggggcccggtgacaggaggagggcagggaggacgcaaatggatgatcctgagatcgagaaacaagatgaggtgcttcatggaaacaaacccgagaagattgggcatggccggaattacagttcagatgttgagatcacgccggaggacgacgaggcaaaccacggcaacgttgcagtggacgaaccgaaacagcgggagcctgccaggggaaagccggcatcggtcagaacaaagtggggattttagcggcatccagatcgcaacggaggagatggtttcttcgtcttgtcaatatattggcatggaagttgttttttttcactgtagtagtatgtaattaacgacggttaccaaaaaaacacatgagcgatttgatttattgccaacagtttgcacactagtacactatgcctgtactaatgctatgttctgttaatgtgtagcgttaattgtagtacatgttctttggaggaaaaatattgatgttgcaattc

SEQ ID NO: 90362 - DNA, 1410 bp, Zea Mays
gcagccagggctcgcctcgggggaccgcgtgttgctagcgagctcggtgctgccggctgccgccccagtgcgaggcgatggggaggaggctggacgtgctgctggggcggacgacgaagcagacggcgcggctcaagtcgctgctggggctggcggcgacgcgcctcggcgtggtgcggggccaccgccaggtgcggtgcgggcaggcgcgcggggacgtggagcagcttctccgcctcggccacgcggaccgcgcgctggcccgcgccgagcacgtcgtgcgggagcagaacgcgctcgacgtcctcgccgagctcgaggcctgctgcaacctcatcgccgagcgggccgcgctcgtcgacgacgcgcacaggggggagtgccccgaggagctgcgggaggcggcggcggggctggtatacgccgccgccaggtgcggggaccttccggagctgcaagaggtccgggccatcctcgccgccaagttcggcagggagttcgtctccgccgcgtccaacctccgcagcgggtgcggggtcaaccccaagatcgtgcagaagctgtcgaccaagcagccgagcctggagagccgacagctggtgctacaggagatcgccgccgacaaagggatcgccgtgcgcatctacgagccgcctcctccctacgaggactcggggagctccaaccacagccacaggaagacggagcacgatggcgagaggatcagtaggacgccaccagttgatggccgggacgaagacatctccggccactcggcgcagaggtacaaggacgtggaagcggcagctcaggccgcgttcgagtcggccgcctcggcagccgccgccgcgaaggcggccatggagctctcgcgtggggagcccagggggcccggtgacaggaggagggcagggaggacgcaaatggatgatcctgagatcgagaaacaagatgaggtgcttcatggaaacaaacccgagaagattgggcatggccggaattacagttcagatgttgagatcacgccggaggacgacgaggcaaaccacggcaacgttgcagtggacgaaccgaaacagcgggagcctgccaggggaaagccggcatcggtcagaacaaagtggggattttagcggcatccagatcgcaacggaggagatggtttcttcgtcttgtcaatatattggcatggaagttgttttttttcactgtagtagtatgtaattaacgacggttaccaaaaaaacacatgagcgatttgatttattgccaacagtttgcacactagtacactatgcctgtactaatgctatgttctgttaatgtgtagcgttaattgtagtacatgttctttggaggaaaaatattgatgttgcaattcaaatgatctgcttggaaaggatgagattg

SEQ ID NO: 90363 - DNA, 375 bp, Zea Mays
atggcagccaggcaggcgagctgcgagcagcggacagcggagcacgggagcaggcagcacgcagcagaggcagccgggcaggcgagcagccagctgcccagcgccgagcaggcggctcgccgaacgcccgaggcccgagcagccgaggtgctgcagcctgcaggcgagcagccagcggcccaacacccagcaggcggctcgccgagcgcccaaggcccgagcggccgagctgctgcagcctgcaggcctgtagtgcagcgcggtgcgccggcagaagcgctgaaggactggactactggagcgttcgagcggaatagcgccttagcggactgcggctgcggcgagcgacaggcggacgacgcttacggttgctga

SEQ ID NO: 90364 - DNA, 1924 bp, Zea Mays
cacactgttcctggttttgttaagctctcgcttaacctaaccgccgggagcagaagtgttcgacgaaatgacgaacgccggggcggcgacaggcgccgcgctaggcgcgcgcacggcgcggtcctgcgatagctgcatgcggcggagggcgcgctggcactgccccgcggacaacgcgttcctgtgccagtcctgcgacgtctccgtccactcggcgaacccgctcgcgcggcgccaccaccgcgtccgcctcccctcggcgtcctgctcgtccccaccgcgcgatcccgacgcgccgacgtggctccacggcctcaagcgacggccgcgcacgccgcggtccaagcccgggggaagcaataagcatgaggcggcgcccagctctatcgccgcggccgcgtcggcagcggtccccgacctcgaggcggaggcggaggcggaggcggaggagtccggctccggtatcctgggcgataacgacgacgaccacgggttccaggacgacgacgagaaccttctgtactgcgtgccggtgttcgatcctatgctcgccgagttctacaaccccgtggccgacgagggggagcagaagccggcctgcctgatgctgcctctcgtggaaacatcgccggagttcgcctccggcggcttggcagaggcggacgggctctccggcttcgacgtcccggacatggatctcgctagcttcgcggcggacatggagagcctcctcatgggagtcgacgacgggtttgacgatctgggtttcttggacgaacagaagcctcaggtgaacgcggacgtggacttggaggccatggcggcgccggagcctgaacgagaggacaagaaaaggaagcgggacggctttgattatctgggtttcttggacgaagagaagccacaggtgaacgcggacgtagacttggaggccatggtggcgccggagcctgaacgagaggacaagaaaaggaagcgaacagatatgatactcaagctgaactacgagggcgtcatcgcctcgtgggttcgtgacggcggatcaccgtggtaccacggcgagcgtcctcacctcgacgatccttacgagctatggttggagttcccggcaacggggagccggggacttttcggcggcaccatgacagcggtgaccggcggcgagcgtgaggcacgggtgtcgcggtacagggagaagcggcggaggcggctgttcgccaagaagatccggtacgaggtgcgcaagctcaacgccgagaaacggccgcggatgaagggccggttcgtgaagcgcaccacgctcccgccgctgccgaggccgccaccgccgtcacagcagcaacagaagaagaagcaactgccacgctcattgccacacgtgggcatggtgctcgcgccacctccaggagcggacgggcgcttccggttttgagtctttgagcagcgcacagggccgcggcgcgctcgcgcacatcttcaggctcgcgatcagcaccaatggtgtgtttgtgctgatgaatgttcgataaaatgagttaaataagcaccattcagctaacattcaatggtaaaatttagaaccaacattgaactaatattgaagcaaaatacaaagccaattcagctatcattcaagcaatactcaaagccaacattcagctatacatcggtgcatcattctcgctctggtagcatgtcctttctactctagtattaaatttgggatgacgaattagcttgggctccccacaagatgctcactactttacgcctcaaatcagtggcagacgcaagacgagaattcatgggacccaaaaacccacatgacaaatcaagcaaaagatcgtaaaaaccagtgttgcatttaattcaagttatatatcaaaacacgatataaattcaaagaaaaaataaatgaacaaaa

SEQ ID NO: 90365 - DNA, 222 bp, Zea Mays
atggcacgacagtccctctttggtgcggcgcagcggcgagcatcgcgtggcgaggtaggctatgatatgtttctgacacattttttgctaatggcttctaggaaacgacacaagattggtgaggtgatcgccaaatcttgcctggagaaagggatctccaaagttgtcctagatcgaggcagattcctctaccatggcataaatgatagaactcggtgctag

SEQ ID NO: 90366 - DNA, 593 bp, Zea Mays
ctacatccgctccaccctactggctagtccttccaaggtggatttgatggaacagcttgcaaggcatttcatgaggcccctcactaaggaacaaatggaggcaattatggagctggcaattcagggaaaggaaaaggaagggaccaagaagaagggcagcaaggtgacacctctcaaggctcctatcatagagactgctgcgaggatctgagtggttttaggaattgtgtgggtcggtctggtgcagaatgttatctcgcatgtgtaatagtctgtgggtctcccaactgcttttgatgactgctttgggtagaaggttgtgggattgtcagcggtgttttttcatttggcttgctctgtcggtgtttcagtctgtcgttatttcagacgtgggttgcatgttgttcccagctggtagcgtgctgctgacgctggttgtctggtcaggtcctgtttcttcatcagtgttcctcttgtgtggctctacttggttatgtaggggaactacttttgattaatgaatgccaactgttgtattctgtcatggaatgtgagggggctaaatgacccagctaaaagggcaagtgtgaaac

SEQ ID NO: 90367 - DNA, 328 bp, Zea Mays
ggtccttcagtccttgcaatttcctcccgcactcccggttctcccgcacgctcccctctgcctgtccgtgtcgcttgcttcgcttctgcaaacctcggccccggcctcggcatccgcggcgtcgccggcgtcgtcgtcgtcgtctagatccgacaagaagaagactaaatcggagactcctaagaagcgcgacaagctcttcggttccgcggccaccgcacccaagagcgccgcatcgtcggcctcgtcaagcccggcgggtgatgggaggaaggggtccgtgccgcatcatagggatgcgggcgtcgggggcgggggtggcgcgtcg

SEQ ID NO: 90368 - DNA, 1839 bp, Zea Mays
atggtgttcaaggggcgcttcttctcgtcgcgacacaagtcatcggagtcatcttccagcccagacggcagcaacagcccacgcacgcctacctcggccccggcctcggcatccgcggcgtcgccggcgtcgtcgtcgtcgtctagatccgacaagaagaagactaaatcggagactcctaagaagcgcgacaagctcttcggttccgcggccaccgcacccaagagcgccgcatcgtcggcctcgtcaagcccggcgggtgatgggaggaaggggtccgtgccgcatcatagggatgcgggcgtcgggggcgggggtggcgcgtcggcggccgcgctgtcgccgatcctggcgtcctcgctggggctcaaccggatcaagacgagatccgggccgctgccgcaggagggccaacgcatggctgccgtgatcgggagcagcaacctctcgcgcgggcagggccaagcggaaccgtcggctgcctcagccggcgtcggcggtagaaagggcgtcacctcctgggcggatactagtagtagcagccgcggaaaagggaagacgaccgagctgccgatgcgaagtacagctgggacgagcttgggaccagtagggaagagcgctgtaaaagctaaacctagtgcacagcggaaccattctggagatttgaggacacctactcacatacctgaggctgcgtgtgcatatgatccgtgtgagacaccaaaggaatccgagtccccacgctttaaagccattatgcaggctactagtgcaccgaggaagagactccctgcagatataaaaagtttttcacacgagctgaactccaaaggggtgcgcccatttccttttttgaaacctcggggcatttacaacttaaaggaggtaataaaagttatccatgtgagatttgagaaggcaaaggaagaggtaaattcagatttggcagtttttgcaggagacttggttagcgtaatggaaaagtatgcagactctcatcctgagtggaaagatgccctggaggacttgctaatacttgcacgtacctgctgtgtcatgacacctggggaattctggcttcagtgtgaaggtatagtgcaagatttggatgaccatcgtcaggaactctcaatgggtgtgctgaagaaactatacacccggatgctttttatccttacaagatgcacaaggctgctccagttccacaaagaaagtggttttgctgaggatgaagttgttattgatcagcgtgataagattatacaatctgcagataggcagattttaactcaatcaggtgtgggtgacacaacatccagagccagtaaaagtgaggcaagaaaatcatacagtcaggagcagcataatttgaaatggaagcgtagccaggagataaagcctgttaaccttcttccaccacttgatacggatgttaagaaagtggctgattctccaaccaaagaacgaatatcttcctggaaaccttttccatctcctgttacgaaggtcccaaaagaatctactcctactaaattggaatcacctaataagaaaacagatgcacactctacagttagtagccatgttgaattaagcagtccagttgaatctttaccacaacaacagcttcctgtcaagcatcaacataaaacttcatggggccactggtctgaccagccaaatatttctgaagagggttcaataatgtgtcgcatatgtgaagagtatgttccaacacagtatgtagaagaccattcaagggtctgtgcaattgctgacaggtgcgataaaaaaggtgttagtgttgatgaacgcttaatcagagttgcggaaatgcta

SEQ ID NO: 90369 - DNA, 1800 bp, Zea Mays
tgaaacctattagccgtggagcatttggacgtgttttcttggccaagaaaagaactacaggagatctttttgctataaaggttcttaggaaggcagatatgattcggaaaaatgctgtcgagagtatattggctgaacgtgatatcttgattacagtcaggaacccttttgtggtacgctttttctattcgtttacctcacgggagaatttgtatctggtcatggagtacctgaatggaggggacctttactcattactgaggaatttagggtgcctggatgaagacgttgctcgtgtatatcttgcagaagttgtactagctttggaatatttgcactctatgcacatagtccatagggatctaaagcctgacaacttgttgatagcccatgatggacatattaagttgacagattttgggttgtccaaggttggtttgatcaacagcacagatctgtctggtcctgctgttagtggggcttcactgtatggagatgatgagcctcagatgaatgagctcgaacaaatggatcaccgagcacggagacaaaatcgttctgctgttggaactcctgattatttagcaccagaaatccttttggggacaggacatggttgcagtgcagattggtggtctgttggtgtcattctgtttgagctcattgttggcatacctccattcaatgcagaacaccccgaggcaatttttgaaaatattatgaatcgcaaaataccttggccacatgtcccagaagagatgagttttgatgcacaagatttaattgacagattattgacagaagatcctcatcaacgactaggagcaaatggtgcctcagaggttaaacaacatccatttttcaaagacattagctgggatacccttgctaggcagaaggctgcctttgttccttcctccgatagtgcatttgatactagctacttcaccagtcgctattcttggaatcaatcagatgaaaacatatatgaagcatatgagttagaggactccagtgataatggaagccttagtggaagcagtagttgtgtgagtaaccaagatgacatgggggaggacagcactggcctcaatgagtttgaatctagtgcaaatgtcaattattctttcagcaacttctcgttcaagaatctatcacaacttgcttccatcaactacgatctgctcaccaaaggattgaaggatgatccaccgccaagaacagaaatgtagcagttaatctaaatttggatggactcatttgagtactcagacagtctacaaggtgctcgtgggatgtaggtcttgtacatatcaaagtgtgaggcatggtctgttcctattgaggctgttcctacatctcgcggatccgagtacagttttggtgttgccttgttttcatgactattgccatgccatcatcagtgaaatcacccttgaccaaatttggcattcgacctaggagcgctgtctttttggttcgtctttcctttttttttagtcctattatgagccttgggtttacggagattggtcaaggttactgtattcagaatacagctcctgaagacgtaggcgggtttcagagaattgccattctggcatacagttgactctggttcgttaagctggtagcccgctggacttcctgcggccagaactgtccacaacattttgatggccgtggaatataacattttgcttaatgtgtccagtgtccaacagaatcagggacattttaagaagaatattaaccgattgacattataaggatatcaaatggaagcggcgttttatgcaa

SEQ ID NO: 90370 - DNA, 1185 bp, Zea Mays
cccagtctcagatccgcgtcgtcgcggcccctcccctccacccccgagtccccgtgcgctgcgcccccaattcccacgcgcccagacacgccgagaggggagaggaagcgacagccagcagccgaggcggccagcgcaggcatggccactcccacttccagtggcgacggctcgcccccgggctcctctgacctcgtgcccccctcctaccccgagatgatcgtcgccgccctcgccgcgctcgccgaggagaacggctccagccaggccgccatcgcgcgccgcatcgaggcggaggcccgcggcgacctgccggcctcgcacccggcgctcgtcgcagcccacctctcgcgcatgtccgccgccggggagctcgtcgccgttgcggggggaaagtacgcgctgccgccgccggtcccaccgccgccggagtcaccggctgacgacgaagaagacgactacgccgacgacgaagaggaggaggaggaggctccggagccggagcctctgccgcagccgcccgctaagcgcgggcgcgggaggcccccgaagccgcggcccacgggcttccccgccggcgtgcccggagctgctggcccgggccccatcggcgtccccggagccgccgccgccgccgccgcgccgcgccggcgcggccgcccgcccaagcctcgggacccgcacgcgccgcccaagattccgcgcccgcgtggccggccgcgcaagaacccgctcccggaggggatggccccgcggccgcgccccggcgcaccagcgtcggccaaggcggcgcgcccgcagttcgccgaggtcggcttcgtctgatgcggggaggtctcgcccgccggccagccggccagggggcggcggcgagctggcgcaagctaacattttgcccctgtgttccagctcttgtctgtttggtgtgggtttcgtctcagttcgtgtgttactgtctaatcccggggagcgtgtaggggcaggagtccgagtggaggcagcttcggcggcggtggccggcggtgtgtcagtggttcgtagtatttctctaccttacgtttgggggtggtggtggccggagtggtgttgctccggcgctgtattctgtgtctccttgtcgcgctcgcgcaatgcaatgcagtagtctgatcgttccatttgctagtcttgtcttgtgattcatgg

SEQ ID NO: 90371 - DNA, 561 bp, Zea Mays
acttcatatggttcagtgtagtgtaaatgaacacaccattctcatcccaggcaccacttttcacacggatggtttcatgcagtgtgcacttatggacaagcttcttgctagctataaccactgcatgcttgctcagtagtgccacagattccatgtcactagaccaaacaacatatttgatagcaggtgtttggagctcaccaagaactaacctttgctgaagatcaaagatggccaccctgtcttcacctttgcacagcaggttaccggtcccagcataatatattgcatcagtcgcaatgggaagggggcttttcttcaaaatttcattcttaagattcttcaccaaaacttgattgctactcttctcaaggactgcaaacctgttgcgcgctacaaaaacagcagaaccaccagctcctttctttgcctcttgcaagtaatcagacctgccagcagaatccttgggaacaatgtagagttcatatgaacccccatcagcatcagagcaaatcaagacagcattctcagttgggctgtaggacagcgtcctgggtgatt

SEQ ID NO: 90372 - DNA, 1485 bp, Zea Mays
caacactgcagttcgcaccctgcgctcggcataaaatagagccgttctgttacctttcttctcccattcaaacttcacatagagccgttgctcagcactcgcgacccactaccaatcctccaagcacaacaaccaatctttgcaagccgtccaaagacgccgcagccgccgccgccgacgccatggggaaactcggagccaagtccgactacgagagtctccgcgacgcccgcatctccgagaacatggcccggatggagatgctcggccttctccgctgcgcgggggagctcagcgacatcgcctccgcctccagccaccgcgcggcagggagcgcgacgcctcggaagacccccaggccacgggtgacgagcatgaccccgctccgccgctccggccgcctcctcgccgcgacgccgacccgcccgaccggatccgcgtcgacgcaccgctgttccactcggctgaatggacagggcacaggggttctgagtaagttgacggcggcgggatcggaggatgaggatgatacatgggaagatgataaggaggggaagtgggcggtggcggtggccaaggagagggtacaggcgctgcaggagaggcggtgcgacagcagggggaggggcggcgtgtacgactctgttcttgggatctgctgccatttctgcaggcagaagaaattgtgcggcgaggaggactgcaagcgctgcggggaaggagacctgaagcagccatgcttaggaaagacggagtgctcatcttgccattcttctaatgggatactctgccgtggttgcctgaaagttaggtacggcgaagagatggaagaggtgcggaagaacaagaactggctgtgccctcactgcgttgaggagaagggtatcaagaaattctggatatgcaacagctccttctgcttgaagaagcggaagataccaccgactgggattgccatatataatgcaagggagcaaggatacgagtcagttgcgcaccttctgatggacaggctgaagcgacaagctttctgatgacgactggtgtaatggtgttggcacgttcacttctacagcgacgatgatgacatagagattgtagtggcagtctgttgtctgacgacgtatggttttgcatgtttcacttctgcagtggcttagtgatgatggtagattggtagaggttatagcgagagtccgtttgtctggcagttccgatagtaggcatcttagcctctaggagaaaatgtttctgttgaaatgagttagactttttggcccaagaagaatgtgaagctaggaactctcggtagtctgatgtttcagagaacaacctcagcggccttctgacttctgagtggcagcatgtctgtttattgtaaccacattttgttgagggtcggggcaaccatggtgcacatgcacagtctatttattttctggatttgaatccagctggctaagaggtgtttgatgttaggattta

SEQ ID NO: 90373 - DNA, 1416 bp, Zea Mays
attcaaacttcacatagagccgttgctcagcactcgcgacccactaccaatcctccaagcacaacaaccaatctttgcaagccgtccaaagacgccgcagccgccgccgccgacgccatggggaaactcggagccaagtccgactacgagagtctccgcgacgcccgcatctccgagaacatggcccggatggagatgctcggccttctccgctgcgcgggggagctcagcgacatcgcctccgcctccagccaccgcgcggcagggagcgcgacgcctcggaagacccccaggccacgggtgacgagcatgaccccgctccgccgctccggccgcctcctcgccgcgacgccgacccgcccgaccggatccgcgtcgacgcaccgctgttccactcggctgaatggacagggcacaggggttctgagtaagttgacggcggcgggatcggaggatgaggatgatacatgggaagatgataaggaggggaagtgggcggtggcggtggccaaggagagggtacaggcgctgcaggagaggcggtgcgacagcagggggaggggcggcgtgtacgactctgttcttgggatctgctgccatttctgcaggcagaagaaattgtgcggcgaggaggactgcaagcgctgcggggaaggagacctgaagcagccatgcttaggaaagacggagtgctcatcttgccattcttctaatgggatactctgccgtggttgcctgaaagttaggtacggcgaagagatggaagaggtgcggaagaacaagaactggctgtgccctcactgcgttgaggagaagggtatcaagaaattctggatatgcaacagctccttctgcttgaagaagcggaagataccaccgactgggattgccatatataatgggagcaaggatacgagtcagttgcgcaccttctgatggacaggctgaagcgacaagctttctgatgacgactggtgtaatggtgttggcacgttcacttctacagcgacgatgatgacatagagattgtagtggcagtctgttgtctgacgacgtatggttttgcatgtttcacttctgcagtggcttagtgatgatggtagattggtagaggttatagcgagagtccgtttgtctggcagttccgatagtaggcatcttagcctctaggagaaaatgtttctgttgaaatgagttagactttttggcccaagaagaatgtgaagctaggaactctcggtagtctgatgtttcagagaacaacctcagcggccttctgacttctgagtggcagcatgtctgtttattgtaaccacattttgttgagggtcggggcaaccatggtgcacatgcacagtctatttattttctggatttgaatccagctggctaagaggtgtttgatgttaggattta

SEQ ID NO: 90374 - DNA, 1518 bp, Zea Mays
attcaaacttcacatagagccgttgctcagcactcgcgacccactaccaatcctccaagcacaacaaccaatctttgcaagccgtccaaagacgccgcagccgccgccgccgacgccatggggaaactcggagccaagtccgactacgagagtctccgcgacgcccgcatctccgagaacatggcccggatggagatgctcggccttctccgctgcgcgggggagctcagcgacatcgcctccgcctccagccaccgcgcggcagggagcgcgacgcctcggaagacccccaggccacgggtgacgagcatgaccccgctccgccgctccggccgcctcctcgccgcgacgccgacccgcccgaccggatccgcgtcgacgcaccgctgttccactcggctgaatggacagggcacaggttgaagcattgaatgctctcttccgtggatcgagtcgtgttatatgtgacggccgacgggaaacagttcaagcaagttcctttttattttctggcaggggttctgagtaagttgacggcggcgggatcggaggatgaggatgatacatgggaagatgataaggaggggaagtgggcggtggcggtggccaaggagagggtacaggcgctgcaggagaggcggtgcgacagcagggggaggggcggcgtgtacgactctgttcttgggatctgctgccatttctgcaggcagaagaaattgtgcggcgaggaggactgcaagcgctgcggggaaggagacctgaagcagccatgcttaggaaagacggagtgctcatcttgccattcttctaatgggatactctgccgtggttgcctgaaagttaggtacggcgaagagatggaagaggtgcggaagaacaagaactggctgtgccctcactgcgttgaggagaagggtatcaagaaattctggatatgcaacagctccttctgcttgaagaagcggaagataccaccgactgggattgccatatataatgcaagggagcaaggatacgagtcagttgcgcaccttctgatggacaggctgaagcgacaagctttctgatgacgactggtgtaatggtgttggcacgttcacttctacagcgacgatgatgacatagagattgtagtggcagtctgttgtctgacgacgtatggttttgcatgtttcacttctgcagtggcttagtgatgatggtagattggtagaggttatagcgagagtccgtttgtctggcagttccgatagtaggcatcttagcctctaggagaaaatgtttctgttgaaatgagttagactttttggcccaagaagaatgtgaagctaggaactctcggtagtctgatgtttcagagaacaacctcagcggccttctgacttctgagtggcagcatgtctgtttattgtaaccacattttgttgagggtcggggcaaccatggtgcacatgcacagtctatttattttctggatttgaatccagctggctaagaggtgtttgatgttaggattta

SEQ ID NO: 90375 - DNA, 1408 bp, Zea Mays
gccgttgctcagcactcgcgacccactaccaatcctccaagcacaacaaccaatctttgcaagccgtccaaagacgccgcagccgccgccgccgacgccatggggaaactcggagccaagtccgactacgagagtctccgcgacgcccgcatctccgagaacatggcccggatggagatgctcggccttctccgctgcgcgggggagctcagcgacatcgcctccgcctccagccaccgcgcggcagggagcgcgacgcctcggaagacccccaggccacgggtgacgagcatgaccccgctccgccgctccggccgcctcctcgccgcgacgccgacccgcccgaccggatccgcgtcgacgcaccgctgttccactcggctgaatggacagggcacaggttgaagcattgaatgctctcttccgtggatcgagtcgtgttatatgtgacggccgacgggaaacagttcaagcaagttcctttttattttctggcaggggttctgagtaagttgacggcggcgggatcggaggatgaggatgatacatgggaagatgataaggaggggaagtgggcggtggcggtggccaaggagagggtacaggcgctgcaggagaggcggtgcgacagcagggggaggggcggcgtgtacgactctgttcttgggatctgctgccatttctgcaggcagaagaaattgtgcggcgaggaggactgcaagcgctgcggggaaggagacctgaagcagccatgcttaggaaagacggagtgctcatcttgccattcttctaatgggatactctgccgtggttgcctgaaagttaggtacggcgaagagatggaagaggtgcggaagaacaagaactggctgtgccctcactgcgttgaggagaagggtatcaagaaattctggatatgcaacagctccttctgcttgaagaagcggaagataccaccgactgggattgccatatataatggtatttctgactcgactcctgtccacatatgtgaaacatgctgttcttgctgttactgataaacatatctgcttcttctttttttcctttcactttctttgacattgcaacagcaagggagcaaggatacgagtcagttgcgcaccttctgatggacaggctgaagcgacaagctttctgatgacgactggtgtaatggtgttggcacgttcacttctacagcgacgatgatgacatagagattgtagtggcagtctgttgtctgacgacgtatggttttgcatgtttcacttctgcagtggcttagtgatgatggtagattggtagaggttatagcgagagtccgtttgtctggcagttccgatagtaggcatcttagcctctaggagaaaatgtttctgttgaaatgagttagactttttggccc

SEQ ID NO: 90376 - DNA, 839 bp, Zea Mays
cgttgctcagcactcgcgacccactaccaatcctccaagcacaacaaccaatctttgcaagcgctgcggggaaggagacctgaagcagccatgcttaggaaagacggagtgctcatcttgccattcttctaatgggatactctgccgtggttgcctgaaagttaggtacggcgaagagatggaagaggtgcggaagaacaagaactggctgtgccctcactgcgttgaggagaagggtatcaagaaattctggatatgcaacagctccttctgcttgaagaagcggaagataccaccgactgggattgccatatataatgcaagggagcaaggatacgagtcagttgcgcaccttctgatggacaggctgaagcgacaagctttctgatgacgactggtgtaatggtgttggcacgttcacttctacagcgacgatgatgacatagagattgtagtggcagtctgttgtctgacgacgtatggttttgcatgtttcacttctgcagtggcttagtgatgatggtagattggtagaggttatagcgagagtccgtttgtctggcagttccgatagtaggcatcttagcctctaggagaaaatgtttctgttgaaatgagttagactttttggcccaagaagaatgtgaagctaggaactctcggtagtctgatgtttcagagaacaacctcagcggccttctgacttctgagtggcagcatgtctgtttattgtaaccacattttgttgagggtcggggcaaccatggtgcacatgcacagtctatttattttctggatttgaatccagctggctaagaggtgtttgatgttaggattta

SEQ ID NO: 90377 - DNA, 554 bp, Zea Mays
gcaccgcctgcctccgattcgggcgccagcgaccggagctcatccggcatatatcaagatgtgatattcaggttgccctacgatgtggttgtcccagcattgacaggaaggttgtaaactctgggaagcgactgcgggcttatgtagggcttgttgaaggagagcttgcaaagaagcttcatccagacacgaataaaggtgatgcggatgcagaaccgaagtttcaagaggttcagcgagcttatgagttctttaggaacattttcagggatagggattttggaagccatgatattaaggttgcacttgaactatcatttatggaagcagttcaaggatgcagcaaaacgatcaacttccaaacgtctgtcacgtgcgaaacctgcaatggagccggcgtgcctcctggaaccaaacctgaaacatgtctagcttgcaggggttcaggatttgttagttcttcatcacattgcttttgtctatccagtttaactagtattcttatttgtgttagtttttaaaaatattgttgacagatgttcatgcaaactgga

SEQ ID NO: 90378 - DNA, 2820 bp, Zea Mays
atgccacattttttgtactatcttttctcctatccttgaccactcttaattttttgtctttcagaaagtgaaattgttcgaatgtttcatcctccaattcgtaagagtgaggaagcaatagcaaccattgcgccaagatacacacattctgtgcgtgtcttggatgagaggttcattaggatcctgaagatattcaagtggggccctgatgctgagaaggcgctggaggttctcatgcttagagttgatcactggttggtacgagaggttatgaaaactgacgttggggtcaatgtgaagatgcagttcttcagatgggctgcaaagcggaggaattatgagcatgacacatccacttacatggcattgatacattgtttggaagtagtggagcagtatggtgagatgtggaagatgatccaagaaatggtacggaatcccatttgtgttgttaccccaacagaactttcagatgtagttcgaatgctggggaatgctaagatggtcagacaggcaattacaatcttctaccagatcaaaacgcggaagtgtcagccaattgcacaggcatataacagcatgataataatgttgatgcatgagggccaatatgagaaagtccatcaactatacaatgagatgagcactgagggtcattgcttcccagacactgtgacatatagtgcattgatttccgccttttgcaaattaggtcgacgtgattcagcaattcagttgttgaatgagatgaaggagatcggtatgcagccaactactaagatatatacaatgttaatagctttgttcttcaaattcaatgatgctcatggagcattgagtttgtttgaagaaatgaggcatcagtattgccgaccggatgtgtttacttacacagagctaatcagaggccttggtaaagctggtagaatagatgaagcatatcacttcttctgtgaaatgcagcgagaaggctgcaggccagacacagtttttatgaataatatgataaatttcttaggcaaggctggccgtttggatgatgctatgaagctgtttcaggagatggaaacattgaggtgcattcctagtgtggtgacatacaatactatcataaaagcactttttgaatcaaaatctcgtgcttctgaggttccatcttggtttgagagaatgaaggaaagtggaatatccccaagttcgttcacctattctatccttattgatggattctgcaaaaccaacaggatggagaaggccatgatgctactggaagagatggatgaaaagggtttccctccatgtccagcggcatattgtagcctgattgatgctcttggaaaagctaagcgttatgatcttgcttgcgagctttttcaggaactaaaggaaaattgtggctcgtctagtgctcgggtatacgcagttatgattaaacacttaggaaaggctggacggcttgatgatgctataaatatgtttgacgaaatgaacaaacttggttgtgctcctgatgtttatgcgtacaatgctctcatgtctggattagcaagaacaggcatgcttgatgaagctcttagtacgatgagaagaatgcaagagcatgggtgtattcctgatatcaattcatacaatattatccttaatgggctggcaaaaacgggaggacctcaccgtgcaatggaaatgctttctaacatgaaacaatctacagtaagacctgatgtagtctcgtataatactgtccttggtgccttgagtcatgctggcatgtttgaggaggcatcaaagctgatgaaagagatgaatacactggggtttgagtacgatcttattacatattcatctatacttgaggctattggaaaggttgatcatgaatatactgaccaaggttgatcatgaatgtgaccctcaaagttggaggcgtatcatgtgcaatcactcatttggtgcaagcatgcgatcaaaccatccagagcatccaatctagatccagcggtttcatatggaagagattaaaccaaaaatgggtactaggtttcagtaaatgtaaatagccgtcaccattggattttgattagatgcactacatcaatatgattgattgcactgtatatcttcccctcaaggtcagtcctcatcgtctcttacagtttagtaacacagatgatgacaaatgagcgaatataattatcctttggctactttttctccaggttcgtgaggatcatcgtgtattttgaagagtgaaaggtgatattcatgttggtgctgtcctgaatgtgacacgggtaatttggtgcattttccaacaatctgttcattttgcaccctaagaatatagttaaaacgatgaagtgtccatatggtgctaaccacctttccatagtgctatgatgtgaacttcattctgatacatgaatacatcagcttgcaaaagaaagaaaagagaagaaaaggtttctttatgaccactcagacacccagcaatattcttacttcgatcacactggcttgatcaagtcactgctaccgacatggtgcttgggattttgtagctggaataatgctggaccgccctgcctgatgtgtaatcatgcacgtaaatgctatcagtcgtgcagggactcttgtagtacaactttgtggatcagggtgaccatgtaaagaacacacggtacctgtgtcaattcatgttttctgttgaggtttcagcttttaattaaggtaaactagtgtagtgtctggctaaactttgtccttgttcttgacgaatgatgtaactctgatcgctttttacatgtttccatcttccaagaa

SEQ ID NO: 90379 - DNA, 1209 bp, Zea Mays
gaccctgtctctctgttgtatcctttcccctgtctctgcagcagagcagttcctttcttgttgtcttgctctactccccagtccccagaccccagtcccccactcggacctggggggcatcgcaccgaggacgacctcacgctggggcgggccttggtatattccttctcctccctgctcggtttagcacgcccgcttccagcacgcatcctcccctcctcccgtctcaagggatagcagggtgcagcggctcgaagctggaggaagcggacgggttcgccatggggtccgagggatcctcgggtccagttgtcgttcccagaaactttaggctgctagaagaactagaacgtggtgagaagggcattggtgatggaactgtgagctatgggatggacgatgctgatgacatatttatgcggtcctggacaggaactatcattggtcctcccaacactgttcacgagggacgaatctatcagttaaagctgttttgtgatacagattatccagataaaccaccgactgtccgattccagactcggatcaatatgacatgtgtgaaccaagaaactggattggttgaaccaagtctatttcctatgcttggaaagtgggaaagggaacatacgatggaggacattctgaccagcttaaaaagggagatgtcaactccacagaatcgcaggctgtaccaacctcatgaaggcaatgaagaccaaagagtagagcagaaaggggtgtctcttagatgtgtcatcatgtaatctatgtgcgttgcaatgtacagcattattgaattgagcagcgagatgccgaggtgagagaccctctcaggaaatcatgtggttcgccttaatgttaatggtgccaccatcgcaataaaagcgtcgatgattgttaaagtgcctgcacaccatgtaacgtgtaacccagttcgttcagattctgtgaaagacaacgagttcagtgtctgtttgttaagggctggctctaggcctggttattttctcgaggaaacaccgtgctctttcgaccatgcgtaacgaattgtaccgattctgaacaagtcgcgaaaggctgataaagtaccagagacacgcacgcatcaccttgagaagtcgggatgagctgagttaggcttgttcgtttgtgccggattggtggatcggaacgatttttatctagattgtttctttaatttatata

SEQ ID NO: 90380 - DNA, 957 bp, Zea Mays
tctgctattcatgttgcttgataataatttagatcatactttgttctatggcgttttctgcagttcccagaaactttaggctgctagaagaactagaacgtggtgagaagggcattggtgatggaactgtgagctatgggatggacgatgctgatgacatatttatgcggtcctggacaggaactatcattggtcctcccaacactgttcacgagggacgaatctatcagttaaagctgttttgtgatacagattatccagataaaccaccgactgtccgattccagactcggatcaatatgacatgtgtgaaccaagaaactggattggttgaaccaagtctatttcctatgcttggaaagtgggaaagggaacatacgatggaggacattctgaccagcttaaaaagggagatgtcaactccacagaatcgcaggctgtaccaacctcatgaaggcaatgaagaccaaagagtagagcagaaaggggtgtctcttagatgtgtcatcatgtaatctatgtgcgttgcaatgtacagcattattgaattgagcagcgagatgccgaggtgagagaccctctcaggaaatcatgtggttcgccttaatgttaatggtgccaccatcgcaataaaagcgtcgatgattgttaaagtgcctgcacaccatgtaacgtgtaacccagttcgttcagattctgtgaaagacaacgagttcagtgtctgtttgttaagggctggctctaggcctggttattttctcgaggaaacaccgtgctctttcgaccatgcgtaacgaattgtaccgattctgaacaagtcgcgaaaggctgataaagtaccagagacacgcacgcatcaccttgagaagtcgggatgagctgagttaggcttgttcgtttgtgccggattggtggatcggaacgatttttatctagattgtttctttaatttatata

SEQ ID NO: 90381 - DNA, 704 bp, Zea Mays
aaatcaccaaagaaatcactccagaattttgaaaaggtgacggaaatagtgaggagcggagaacaccggaatgatccatcctcttgtgctttccctgcccttccccgctataatatcgcgccctcgtcgccatcgtcaccacaccaccactccctcactgccctctcactcccgatccctgcaccactaccgcctcctccgcttcacccctctcgtcgcctcttgcggcgaccggcggcggatcgtccgcggcgcaagcgcaaccatggggctcttcaccgtgacgaagaaggccaccacccccttcgaaggccagaagcccggtacctccggcctccgcaagaaggttactgtattccagcagcctcattatctgcagaactttgtccagtcaacattcaatgcccttcctgcagaccaagtaaaaggtgcaaccattgttgtctctggtgatggccgctatttctcaaaagatgctgttcagatcataacaaaaatggctgctgccaatggagtaagacgtgtttgggttggacaaaacagtctcatgtctactcctgctgtatctgctgtcatccgtgaaagaattggtgcagatgtaagtttgattcttaatgaaggacagtctttagcagtatgaatatttacttgttattcctttatactgtctaatgaataacctgactgttggtttataaacacat

SEQ ID NO: 90382 - DNA, 2424 bp, Zea Mays
aaatcaccaaagaaatcactccagaattttgaaaaggtgacggaaatagtgaggagcggagaacaccggaatgatccatcctcttgtgctttccctgcccttccccgctataatatcgcgccctcgtcgccatcgtcaccacaccaccactccctcactgccctctcactcccgatccctgcaccactaccgcctcctccgcttcacccctctcgtcgcctcttgcggcgaccggcggcggatcgtccgcggcgcaagcgcaaccatggggctcttcaccgtgacgaagaaggccaccacccccttcgaaggccagaagcccggtacctccggcctccgcaagaaggttactgtattccagcagcctcattatctgcagaactttgtccagtcaacattcaatgcccttcctgcagaccaagtaaaaggtgcaaccattgttgtctctggtgatggccgctatttctcaaaagatgctgttcagatcataacaaaaatggctgctgccaatggagtaagacgtgtttgggttggacaaaacagtctcatgtctactcctgctgtatctgctgtcatccgtgaaagaattggtgcagatggatcaaaggctactggtgccttcatcttgacagcgagccataacccaggtggtcctacggaggactttggtatcaaatacaatatgggaaatggtggacctgcccctgaatccgttaccgacaagattttctctaatacaacgacaatctctgaatacctcatctctgaagaccttccagatgttgatatttctgttgtcggtgtcaccagcttcagtggacccgaaggcccctttgatgtggatgtctttgactctagtgtaaattacataaagttaatgaagacaatttttgacttcgaagcaataaaaaagctactgacctccccaaagtttacattctgttatgatgcgctccatggtgttgctggagcttatgccaaacacatctttgtggaagagcttggtgctgatgaaagctcactgttgaattgtgtcccaaaagaggactttggaggtggtcatccggatcctaacctcacctatgcaaaagagttggttgaacggatgggtcttggaaagtcatcctcaaatgttgaacctcctgaatttggtgctgcagctgatggagatgctgaccgcaacatgattctgggtaaaagattctttgtgacaccatcggactctgttgccattatagcggccaatgctgttcaatcaattccttactttgcttctggcctgaagggagttgccaggagcatgccaacatcagctgcccttgatgttgttgcaaagaatttgaatctcaagttctttgaggtgcctactgggtggaaattttttgggaatttgatggatgctggaatgtgctcaatctgtggtgaagaaagctttggcactgggtctgaccacattcgtgagaaagatggcatctgggctgtgcttgcatggctttctattattgctttcaagaataaggacaaccttggaggagataagcttgtcactgttgaagatattgtccgtcagcattgggccacatatggtcgccattattacacacgctatgactatgagaatgtcgatgctggggctgctaaggagctgatggcaaacctagtaagcatgcagtcatcactttctgatgttaacaagttgatcaaggagatccggtctgatgtttctgaagtagttgcagctgacgagtttgagtacaaggatccagttgatggctctgtgtccaagcaccagggcatccgatacctcttcggagatggttcacgactggtgttccgtctatccggaaccggttctgttggtgccaccatccgtgtctacatcgagcaatacgagaaggattcctccaagaccggcagggattcacaggaggcccttgctccactggttgatgttgcgctcaagctctccaagatgcaagagtacactggccgctctgcccccaccgttatcacataaatttttgaagagtgatttacaatgagttgaggcgcttacacaaattttcattcaagcctcttgttctatagttctacttcctgttgcatctcaccaatgaataaaatgtatgtatcagactcgccccgttttttttttgtccatgtactgcagtgcagcggactgagccgctggcacagcatgcggtaataatcttgtcacagtgacagtgctgtaatcgggagcgtgtttcttgtaatcttgttaggaagtgtttctggttttgtttgagcatttgcttatctttttttctgagtactaaaaataatttactcacatgtatgtataccatgtcactaatcttttgatggctgtttagggaacctgggttatgattcgtcgattactgattaaccgttccctgtgtg

SEQ ID NO: 90383 - DNA, 2474 bp, Zea Mays
gccctcgtcgccatcgtcaccacaccaccactccctcactgccctctcactcccgatccctgcaccactaccgcctcctccgcttcacccctctcgtcgcctcttgcggcgaccggcggcggatcgtccgcggcgcaagcgcaaccatggggctcttcaccgtgacgaagaaggttactgtattccagcagcctcattatctgcagaactttgtccagtcaacattcaatgcccttcctgcagaccaagtaaaaggtgcaaccattgttgtctctggtgatggccgctatttctcaaaagatgctgttcagatcataacaaaaatggctgctgccaatggagtaagacgtgtttgggttggacaaaacagtctcatgtctactcctgctgtatctgctgtcatccgtgaaagaattggtgcagatggatcaaaggctactggtgccttcatcttgacagcgagccataacccaggtggtcctacggaggactttggtatcaaatacaatatgggaaatggtggacctgcccctgaatccgttaccgacaagattttctctaatacaacgacaatctctgaatacctcatctctgaagaccttccagatgttgatatttctgttgtcggtgtcaccagcttcagtggacccgaaggcccctttgatgtggatgtctttgactctagtgtaaattacataaagttaatgaagacaatttttgacttcgaagcaataaaaaagctactgacctccccaaagtttacattctgttatgatgcgctccatggtgttgctggagcttatgccaaacacatctttgtggaagagcttggtgctgatgaaagctcactgttgaattgtgtcccaaaagaggactttggaggtggtcatccggatcctaacctcacctatgcaaaagagttggttgaacggatgggtcttggaaagtcatcctcaaatgttgaacctcctgaatttggtgctgcagctgatggagatgctgaccgcaacatgattctgggtaaaagattctttgtgacaccatcggactctgttgccattatagcggccaatgctgttcaatcaattccttactttgcttctggcctgaagggagttgccaggagcatgccaacatcagctgcccttgatgttgttgcaaagaatttgaatctcaagttctttgaggtgcctactgggtggaaattttttgggaatttgatggatgctggaatgtgctcaatctgtggtgaagaaagctttggcactgggtctgaccacattcgtgagaaagatggcatctgggctgtgcttgcatggctttctattattgctttcaagaataaggacaaccttggaggagataagcttgtcactgttgaagatattgtccgtcagcattgggccacatatggtcgccattattacacacgctatgactatgagaatgtcgatgctggggctgctaaggagctgatggcaaacctagtaagcatgcagtcatcactttctgatgttaacaagttgatcaaggagatccggtctgatgtttctgaagtagttgcagctgacgagtttgagtacaaggatccagttgatggctctgtgtccaagcaccagggcatccgatacctcttcggagatggttcacgactggtgttccgtctatccggaaccggttctgttggtgccaccatccgtgtctacatcgagcaatacgagaaggattcctccaagaccggcagggattcacaggaggcccttgctccactggttgatgttgcgctcaagctctccaagatgcaagagtacactggccgctctgcccccaccgttatcacataaatttttgaagagtgatttacaatgagttgaggcgcttacacaaattttcattcaagcctcttgttctatagttctacttcctgttgcatctcaccaatgaataaaatgtatgtatcagactcgccccgttttttttttgtccatgtactgcagtgcagcggactgagccgctggcacagcatgcggtaataatcttgtcacagtgacagtgctgtaatcgggagcgtgtttcttgtaatcttgttaggaagtgtttctggttttgtttgagcatttgcttatctttttttctgagtactaaaaataatttactcacatgtatgtataccatgtcactaatcttttgatggctgtttagggaacctgggttatgattcgtcgattactgattaaccgttccctgtgtggttacgggctacggcaggggattgtgactgcttgagggttcggttagcttgtgtgctttgtaagggtgagtgtgtgtttgtgtttagagtgtgtgtttgtgttgtgtgtgttctgtttgtcctgggccataggtcctttttctctctactttaatttaatgatatgtagccctcctttgtattcggaaaaaaaaaatccacatggattgagtgagattgtgtg

SEQ ID NO: 90384 - DNA, 711 bp, Zea Mays
atagtgcttcaatgccctaaatgggtgatcaaggctattgataaaattcggaggggcttcttgtggaaaggtagaaaagatatcaaaggaggtcattgctctgttggatgggcaagagtatgcagacaccttagtttgggaggcctgggtattcacaatcttgaaattcttggatgggctttaaatctaagatggctttggctcagaaaaactcaaccagaaaggccctagacagattttatgttcaaggtacatcccaatgtcgaagctctcttctctgcctcggtccacactcagtaggtgatggctctagaaccttgttttggtctgatcgttggattcatggacaatcaatatctgcctttgccccttctttggtcaaccgtattaaaggaagaatcaagaaaagcagttttgtgcaggaagccctggtaaacaatagatgggtaaatgacatatctggcagcctatcagcacaaattatcatcgatttctttgtgatttgggacctagtacaaggttttcagttacatccagggactcctgatgtgcaccgatggttaccaactgcatctggagattataccacaaaatcagcatatgaccgttttatggccggttcagtcacttttgagccggctacaagaatttggaaaagttggccccccacggtgtaagtttttcatttggctaggttctctaaatcgttgt

SEQ ID NO: 90385 - DNA, 379 bp, Zea Mays
ctcttcttggatgagaagtcgagcacttcgctttgtcctttgtcgttcatcctccattcatctctctgtatctatcatgtatgcctcttctaatgacgatgccatcggctccccttcctctgctacatctttctggttggttggttgtggttggttgatttgggacagggggttcctggtgatacttttagcattactttttcagttaaggtgcacttgttctctcggatcagtgccattgttgctcatgacgactctgtttcagtatatgaacgtttggtatctataacatgataatttgccatgcctagaatactgaattgctataccattatatgaagtttactgttactgacataaggagcttggcaaaaaaaaa

SEQ ID NO: 90386 - DNA, 2365 bp, Zea Mays
cgacgcattaggctttaccggactccggacgcataacgagaggaaaacaaatcagaggaattcgacgagggcaccagccaccagcaccaccatggcggccgcctccaccgccaccgccgcctcgcactcagcctccttccccgcggcctccctccgccacgacgcgcgcaggccctcctgcgtagcccccgccgccgccgcggcgacgacggccgctgagacggggctcacggccgtcccggcgccgccgccgacgccgatgttgcgggtggtgccggagtcgctgcagcgggacagcgggtgcctcgtggcgggcttccgggagcgcggcgcgggcgcggcggatggggaagggttcggggacgccgtgggggaaggaggaggccccggtgcgatggagtacctcaccagcgtgctgtcgtccaaggtgtacgatgtggcaatcgagtcgccgctgcagctcgccaccaagctctccgatcgccttggggtcaacctctggatcaagcgcgaggacctgcagccggtattctcgttcaagttgcggggagcatacaacatgatggcaaagctctcccgtgagcagttagagaggggtgtcatctgctcctctgctggaaatcatgcccagggcgttgctctttccgctcagagactgggatgtgatgctgtcatcgtcatgcccgtgacaacaccagaaatcaagtggaaatcagtggagaggttgggtgcaacagtggtccttgagggggactcatatgatgaagctcagtcatatgcaaaattgcgttgccagcaggaaggccgcacatttgtacctccttttgaccatcctgatgtcatcactggacaaggaactatcggcatggaaattgttaggcagctgcaaggtccactgcatgcaatatttgtacctgttggaggtggtggattaattgctggaattgctgcctatgtaaaacgggttcgcccagaggtgaaaataattggagtggaaccctcagatgcaaatgcaatggcattatccttgtgtcatggtaagagggtcatgttggagcatgttggtgggtttgctgatggtgtagctgtcaaagctgttggggaagaaacatttcgcctgtgcagagagctagtagatggcattgttatggtcagtcgagatgctatttgtgcttcaataaaggatatgtttgaggagaaaagaagtatccttgaacctgctggtgcccttgcattggctggggctgaagcctactgcaaatactataacttgaaaggagaaactgtggttgcaataactagtggggcaaatatgaactttgatcgacttagactagtaaccgagctagctgatgttggccgaaaacgggaagcagtgttagctacatttctgccagagcggcagggaagcttcaaaaaattcacagaattggttggcaggatgaatattactgaattcaaatacagatacgattctaatgcaaaagatgcccttgttctttacagtgttggcatctacactgacaatgagcttggagcaatgatggatcgcatggaatctgcgaaactgaggactgttaaccttactgacaatgatttggcaaaggaccaccttagatactttattggaggaagatcagaaataaaagatgaactggtttaccggttcattttcccggaaaggcctggggcccttatgaaatttttggacacgtttagtcctcgttggaacatcagccttttccattaccgtgcacagggtgaagctggagcaaatgtattagttggtatacaagtgccgccagcagaatttgatgaattcaagagtcatgccaacaatcttgggtacgagtacatgtcagagcacaacaatgagatataccggttgctgttgcgtgacccaaaggtctaatgtatatgcctttgctcccataataagttggtgacacttttcaaggaagattttgctccaaggtagaagttgcgagtttcttcaagttgaaatgaagccatcaccaaatgtagcttcggtgtgccatctgtttactcagttagatcatgtagtgtatcagttgtgtatctttgttgttgtgcttcgtgatctcaatttattgctttgtgcacctagaggttgtcaaataatgataaccgatatgttatctaaatatctaataatgattatgtgattgtgatttgggccgcatcactgctgtaaagtgtaaacccttgtctctgcaacatgagttatcaacaaatttaagatttgaatgttctttctttgaattgtgtgtataacaagagtgtcaactaaaaaatagataaaggcgtgtttaacctcatttgcggttttgtgccgtttgctgtt

SEQ ID NO: 90387 - DNA, 1538 bp, Zea Mays
ataacgagaggaaaacaaatcagaggaattcgacgagggcaccagccaccagcaccaccatggcggccgcctccaccgccaccgccgcctcgcactcagcctccttccccgcggcctccctccgccacgacgcgcgcaggccctcctgcgtagcccccgccgccgccgcggcgacgacggccgctgagacggggctcacggccgtcccggcgccgccgccgacgccgatgttgcgggtggtgccggagtcgctgcagcgggacagcgggtgcctcgtggcgggcttccgggagcgcggcgcgggcgcggcggatggggaagggttcggggacgccgtgggggaaggaggaggccccggtgcgatggagtacctcaccagcgtgctgtcgtccaaggtgtacgatgtggcaatcgagtcgccgctgcagctcgccaccaagctctccgatcgccttggggtcaacctctggatcaagcgcgaggacctgcagccggtattctcgttcaagttgcggggagcatacaacatgatggcaaagctctcccgtgagcagttagagaggggtgtcatctgctcctctgctggaaatcatgcccagggcgttgctctttccgctcagagactgggatgtgatgctgtcatcgtcatgcccgtgacaacaccagaaatcaagtggaaatcagtggagaggttgggtgcaacagtggtccttgagggggactcatatgatgaagctcagtcatatgcaaaattgcgttgccagcaggaaggccgcacatttgtacctccttttgaccatcctgatgtcatcactggacaaggaactatcggcatggaaattgttaggcagctgcaaggtccactgcatgcaatatttgtacctgttggaggtggtggattaattgctggaattgctgcctatgtaaaacgggttcgcccagaggtgaaaataattggagtggaaccctcagatgcaaatgcaatggcattatccttgtgtcatggtaagagggtcatgttggagcatgttggtgggtttgctgatggtgtagctgtcaaagctgttggggaagaaacatttcgcctgtgcagagagctagtagatggcattgttatggtcagtcgagatgctatttgtgcttcaataaaggatatgtttgaggagaaaagaagtatccttgaacctgctggtgcccttgcattggctggggctgaagcctactgcaaatactataacttgaaaggagaaactgtggttgcaataactagtggggcaaatatgaactttgatcgacttagactagtaaccgagctagctgatgttggccgaaaacgggaagcagtgttagctacatttctgccagagcggcagggaagcttcaaaaaattcacagaattggtatgccatatgaggtagctctgcctattagatgattgtgtatctattcctaatgtaatgggtcttggcccagcccatgtattatcattatatatatactaagcctgccctaatcagagtggttatcctattctaaca

SEQ ID NO: 90388 - DNA, 2373 bp, Zea Mays
acccgcacagattcggctcaacaggcaacagcaccagcgctcgaacgccgcgtccaggcaacccatccttccgaccccgagcggtcggtacctcgcaagcaaaactacaagctcgcttttaaattctgttgctgcaattatctcctctgtttcccactcgtagatcccgccgcctcccgcgtctagccgtcgacgagcaccgcagcctgacacagccgcgggcgaaccatcgcgtgcggcctcgcccgggatggcgaccatggagagcctgatcgggctggtgaaccgtatccagcgcgcgtgcaccgtcctcggcgaccacggcggcggcggcggcgagggctccctctgggaggcactcccctccgtcgctgtcgttggtgggcagagttccgggaagtcgtcggtgctcgagagcatagtggggagggacttcctgccccgtggatctggcattgtcacgaggcggcctttagtgctgcagctccacaagacagatggtgggcacgagtatgctgagttcctccacgccccgcggaagcgtttcaccgactttgctgctgtgaggaaagagattgctgatgaaacagatcgcataactgggaaaactaaagctatttcaaacgttcccatccatttgagtatatattcaccacatgttgttaacttgacacttatcgatcttcctggactgacaaaggtcgctgtagaggggcaaccggaatctattgttcaagatattgaaaacatggttcgagcttatgttgacaagccaaattgcatcatcttggctatctccccagctaaccaagatattgcaacgtcagatgctatcaagcttgctagggatgttgatccttcaggtgacaggacttttggagtcttaacaaagcttgatttaatggacaagggtaccaatgctgttgatgtgcttgaagggaggcaatatcgcttacaacacccgtgggttggaattgtcaatcgctcacaagctgatatcaacaagaatgtcgatatgctctcagcaagacgcaaagaaaaagagtactttgagagtagtcctgaatatggtcacttggcacataaaatgggtgcagagtatcttgccaagcttctgtcacagcatttagaggctgtgatcagggcaaaaattccaagtattatagctatgattaacaaaacaattgatgaaatagaagcccagttggatcgacttggtaggccaattggaggtgacgctggggctcagttgtacacaatcttggatatgtgtcgggcatttgaccgtgtctttaaagagcacttagatggcgggcggccaggtggagatcggatttatggtgtctttgacaaccagttacctgcagcactgaaaaagcttccatttgaccggcatctttcaatgcaaaatgttcgcaaagttatttcagaggctgatggttaccagccccacttgattgcccctgagcaaggatacagaaggcttatagatagttctctaagctactttaagggtccagctgaagcatctgttgatgcggtccatttggtattgaaggagcttgttcggagatctattgcagcaacagaggaattgaagcgattcccaacacttcaatcagatatagctgctgctgcaaatgatagcttggaaagattccgtgaggatggacgaaagactgttcttcgtctagttgagatggaagccagctacctaacagtagagtttttccgtaaacttcctactgaaccagagaaagcagctgataagaacactccagtgagtgataggtatcaggacaatcatctcagaagaatcggatcgaatgtgtcatcttatattaacatggtctgtgagactctaaggaacacggttccgaaagccatcgtgcattgccaagtgaaagaagcaaaaagaaatttgcttaaccgtttctatgctcatgtgggaagcaaggagaagaaacagctgagcgcgatgttggatgaggaccccgctttgatggagaagagggatgccttggtcaagaggctagagctgtacaaatctgcaaggaatgagatcgactcggtcgcatggaaatgattggcttgtgacagctacatctggaatgtatgtaaaatgtacaaccgcagcagcacacgtgtgattgcagtagaatgttcaattcttttttacatttgaatttactctggaggccttgtacgcagttttcactcgagtctttgccggacatgcttatttggccgtcttggccttaacacgattgtgttatgcgtggatgatctggtctccggttgatataagagtgtatatgtattcttttgttgattttattactgccttgatgatatcaatagtttttaccacaa

SEQ ID NO: 90389 - DNA, 2293 bp, Zea Mays
acccgcacagattcggctcaacaggcaacagcaccagcgctcgaacgccgcgtccaggcaacccatccttccgaccccgagcgatcccgccgcctcccgcgtctagccgtcgacgagcaccgcagcctgacacagccgcgggcgaaccatcgcgtgcggcctcgcccgggatggcgaccatggagagcctgatcgggctggtgaaccgtatccagcgcgcgtgcaccgtcctcggcgaccacggcggcggcggcggcgagggctccctctgggaggcactcccctccgtcgctgtcgttggtgggcagagttccgggaagtcgtcggtgctcgagagcatagtggggagggacttcctgccccgtggatctggcattgtcacgaggcggcctttagtgctgcagctccacaagacagatggtgggcacgagtatgctgagttcctccacgccccgcggaagcgtttcaccgactttgctgctgtgaggaaagagattgctgatgaaacagatcgcataactgggaaaactaaagctatttcaaacgttcccatccatttgagtatatattcaccacatgttgttaacttgacacttatcgatcttcctggactgacaaaggtcgctgtagaggggcaaccggaatctattgttcaagatattgaaaacatggttcgagcttatgttgacaagccaaattgcatcatcttggctatctccccagctaaccaagatattgcaacgtcagatgctatcaagcttgctagggatgttgatccttcaggtgacaggacttttggagtcttaacaaagcttgatttaatggacaagggtaccaatgctgttgatgtgcttgaagggaggcaatatcgcttacaacacccgtgggttggaattgtcaatcgctcacaagctgatatcaacaagaatgtcgatatgctctcagcaagacgcaaagaaaaagagtactttgagagtagtcctgaatatggtcacttggcacataaaatgggtgcagagtatcttgccaagcttctgtcacagcatttagaggctgtgatcagggcaaaaattccaagtattatagctatgattaacaaaacaattgatgaaatagaagcccagttggatcgacttggtaggccaattggaggtgacgctggggctcagttgtacacaatcttggatatgtgtcgggcatttgaccgtgtctttaaagagcacttagatggcgggcggccaggtggagatcggatttatggtgtctttgacaaccagttacctgcagcactgaaaaagcttccatttgaccggcatctttcaatgcaaaatgttcgcaaagttatttcagaggctgatggttaccagccccacttgattgcccctgagcaaggatacagaaggcttatagatagttctctaagctactttaagggtccagctgaagcatctgttgatgcggtccatttggtattgaaggagcttgttcggagatctattgcagcaacagaggaattgaagcgattcccaacacttcaatcagatatagctgctgctgcaaatgatagcttggaaagattccgtgaggatggacgaaagactgttcttcgtctagttgagatggaagccagctacctaacagtagagtttttccgtaaacttcctactgaaccagagaaagcagctgataagaacactccagtgagtgataggtatcaggacaatcatctcagaagaatcggatcgaatgtgtcatcttatattaacatggtctgtgagactctaaggaacacggttccgaaagccatcgtgcattgccaagtgaaagaagcaaaaagaaatttgcttaaccgtttctatgctcatgtgggaagcaaggagaagaaacagctgagcgcgatgttggatgaggaccccgctttgatggagaagagggatgccttggtcaagaggctagagctgtacaaatctgcaaggaatgagatcgactcggtcgcatggaaatgattggcttgtgacagctacatctggaatgtatgtaaaatgtacaaccgcagcagcacacgtgtgattgcagtagaatgttcaattcttttttacatttgaatttactctggaggccttgtacgcagttttcactcgagtctttgccggacatgcttatttggccgtcttggccttaacacgattgtgttatgcgtggatgatctggtctccggttgatataagagtgtatatgtattcttttgttgattttattactgccttgatgatatcaatagtttttaccacaa

SEQ ID NO: 90390 - DNA, 3705 bp, Zea Mays
ccaggctcccacttcctctgcaagtcgcagcgcaaagcggaagcaggatttcaaaaaccctacctccctaccctactccgcacacaccccgatctccctcccccacccagatcgccggcccgcggcggcgcgaaatggaggtgccgccggagatgctcgacgccctcgcgggctggttcgggcagtcgctctcacccgacgccgccgtgcgccgcgccgccgagcagagcatctcttccgctacctcttccccaggcttcgcgctcgcgctcctcggcctcgccgcctccccgcgccacgatctccaggcccgcctcgccgcctccgtccactttaagaacctgctccgccgccggtggcccaagcccgacgccgacgccgacgctgacgccgactacctccccgcctccgactgcgccatcatcaaggcacaccttctccagctcctcctcaccgccccgcccctcatccaggcgcagctctccgaggccctcgccgccgcggcggcctccgatttccccgccaggtgggagtcgctcctcccgtctattgtgtcctccctaggcagtgccgtcaacgcgggggacatcgccgccaccaactccctcctcaccgccgtggtgtcgctcttctcccgcttccgcaacgcattcgacaacaatgccctccgcctcgacctcaagtactgccttgacatctttgccgccccactcctcgaggtcttcctcttcgcctcccgccgccttcaggccaccgccaccacggccaacccgctcgagctccgccccgtgtttgagtgcctccgcctctgctgcgagatcttctactcgcttaactccatcgacctgcctgaattcttcgaggataacatgcgccagtggatgacagagttccgaactttcgttaccacatcctactcaccgcctgttgaggcagatggtgcccctgatgcgctccgtgctgctgtctgtgataacctgcagctttatatggagaagtacgaggaggagtttaggggatacctgaaggagtttgttgaggccgtgtgggggctcctcatggcgcagaccacctctccatcccgtgcacagcttgctgttactgcgataaggttcttgactacagttgctgagagtgtgcaccatgccttatttgggagtcctgaagcaatgaagcagatatgtgatagtgttgttgtgcctaacttgcgcctgcgggatgaggatgaggagttgtttgagtgcaattgggtggaatatgttaggcgtgactctgagggtagcgatgcagatacgctcagacgggcagcgtgccggttgctgcgaggccttgcagcgaactaccgggagcaggtggctgcactcgtgtcagcacaggtccagcagatgttggcagcatatgccgcgaatcgggcaaacaactggaaggagaaggatgctgcaatataccttgttattgctcttatgcagaagcctggtgccacaggtggcggcacagcggtggttgacatggagagcttctttacatctgtgattgtgcctgagctccaggctcctgattggcagtctgagccaatgttgaaggcaactgtgctcaggttcttgaaggagttcagggatcagatccccaaagccactgcattggcactcctgccaagtgtagtgaggtttctgacacatgagtctaatgttgttcattcatatgctgcaacttttatcgagaacctgctgatcatcaaggatgctatcccagtaccaggggtgaccacagtaaccaggtctccacgttttgttgctgctgatatcaatccatttgccccacagatcattcagaacctgtccacagcactaggtttccctgattcatatgagaacccctacctgatgaagtgcctgatgcgggtgcttgggattgctaatatagctggtcaaattgttcatgagatcactgctcgacttgtgggtattctcatggaagtgtgcaataaccccaagaaccctgacttcaaccactacttgtttgaggctctggcagcagttattggccggactggtgagcaggacccagcgctactccctgcttttgaggccagcctcttcccagtgctccagaggatattggtcgaggacatctcagagttctggccatatgcttttcagatatttgcacaactcgtcaatttgagccgaccacctctctcgcagaactatatgcagctatttggtgttctcctcagtaatgccacctgggaccggccaccatgtgttcctgccttggttcgcttgctgcgagcattccttaggaaaattccaaatgagctaaaccaagagggcaggcttccaaatatcttggcaatatcccgtagtctcctctcacgcagcagcactgaagattctgctttctacatgctgaacacaatagtggaaaacgttggttttgacatactgaacccatatataactgagatatggagtgctttgtttactcggttacagactagacaggcagtgaaatatgtgaactctcttgtggttttcatgtcgctagtgctggtcaaatatggatcaagtgttcttgtcagttccgttgattcaattcagccaaatcttttcacccaaatccttcagcgattttggattcccaacctcaaattgatcaaaggtgctcttgaagttaagttgacagcagttgcttcgacaaagctgctttgtgagtctgcggtgctgttggatgctgctgcagctcagttatggggtaaattacttgatagtattgtcacactgttgtccagaacgaatcaagatggaacacaagagcaaaatgatggtactgatgcagtggatattcagaagacatcaagttattctgtctcatttgtacggcttcaatatgctggaaagagtgaagatgaccttttgaaagaagtaaatgatccaaaacagtttgtggtcacatccttggccacactttctgcccagtttcctgggaggtttggacttgtcattgagcagcatgtggacccagcgaacaaaagtgtgcttcttcaactttgtgcagcctacagtgccaacattgtctagtcacatgcccttcttctccctaaatttcaggagccaattgcattgggaaggcatttgcttgttgtcaaatgggtctggtcgaaagatgagtctcttggagttgtctgtctgtcaagattttctggtgtaatccttatttatttagtggcaggatgttggttgtgccgtggttgtgccgtgggacccttggatgccaaaacatgtagggttgatttggtgatcagagatcacgaggaatccatgggagatgaatccattgctattcaaattgaatagcaaggggattcctccccatggattcccttgtgattcctggtcaccaaaccagcccataaggaaaacaacattagctttgtggaggattcgtctgtttggtttggctgaggattttgtttcgaggctgaagtttctttttttggggcagtctaatggtgtactgtcctgattatgtatctgaaggtcctgaatcaatggttcggaaaacaacattagcttcaatggttgttggaacacgctgtaattttgcctgcctgcctttcatggttcggggaatgctattctgcagatgcatagccaaaattgacaattgacgaaggaaccgtatatgttcaacgtatcttcattc

SEQ ID NO: 90391 - DNA, 3675 bp, Zea Mays
ccaggctcccacttcctctgcaagtcgcagcgcaaagcggaagcaggatttcaaaaaccctacctccctaccctactccgcacacaccccgatctccctcccccacccagatcgccggcccgcggcggcgcgaaatggaggtgccgccggagatgctcgacgccctcgcgggctggttcgggcagtcgctctcacccgacgccgccgtgcgccgcgccgccgagcagagcatctcttccgctacctcttccccaggcttcgcgctcgcgctcctcggcctcgccgcctccccgcgccacgatctccaggcccgcctcgccgcctccgtccactttaagaacctgctccgccgccggtggcccaagcccgacgccgacgccgacgctgacgccgactacctccccgcctccgactgcgccatcatcaaggcacaccttctccagctcctcctcaccgccccgcccctcatccaggcgcagctctccgaggccctcgccgccgcggcggcctccgatttccccgccaggtgggagtcgctcctcccgtctattgtgtcctccctaggcagtgccgtcaacgcgggggacatcgccgccaccaactccctcctcaccgccgtggtgtcgctcttctcccgcttccgcaacgcattcgacaacaatgccctccgcctcgacctcaagtactgccttgacatctttgccgccccactcctcgaggtcttcctcttcgcctcccgccgccttcaggccaccgccaccacggccaacccgctcgagctccgccccgtgtttgagtgcctccgcctctgctgcgagatcttctactcgcttaactccatcgacctgcctgaattcttcgaggataacatgcgccagtggatgacagagttccgaactttcgttaccacatcctactcaccgcctgttgaggcagatggtgcccctgatgcgctccgtgctgctgtctgtgataacctgcagctttatatggagaagtacgaggaggagtttaggggatacctgaaggagtttgttgaggccgtgtgggggctcctcatggcgcagaccacctctccatcccgtgcacagcttgctgttactgcgataaggttcttgactacagttgctgagagtgtgcaccatgccttatttgggagtcctgaagcaatgaagcagatatgtgatagtgttgttgtgcctaacttgcgcctgcgggatgaggatgaggagttgtttgagtgcaattgggtggaatatgttaggcgtgactctgagggtagcgatgcagatacgctcagacgggcagcgtgccggttgctgcgaggccttgcagcgaactaccgggagcaggtggctgcactcgtgtcagcacaggtccagcagatgttggcagcatatgccgcgaatcgggcaaacaactggaaggagaaggatgctgcaatataccttgttattgctcttatgcagaagcctggtgccacaggtggcggcacagcggtggttgacatggagagcttctttacatctgtgattgtgcctgagctccaggctcctgattggcagtctgagccaatgttgaaggcaactgtgctcaggttcttgaaggagttcagggatcagatccccaaagccactgcattggcactcctgccaagtgtagtgaggtttctgacacatgagtctaatgttgttcattcatatgctgcaacttttatcgagaacctgctgatcatcaaggatgctatcccagtaccaggggtgaccacagtaaccaggtctccacgttttgttgctgctgatatcaatccatttgccccacagatcattcagaacctgtccacagcactaggtttccctgattcatatgagaacccctacctgatgaagtgcctgatgcgggtgcttgggattgctaatatagctggtcaaattgttcatgagatcactgctcgacttgtgggtattctcatggaagtgtgcaataaccccaagaaccctgacttcaaccactacttgtttgaggctctggcagcagttattggccggactggtgagcaggacccagcgctactccctgcttttgaggccagcctcttcccagtgctccagaggatattggtcgaggacatctcagagttctggccatatgcttttcagatatttgcacaactcgtcaatttgagccgaccacctctctcgcagaactatatgcagctatttggtgttctcctcagtaatgccacctgggaccggccaccatgtgttcctgccttggttcgcttgctgcgagcattccttaggaaaattccaaatgagctaaaccaagagggcaggcttccaaatatcttggcaatatcccgtagtctcctctcacgcagcagcactgaagattctgctttctacatgctgaacacaatagtggaaaacgttggttttgacatactgaacccatatataactgagatatggagtgctttgtttactcggttacagactagacaggcagtgaaatatgtgaactctcttgtggttttcatgtcgctagtgctggtcaaatatggatcaagtgttcttgtcagttccgttgattcaattcagccaaatcttttcacccaaatccttcagcgattttggattcccaacctcaaattgatcaaaggtgctcttgaagttaagttgacagcagttgcttcgacaaagctgctttgtgagtctgcggtgctgttggatgctgctgcagctcagttatggggtaaattacttgatagtattgtcacactgttgtccagaacgaatcaagatggaacacaagagcaaaatgatggtactgatgcagtggatattcagaagacatcaagttattctgtctcatttgtacggcttcaatatgctggaaagagtgaagatgaccttttgaaagaagtaaatgatccaaaacagtttgtggtcacatccttggccacactttctgcccagtttcctgggaggtttggacttgtcattgagcagcatgtggacccagcgaacaaaagtgtgcttcttcaactttgtgcagcctacagtgccaacattgtctaggagccaattgcattgggaaggcatttgcttgttgtcaaatgggtctggtcgaaagatgagtctcttggagttgtctgtctgtcaagattttctggtgtaatccttatttatttagtggcaggatgttggttgtgccgtggttgtgccgtgggacccttggatgccaaaacatgtagggttgatttggtgatcagagatcacgaggaatccatgggagatgaatccattgctattcaaattgaatagcaaggggattcctccccatggattcccttgtgattcctggtcaccaaaccagcccataaggaaaacaacattagctttgtggaggattcgtctgtttggtttggctgaggattttgtttcgaggctgaagtttctttttttggggcagtctaatggtgtactgtcctgattatgtatctgaaggtcctgaatcaatggttcggaaaacaacattagcttcaatggttgttggaacacgctgtaattttgcctgcctgcctttcatggttcggggaatgctattctgcagatgcatagccaaaattgacaattgacgaaggaaccgtatatgttcaacgtatcttcattc

SEQ ID NO: 90392 - DNA, 87 bp, Zea Mays
atggccgcggctccccaacctcgacatgcggtggcggtggttcctaggccggcgatggcggcccccgatccagagggtgagcggtga

SEQ ID NO: 90393 - DNA, 118 bp, Zea Mays
ggcggatttgacatccggccaaactctaccttgatgcctactccccctaacaaaataattgcacgtctcgttcctaaaactccaagctttttaagtctgacaaagagtacaagaataa

SEQ ID NO: 90394 - DNA, 531 bp, Zea Mays
gtttctcttctccaaagcatttataataagtgtagcctcaggagttagaaggagtatactctgccaatatggtaggtttagacatccaacataccatgaactaaccagtgatgtagtgaccatatataaaaggaaaagcatgaagcagatcatgaactcaccagtccatcagtcatcagatattaaaggaagagcaggaaaaaaacaaacctcaagaagcataagtttgatattttagccatagtgaattggattgtgaacaagactggtgatttgctcctgaattgagtcacatttattttgttgattggggtacaaatatcatgcaatagatcaaaggaatgaaaaaatctcacacaacattaatcttcttttgtccattgtggcaacagtaccaaggtagtgtcttcttttatcctcctaagtaaaatggcaaaggaaccaattcaactgagggcaattaattaaattggatggcaatgaataagaagtatcatgtgagcagattaaaaagtaccacgcaagaccaaa

SEQ ID NO: 90395 - DNA, 570 bp, Zea Mays
atggcggacaatcttttgtatccgcaaaataaaaagggccacatccttcagccacaaattgatagtaaagaagtttactttgaagtcgctaggtctgtgctctcatatgcaactaaacattcacatatagttttagccttcttgatcttcacaggctgtacagttctgttacttcagctatatagttcacctggcaaatacgcatcacgaagtttcctttcttcgcagccataccttcatgagtctcgacaccgtcatgccatgaagcggacccgtggctcaggagggcggttcctcaacacaaagcagcagctccaggagcagaaccagcagcaccaggcgtcgagtggttcaatgtgctcaaagaccattggcaacagcataatctcccaaagtggccccatttgcacgccctcttctgacgctgcaggtgcttcagcagccagccaggaccgcggctgcttgccctcggttggcttccgtcccacagccaacttcagtgatcaaggtggaggcggctcgaagctggtcgtgaacggcatgcagcagcgtgtttccaccataaggtga

SEQ ID NO: 90396 - DNA, 437 bp, Zea Mays
ggccgtcacaagacaactcagcaggcaatcaaacatttgcttgtgctttctagtgccatggatctttgcttcaagcagaaaaactatgctactgtaagcagaaaaaccaagatgatcaacacctcagcagtaattgaacagttcaaggatgctcttgatcattttcaaagtattacacataatggcaagatggtagcggctgtggagtacggtactgaaatgcaagagaagtcaatgtgtgaagagccccagaggaaggcgaaagtaatagcaattgctgaagtactgaagcttgggtttaggggaattgaagtggtaaccaccgcaagcatttttgctaaggaaccaaaccaaatggacatgtttctagcactgccagaaaatctataagaaggattacatacttcagatgatcagtggtaggccatgtgacccgc

SEQ ID NO: 90397 - DNA, 1839 bp, Zea Mays
cccgccactctacgacgacgaccgctacaccacgccacaatcgtctgtcggtactatcgccaaccctgacgacgacctcctccaggagctcgacgggttggacgaggacgccgcgagcgccaacgcggctgacgacgattcaggcgctgtccacgtccatgcgccgctcaaccccgacgcgacgctcgactcgaacgtcgacaccagtggatcaccgcgctacccgtgcctccccgagggcgcgacgttgttccgtcggaacccggataagaagatccacgatgggctcatcggcggcatcagccagcacatctggagcatcgtggacgaggtcgaacacacgacctcagggctggtccagacgctcatcgccgtcgacaggcacttcgacctcatcatcaaggcgaggatcaagcacttggatccgttacctccgctcgtccccaacaccgacgcagaggaggaggaggttctcacgaccacgtccaccaggtgttcgagaatgggcatcaaccgtggcgcatactccgtccccaacctcctcgtggtctgcatcgtgggcgcacccaaattcaacgaatacagcaccaaccgcgtcctgcaccgcacgcggctacagcgccctccgctctagcaactgatcgtcgaccctgtcagcgccgtccacggcggcgacgactatgagctgtcccacagcgaggcaggcagtgttctcgcgaccgccgcgcttcccaacccgcgcgagaagatccgttgtcagctcgtcaacaggacgaggctggcccgcgacgtccgcctcatcttctccctgacatcgtcgaaccaggtgctcagccttcacatgagcacacatgactttgactgcgccagcgtcgacaggaagtcctgcttgcgggcgtacacgctgacgagcatggaggacgaggttggccacttcggcctcgacgccaaggagtacatcctggacgagcactccaagttcctcaatggcgagctcatgaaccaactcctggacctgctccccctcgatccttacatcgaagctgctctatccccgatttcttctatcgtacagttggtggtgttggcagaggaggaggttatcaccaactcgcccaacaggtgtttgatgatttgcttcaacctcttacaaagatgtttcagctgggatgcagcaccacatcgtcagctttggccaccacctcatattcatgttgagttttggtgtggcagtgctgctctacgttcaattccatggccaccacccacttccttggatagtttgtatactaaagaattctattgtagagtgcaatttcctggatttggtagaacctttgtgttcaatgcagagattctaaaaagagttggacgtacatctgaagccaaagattcatctcgcgtggctctgaaatcatcatgggggacacttggctgcagtcatgaagaggctgctgaattagcttctttggtggatggatatcagttaatgcgtgcagcgtcagcatctgatcgggtgtcttcgctgaagaattatcaccacacactggggttatgcgaccattgggctgagaagaggtttaatggtcacaaatgtgtgcagttccacgccatcgaagaggtctgtgaatttttgtgtatggagggtagtccagaatagaaaccagactcaaatgaccagttgatattgacgctatattgtacagcgtggtcaggagcgcatgcggctgctacattttgtcttcgagattcgattcagcagcaagacgtattggtactgggtgatcaggcatcgtttatcaaggaaatcacggcaatcgtttgtcgagctggttcagg

SEQ ID NO: 90398 - DNA, 112 bp, Zea Mays
gtgatttacttttcattccgttacatttccgtatttacatttcatttattaattacagtcatatcttcatcatttacttgaccttctccttaaagaaggatgaatataaaga

SEQ ID NO: 90399 - DNA, 1165 bp, Zea Mays
gcacagcttcaccagctagctgaaactactagccccaacagcccccgcctctactcctcgcttccggcacgtgtcccgtcgcttctgcttgcgagttgcagacggctcgacgacccatcgatcgatcgaccgtgtcttcttcttgccggcggcggagacgagcgagctgctgtcaggtcggctgctagctgctagctgctgcaggcggcagccatggcgcacgggatcatcgggagccactaccactccatgttggcgtcgcgcgtgggcatggtcgcgcacgtgctgttcctgaccaccgccgtgctcatgctcgtctggctgctgcactaccgcggcggcatcaacatacagtccgaggaccccgagcagattttcaatgttcatccatttgtgatgtcctgggggttcattcttctgattggagaagcaatcctggcatactcgacgatcccttcgcacatagaccaccggacgcagaagatggcgcacatgctgatccacctggtggggctcatcctggccatcttcggcgtgtacgcggcgttcaagttccacgacgcggccgtggcgccggacctgacgagcctccactcgtggctcggcatcgccgccgtcgcgctcttcggcctgcagtggctgttcggcttcgtcaccttctggctgcccgccgcgcacgccgacacccgcgccgccgcggcccccgcgcacgtcatggccggcctggccatcttcatgctcgccgtgtgcgccgcgcagaccggcctcgtggagaagagcgccgcggccgcctccgccgccgagctgaagctcatcaacgtcacggggatcttcatcctcctctacgggctcactgtggcgtccgccgtcgcgctgcgcaaggcattcttgtaggcggcggcgcggatttgcattgcccggcccgcgcgcgtctgtttgctcggtcggcgctccgcatctcgctcgcgcgcgttccgccgttgacgtgacacggttggtgtttccctcgtacacgcgggagatggtttgtgggtggttcgctcgtgtaatgttgtgcatattgcgtgagttttctgcggctagtcggctaccacctgttgtatctctattctttccatgtcttcatcttttcttcttaaaaaaacacgcacttgagtttgtcttt

SEQ ID NO: 90400 - DNA, 1562 bp, Zea Mays
gattttttacttgtcgtgggccgtgtccagtgggtgatcctgtctctgacggtctgacccgtcgcctccctctccccttgacgtgcgggtgcggctcctcctcgccgacggcgccagcgccgcctccctcgccctctcggcatagaccggcgacggtagctgcatcttcgagtccgcagtggttgcagtgaaaactagaagggaagaacagcctcctaatggataggaacaacgaactggaagaggtggtcccaaatgactcggaccctcttattgggagggagaacagggagtcagagtcatcggtagagctgtcaccgccacagccagcaactgtgaacctgctggagattgaggatgaagagaccgacggctcttctgctgcgtgctgccgcatttgccttgagaatgagtctgagataggtgatgagctaatatcaccttgcatgtgcaagggaactcagcagtttgttcaccgttcttgtcttgaccactggcgatctgttaaggaaggatttgcattttcacactgcacaacttgcaaagctcagtttcatcttcgagtggaaacctgggaggataactcatggcgtaaaatgaagttcaggatctttgttgcaagggatgttctactcgtgtttcttgctgtacagcttactattgctatcatcggtgcgattgcatactttttagacagggatggaagtttccggaacagttttagcgatggttgggaccgcttcttgtcaaagcacccaatacccttctactattgcataggtgttgtggttttctttgtgctgcttggattcttcgggctgatagtacactgctcatccttcaacgacaaccaggatccatgcctagctgggtgccggaactgctgctatggttggggcatcctagactgcctgcctgcttccctggaggcatgctttgccctggttttggttttcgtcgttgtgtttgccatccttggcatcgcctatggcttcctcgctgcaaccatggcggtccagaggatttggcagaggcactatcacatcctgaccaaaagggagttgacaaaggaatacgtggtggaagaccttcacggcaactacacagcgccgaagcttgatccggagcatgaggaacggctgaagatgctgaagcttctttagagagaaagaggtgcacgccttcctgtatccgtggcaagtgcatcaacatggggcaatcctctctgcgtgccagattagggaatggtcatcccataacactgtacaaaatgatgaaatcctgcttggacttgtatgaattctctatcagacgaaacaaacagaagttctcagttttaccttctcggtaaccttcctcgacaacttggtctccgaaagtgtacgtgttcttctttactctttcccctttttttacaattgaaagtttgttgtctgaattgatctagcgatttcaatgatttcaataccttttagcgtccgaagcgaagatctcttacaatgtgcggtttgtgtaagtactgtggtaatatgcattctcataccattctagtgcctttcgca

SEQ ID NO: 90401 - DNA, 1551 bp, Zea Mays
ttttttacttgtcgtgggccgtgtccagtgggtgatcctgtctctgacggtctgacccgtcgcctccctctccccttgacgtgcgggtgcggctcctcctcgccgacggcgccagcgccgcctccctcgccctctcggcatagaccggcgacggtagctgcatcttcgagtccgcagtgaaaactagaagggaagaacagcctcctaatggataggaacaacgaactggaagaggtggtcccaaatgactcggaccctcttattgggagggagaacagggagtcagagtcatcggtagagctgtcaccgccacagccagcaactgtgaacctgctggagattgaggatgaagagaccgacggctcttctgctgcgtgctgccgcatttgccttgagaatgagtctgagataggtgatgagctaatatcaccttgcatgtgcaagggaactcagcagtttgttcaccgttcttgtcttgaccactggcgatctgttaaggaaggatttgcattttcacactgcacaacttgcaaagctcagtttcatcttcgagtggaaacctgggaggataactcatggcgtaaaatgaagttcaggatctttgttgcaagggatgttctactcgtgtttcttgctgtacagcttactattgctatcatcggtgcgattgcatactttttagacagggatggaagtttccggaacagttttagcgatggttgggaccgcttcttgtcaaagcacccaatacccttctactattgcataggtgttgtggttttctttgtgctgcttggattcttcgggctgatagtacactgctcatccttcaacgacaaccaggatccatgcctagctgggtgccggaactgctgctatggttggggcatcctagactgcctgcctgcttccctggaggcatgctttgccctggttttggttttcgtcgttgtgtttgccatccttggcatcgcctatggcttcctcgctgcaaccatggcggtccagaggatttggcagaggcactatcacatcctgaccaaaagggagttgacaaaggaatacgtggtggaagaccttcacggcaactacacagcgccgaagcttgatccggagcatgaggaacggctgaagatgctgaagcttctttagagagaaagaggtgcacgccttcctgtatccgtggcaagtgcatcaacatggggcaatcctctctgcgtgccagattagggaatggtcatcccataacactgtacaaaatgatgaaatcctgcttggacttgtatgaattctctatcagacgaaacaaacagaagttctcagttttaccttctcggtaaccttcctcgacaacttggtctccgaaagtgtacgtgttcttctttactctttcccctttttttacaattgaaagtttgttgtctgaattgatctagcgatttcaatgatttcaataccttttagcgtccgaagcgaagatctcttacaatgtgcggtttgtgtaagtactgtggtaatatgcattctcataccattctagtgcctttcgca

SEQ ID NO: 90402 - DNA, 1420 bp, Zea Mays
catttcctcgcgaatccacggctcctcggatgggatgtggttgcagtgaaaactagaagggaagaacagcctcctaatggataggaacaacgaactggaagaggtggtcccaaatgactcggaccctcttattgggagggagaacagggagtcagagtcatcggtagagctgtcaccgccacagccagcaactgtgaacctgctggagattgaggatgaagagaccgacggctcttctgctgcgtgctgccgcatttgccttgagaatgagtctgagataggtgatgagctaatatcaccttgcatgtgcaagggaactcagcagtttgttcaccgttcttgtcttgaccactggcgatctgttaaggaaggatttgcattttcacactgcacaacttgcaaagctcagtttcatcttcgagtggaaacctgggaggataactcatggcgtaaaatgaagttcaggatctttgttgcaagggatgttctactcgtgtttcttgctgtacagcttactattgctatcatcggtgcgattgcatactttttagacagggatggaagtttccggaacagttttagcgatggttgggaccgcttcttgtcaaagcacccaatacccttctactattgcataggtgttgtggttttctttgtgctgcttggattcttcgggctgatagtacactgctcatccttcaacgacaaccaggatccatgcctagctgggtgccggaactgctgctatggttggggcatcctagactgcctgcctgcttccctggaggcatgctttgccctggttttggttttcgtcgttgtgtttgccatccttggcatcgcctatggcttcctcgctgcaaccatggcggtccagaggatttggcagaggcactatcacatcctgaccaaaagggagttgacaaaggaatacgtggtggaagaccttcacggcaactacacagcgccgaagcttgatccggagcatgaggaacggctgaagatgctgaagcttctttagagagaaagaggtgcacgccttcctgtatccgtggcaagtgcatcaacatggggcaatcctctctgcgtgccagattagggaatggtcatcccataacactgtacaaaatgatgaaatcctgcttggacttgtatgaattctctatcagacgaaacaaacagaagttctcagttttaccttctcggtaaccttcctcgacaacttggtctccgaaagtgtacgtgttcttctttactctttcccctttttttacaattgaaagtttgttgtctgaattgatctagcgatttcaatgatttcaataccttttagcgtccgaagcgaagatctcttacaatgtgcggtttgtgtaagtactgtggtaatatgcattctcataccattctagtgcctttcgca

SEQ ID NO: 90403 - DNA, 1515 bp, Zea Mays
aataattttctttttaacgactgagagcctcgaatcctcctattattatgcaatagagttttttctgactgctccacgcgccgttccccttggaaatttcgaccgctttctcgatcgccacctacacgtctgtggttgcagtgaaaactagaagggaagaacagcctcctaatggataggaacaacgaactggaagaggtggtcccaaatgactcggaccctcttattgggagggagaacagggagtcagagtcatcggtagagctgtcaccgccacagccagcaactgtgaacctgctggagattgaggatgaagagaccgacggctcttctgctgcgtgctgccgcatttgccttgagaatgagtctgagataggtgatgagctaatatcaccttgcatgtgcaagggaactcagcagtttgttcaccgttcttgtcttgaccactggcgatctgttaaggaaggatttgcattttcacactgcacaacttgcaaagctcagtttcatcttcgagtggaaacctgggaggataactcatggcgtaaaatgaagttcaggatctttgttgcaagggatgttctactcgtgtttcttgctgtacagcttactattgctatcatcggtgcgattgcatactttttagacagggatggaagtttccggaacagttttagcgatggttgggaccgcttcttgtcaaagcacccaatacccttctactattgcataggtgttgtggttttctttgtgctgcttggattcttcgggctgatagtacactgctcatccttcaacgacaaccaggatccatgcctagctgggtgccggaactgctgctatggttggggcatcctagactgcctgcctgcttccctggaggcatgctttgccctggttttggttttcgtcgttgtgtttgccatccttggcatcgcctatggcttcctcgctgcaaccatggcggtccagaggatttggcagaggcactatcacatcctgaccaaaagggagttgacaaaggaatacgtggtggaagaccttcacggcaactacacagcgccgaagcttgatccggagcatgaggaacggctgaagatgctgaagcttctttagagagaaagaggtgcacgccttcctgtatccgtggcaagtgcatcaacatggggcaatcctctctgcgtgccagattagggaatggtcatcccataacactgtacaaaatgatgaaatcctgcttggacttgtatgaattctctatcagacgaaacaaacagaagttctcagttttaccttctcggtaaccttcctcgacaacttggtctccgaaagtgtacgtgttcttctttactctttcccctttttttacaattgaaagtttgttgtctgaattgatctagcgatttcaatgatttcaataccttttagcgtccgaagcgaagatctcttacaatgtgcggtttgtgtaagtactgtggtaatatgcattctcataccattctagtgcctttcgca

SEQ ID NO: 90404 - DNA, 604 bp, Zea Mays
atcattccttcctcccgctcgcttcgcttccttgccctcgctgctaccccacgaaaattctcgaatccccccgaaccaaagggcggcagaggagtcgtgctccggtgacgggcttggtttcgttcgcttccctctcgcagtctcgctgctgattcgccgccctgttcgcttgtttctcatgttcggaacgcggttactctctgtgggtttcgtcgtctgctgtgttttttttcgtgggagatcggtggcattttagtggcggaacctggggcttttcgcacgaatcgtttgcagcggggcgcaattgctcttgagatggaagttgaattgcatctgttgataatttctatcccttcctcccctttttgggagagattgggggtgcattcggaccatttccttcgtcttttgcagtatgttattttgcgttagccctatgattggttcaattgcataccctattgttgatacactgttttcatctggattttttgtgctaattttgaagggtgaacatcctggtcaattttgcgctgtgtatatagtactccgaccaagtcttgtacaagtgcaattctccatgcacctaatctcttagtcaatg

SEQ ID NO: 90405 - DNA, 118 bp, Zea Mays
ttttttttttcgttttgttcatcttctttttgcgagcctgaaaactctgaaggatgcatactcctacttgtttggtacacctactgttgcatcgccctttttgctatggcttgccggg

SEQ ID NO: 90406 - DNA, 3498 bp, Zea Mays
tggcccctgggatgggggtgggaggcggaggcggaggcggaggggaggccgcggcggtgtcggcgccggcgccggcggaggaggcggggaaggacgcggaggatggcagcgggtggaccttgaaggcgaagctgatcgccgtagcggtgctggtgtgggtgctgggggccttggcgctcggggtgttcctgcactcctacttccgccacgcggcgctgcgcaaggcggaggaggggctcgtcagcatgtgcgaggagcgcgcgcgcatgctgcaggaccagttcgccgtctccgtcaaccacgtccacgccctcgccatcctcgtcgccaccttccactacgagaagcgcccgcccgcgctcgaccagaacacgttcgcggactacaccgccaggacgtcgttcgagcggccgctgctgagcggggtggcgtacgcgcagcgggtggtgcacggcgacagggagagcttcgagcgccagcagggctggatcatcaagaccatgaagcacgagccgtccccggtgcaggatgagtacgcgccggtcgtctactcgcaggagaccgtctcctacattgaggggctcgacatgatgtccggcgaggaggaccgcgagaacattttgaggtcaagagcatcggggaaggcagttcttactagaccgttccggctcatgtcgaatcacctgggtgtcgtattgacttttcctgtctaccatgttgatctttcttctgatgccaaggaggaggatcgtgttgctgccaccgcaggataccttgggggatcatttgatgtagaatcattagtggaaaatttgttgaggcagctagctggcaatcaggaattggtggtaaatgtttatgatgtcacaaacagttcgaaccctcttgtcatgtatggatcggaagtttctcttggcaacccctcaccatcgcacatctgcatgctagattttggcgatccattcagaaagcatcatatggtttgcagatacagaaacaagcctcagctcccatggtctgcaatatcttcgtcatctggtgtatttgtcatatgtatgcttgtggggtacatcgtgggtgccgcttggagtcgttatgataatgttaaggaagattgccggaaaatggaggagctgaaaaaacaggcagaagcagccgatgttgctaaatctcagttccttgcaactgtttctcatgagatcagaacgcccatgaatggagttctagggatgcttgatatgctgttagacactgacctaacgtcgacccagagggattttgcacaaacagctcaagtctgtggaaaggctttaatatcactaatcaatgaagtgcttgacagagcgaaaattgaagccggaaagttggatcttgagtctgtaccatttgacctgagatccatccttgatgatgtcatctcattattttcttcaaagtcaagagagaagggaattgagcttgctgtatatgtctctgaaagagttcctgaactcttgttgggtgatcctggaaggtttcggcagataattacaaatttagtgggcaactcaattaagttcacagaacggggacatatttttgtacaagttcatctggcagatcactcaaatcttgcaacagaacccaaagttgagtcagtggctaacgggatgaatggacataaagatgagaaaactgctgtagcaaccagtgtttctctcaacacactaagtggttttgaagctgctgatagccgaaatagttgggaaaacttcaagcttttgctttcttatgagaaaaatgagatgccctatgaaagtgtatctgataaagttactcttgtagtaagtgtggaagatacagggataggtataccattggatgcccaagccaaggtgttcactcctttcatgcaggccgatagttcgacttccaggacatatggtggtactggaattggattgagcatcagcaaatgtctcgttgaactaatgggtggtcagataaactttgttagccgaccacatgttgggagtacattcacatttactgcagctctccaaagatgtgacagaagcgctattggtgacagtaagcctgttatgttgcaccctcttccatccagtttcaaaggtttatctgcattattggttgatagaagaccagtaagagctactgtaactaagtatcacttgcaaaggctgggaattgcctgcgatgttgttgctaccattgaattggctcttggtgtgctgtccgggagaaatggcagttctctaaccagcacgaagcaaccatgcatgttattgattgagagtgattcatggggcttcaagattgatgtacctttacgatctcgactcctggagatgaagcagaatggtccacctggattgcccaaaactatccttctcgcagctgcagaatcgggcaaactcaaagcacactatgcagttgattctgtgatcacgaagcctctgaaagcaagcggacttgccgcttgtctattccaaacacttggcatcacacagtcaagcaacgagagacgcgacaactcaggttcccttcatgggttgctccttggcaagaacatattggtggttgatgacaacaaggtaaatcttagagtggctgctggcacattaaagaaattcggagcgaaggtggagtgcgtggagagtgggaaagatgctctcgccagcctacaagttccacataagttccatctttgtctcatggacattcagatgcccgaaatggatgggttcgaggccaccaagcaaataagggcaatggaggcgaaggcaaatgagcaggcagtcgcctgtgatgattcagaaacggatggcgcgacaagggcggcgagatggcacctgcctgtccttgcaatgaccgccgatgtcatccaggccacccatgaggagtgcacgaagtacgggatggatgggtacgtcacgaagcccttcgaggagaagcagctcttccaggcgctgcagaagttcttggaccctggcatgtccagctaacacccaagtgctgcgttcgttgcaagtgaggcaccattctcctccgttctgtagttcgctaaccatagacgcaatctgattatctgaccccgaagaaagatcgtaaatggcgggctgctcgtcgaccatgccagcggggaacagcaggcagcacgcagcaggggcctttgctgcctgcctgtgcagtgcaggcgccgtgtaaatgtattgtattagcagggatcctgtttatagcgctagtatggacctgcgcgacaatgttggaggagctgcctgcggctgatgcacgtcgagcataattttgttgtacagcttccaccatttttgtgctactgtggcaggcatgctcgctggtgcagtgcaggactggaaggaaaacctgactgcctgagagtagtttttttttgccgtcaacattgcattgggattcgtgatgtattacaatctgctaatgtgcgatataagctcatgtaattggctcagtgcgtttcca

SEQ ID NO: 90407 - DNA, 1943 bp, Zea Mays
cgtgctctgactaccagcgagcccacggcgtcgccctttataactggggcccccaaccgaaacctctgctcgccgcaacgaattcccagtctccagccaaccaccgcagacaagatcctctattccgcgtccccaaaccctcgagttcgcacgggctccggccagattcgcgcagtctaagcttcgaatcggcgcatggaggcggcagcagtagccgcggcgctcaggtcgcctaccgccaccaccgccgccgccgccgctggccccacgtggcgggccgcggccccgggcgccgcctcgctcgcctttgaccggagacgcagcttcgccttcggctccatcaagggtctcgggcggcagcagctcacctctaggtctactaggaggcgaagcagtgtggtcagggcatcctggtccccctcggagtctctgccaccgtcctcgtcgatcgcgcctctcaggatggaatcgccggcggggcagctactctcgcaaatcctgcacacgcacccgcacttgctgtctgccgctgccgagcagcagctcgagcagctccagaccgaccgcgaggccgacaaggagaaggataaggagagcgatgctggcgacaagctggctccgacaggtggcgacctcgtgctgtacaggcggattgctgaagtaaaagagaaggaacggagaaggactttggaggagatactctatgctctggttgttcagaagttcgttgaagctggtgtctctctggttccagcactctcacgctccaccgatccttctggaagagttgatcagtgggcagaaactgtggaagaaaagcttcaacgtctgcactcgcatgaggcctatgaaatgatcgagaatcacctcaccctcattctggggcagcgtcaaggtgacgccactatcgcagccataagtaagctccgtgttggccaggtctatgctgcatctgtgatgtacggttatttcctgaagagagttgaccagaggttccagctcgagaagacaatgaagggcctcccttgggggtcagaagaggaagacagcgctttgaatcaagttatgatgaccgacttgatgccttcagctcagacttctagctctcatccagagatgggctcgtggaccgcgcctgccttcagcacaggagggcccagccaatctatcaagccttgccgccttaggtcgtatgtcatgtcgtttgattccgatacgctccagaggtatgcgacagtcaggtcaaaggaggccttcggcatcattgagaagcacacggaagcgctatttgggaagccagagattgtgatcacacctgaaggcacccttgattcttccaaggatgagcatattaggataagctttgctgggctgagaaggctgatcctggaggctgttaccttcggatcgttcctctgggacgttgagagctttgtggattcccggtaccatttcgtgaccagctaagatggtcatcctaagtgaagaacgattcatggtttacggatcttgtctcacaatgtctatgggcttcggaaaggctgttgtacaatgatgttagactgttaccactccccttaggccatgtttttcaccgttaatatatgtgaattggatggtattgagttgatttaaattcatagcaagtcaaaatacatctcaatccattccaatatttgtttaatccacataaaattgaaataaccgaacaagaacttagtgtatacgatggtatcaatggtttgcccagttttattgcatcacagtattgtaaagaccaaatgtcattagcctgatattcagacgataggttttagtaacatctgtgctgcccgggggtcggggtgctgtgttttctgattataccctctgcaaattgtaaggaattatatgctcctagccaattctttagcgaagctatcattctcgttgcagattgccgt

SEQ ID NO: 90408 - DNA, 1365 bp, Zea Mays
actaattgtttcctgtgacttggattattggagagatgttggctaatttcccttgttttcttgaaataggcggattgctgaagtaaaagagaaggaacggagaaggactttggaggagatactctatgctctggttgttcagaagttcgttgaagctggtgtctctctggttccagcactctcacgctccaccgatccttctggaagagttgatcagtgggcagaaactgtggaagaaaagcttcaacgtctgcactcgcatgaggcctatgaaatgatcgagaatcacctcaccctcattctggggcagcgtcaaggtgacgccactatcgcagccataagtaagctccgtgttggccaggtctatgctgcatctgtgatgtacggttatttcctgaagagagttgaccagaggttccagctcgagaagacaatgaagggcctcccttgggggtcagaagaggaagacagcgctttgaatcaagttatgatgaccgacttgatgccttcagctcagacttctagctctcatccagagatgggctcgtggaccgcgcctgccttcagcacaggagggcccagccaatctatcaagccttgccgccttaggtcgtatgtcatgtcgtttgattccgatacgctccagaggtatgcgacagtcaggtcaaaggaggccttcggcatcattgagaagcacacggaagcgctatttgggaagccagagattgtgatcacacctgaaggcacccttgattcttccaaggatgagcatattaggataagctttgctgggctgagaaggctgatcctggaggctgttaccttcggatcgttcctctgggacgttgagagctttgtggattcccggtaccatttcgtgaccagctaagatggtcatcctaagtgaagaacgattcatggtttacggatcttgtctcacaatgtctatgggcttcggaaaggctgttgtacaatgatgttagactgttaccactccccttaggccatgtttttcaccgttaatatatgtgaattggatggtattgagttgatttaaattcatagcaagtcaaaatacatctcaatccattccaatatttgtttaatccacataaaattgaaataaccgaacaagaacttagtgtatacgatggtatcaatggtttgcccagttttattgcatcacagtattgtaaagaccaaatgtcattagcctgatattcagacgataggttttagtaacatctgtgctgcccgggggtcggggtgctgtgttttctgattataccctctgcaaattgtaaggaattatatgctcctagccaattctttagcgaagctatcattctcgttgcagattgccgt

SEQ ID NO: 90409 - DNA, 754 bp, Zea Mays
gattggggtacaaatatcatgcaatagatcaaaggaatgaaaaatctcacacaacactactcttcttttgtccattgtggcaacagtaccaaggtagtgtcttcttttatcctcctaagtaaaatggcaaaggaaccaattcagccgagggcaattaattaaattagatggcaatgaataagaagtatcatgtgagcagattaaaaagtaccacacaagaccaaaaaaatctcatctgatctgctttggccgtgaggcatgggccgcctctagtgatgagattgaggagaggaggtgagaagcatgaaacgtagagcaacagaggacgatgaccgtggggtggacgtggagcctggatgaggtcagctctgtaggctcactcactatggtagatctaggcaatggaggagccctagacatcgatgtggaggtggaggccaacgcgaatatggttccagaggctgaagacaggcgcagacgcggggaggtagggcgacgggacgacagatggagtgaggaggaagcacgggcggcgaatcgagggggggtgaagagccgaagaggaagcgaggggaaacatgcagagcggggatgggatggcagatggatcgagacggaagaacgagcggttgatcgatggggaggaagaggtgaagaggaagcagagcggcagatcaagaggggcgctgcgcggcatgggaggagcgagaggccgggaggggagaccgggagaggagcatggcagccggtctaa

SEQ ID NO: 90410 - DNA, 2227 bp, Zea Mays
cccacatccaatcctggggaagacgcgaacccggctccgcggcacgagttgtccgcacgtacggcacgtcggggctggctcgtccgcccgcgagtgggaggccactgtttcctctgcctcaccgggtcgtgtggcggaggggcgtggggccatggttcgcagcgcggggcgacgagcgcgctcctcctctcgcgcagcgccagcgccaccccgcaccgtggctttatatacacccctcctcccaaccctaccgaatcatcactaccaccgctctctcttcctctcctccatctctcaacgcctgaagctcaccgcacctcccctcctcgccgcggatcccccactactccggtaaccgtctctccattcaccctgcctgctgtctcgctagaatcgcctgcctctgccagcgccgtgacgcgggggcgcggtatggctctcccagatccgcctggcattgctcgctcgggtcgtgccaggccgatctgatctcgcatttgctgcgcgctcctcctgctgcggatcccaccggatctcgctggaatcggagcgcgcgtctctttgaaatgccgcagatctgcgtgcttgcgcgcgtgatctaagtccgggcctttcgttaacgaaatggtccgatctgtggtttggtggaggcaatgccatggtttttccccgtgaattttttttgctgattttaggagcttttttctactgtcctatgttagtaggacaaaaaaaaagaaacatagattagcttcaataggcgccttttagaacagattctgtacagcaactcgtggaaacaaatctgcttccttaatgatgttgcttgttttaacaaatgcggcatcgggcgagcttttctgtaggtagaaaatggctgacgctgaggatatccagcccctcgtctgcgacaacggaactggcatggtcaaggctgggttcgccggcgacgacgccccgagggccgtcttccccagcatcgttgggcgcccgcgccacaccggtgtgatggtggggatggggcagaaggatgcctacgtcggcgacgaggcgcagtccaagaggggtatcctgaccctcaagtaccccatcgagcacggaatcgtcagcaactgggacgacatggagaagatctggcatcacaccttctacaacgagctccgtgtggctcccgaggaacaccccgtcctcctcactgaggcgcccctgaacccaaaggctaaccgtgagaagatgacccagatcatgttcgagaccttcaacacccccgctatgtacgtcgccatccaggccgtcctgtctctgtatgccagtggtcgtaccacaggtatcgtgctcgactcgggagatggtgtcagccacactgtccccatctacgagggatacgccctcccccacgccatccttcgtctcgacctggctggccgcgacctcaccgactacctcatgaagatcctgactgaacgcggctactccttcaccaccactgctgagcgggaaattgtcagggacatgaaggagaagctcgcctacattgccctggactacgaccaggagatggagactgccaagaccagctcttctgttgagaagagctacgagctgcctgacggacaggtcatcaccattggtgctgagcgcttccgctgccctgaggtcctcttccagccatccttcattgggatggaagctgctggtatccacgagaccacctacaactccatcatgaagtgcgacgtggatattaggaaggatctgtatggcaacatcgtcctctccggtggtaccactatgttccctggcattgctgacaggatgagcaaggaaatcaccgccctggctcctagcagcatgaagatcaaggtggttgctcctccagaaaggaagtacagtgtctggattggaggatccatcctggcatcgctcagcaccttccagcaggtaaacaaacgcagcagcggccaaaaaataaaaaaaacgcattccgatttccccaaatccgatctatacctgcttacgattttgcttccatctgcagatgtggattgccaaggctgagtacgacgagtctggcccgtccatcgtgcacaggaaatgcttctaattctttgggcccaagagatgcaaagccgagaggagccattatcgccagcctcccgccccgtttctttctccttttgttgctgtttcttcattagcatgaacaaagttttctgccggtctatcg

SEQ ID NO: 90411 - DNA, 1935 bp, Zea Mays
cccacatccaatcctggggaagacgcgaacccggctccgcggcacgagttgtccgcacgtacggcacgtcggggctggctcgtccgcccgcgagtgggaggccactgtttcctctgcctcaccgggtcgtgtggcggaggggcgtggggccatggttcgcagcgcggggcgacgagcgcgctcctcctctcgcgcagcgccagcgccaccccgcaccgtggctttatatacacccctcctcccaaccctaccgaatcatcactaccaccgctctctcttcctctcctccatctctcaacgcctgaagctcaccgcacctcccctcctcgccgcggatcccccactactccggtagaaaatggctgacgctgaggatatccagcccctcgtctgcgacaacggaactggcatggtcaaggctgggttcgccggcgacgacgccccgagggccgtcttccccagcatcgttgggcgcccgcgccacaccggtgtgatggtggggatggggcagaaggatgcctacgtcggcgacgaggcgcagtccaagaggggtatcctgaccctcaagtaccccatcgagcacggaatcgtcagcaactgggacgacatggagaagatctggcatcacaccttctacaacgagctccgtgtggctcccgaggaacaccccgtcctcctcactgaggcgcccctgaacccaaaggctaaccgtgagaagatgacccagatcatgttcgagaccttcaacacccccgctatgtacgtcgccatccaggccgtcctgtctctgtatgccagtggtcgtaccacaggtatcgtgctcgactcgggagatggtgtcagccacactgtccccatctacgagggatacgccctcccccacgccatccttcgtctcgacctggctggccgcgacctcaccgactacctcatgaagatcctgactgaacgcggctactccttcaccaccactgctgagcgggaaattgtcagggacatgaaggagaagctcgcctacattgccctggactacgaccaggagatggagactgccaagaccagctcttctgttgagaagagctacgagctgcctgacggacaggtcatcaccattggtgctgagcgcttccgctgccctgaggtcctcttccagccatccttcattgggatggaagctgctggtatccacgagaccacctacaactccatcatgaagtgcgacgtggatattaggaaggatctgtatggcaacatcgtcctctccggtggtaccactatgttccctggcattgctgacaggatgagcaaggaaatcaccgccctggctcctagcagcatgaagatcaaggtggttgctcctccagaaaggaagtacagtgtctggattggaggatccatcctggcatcgctcagcaccttccagcagatgtggattgccaaggctgagtacgacgagtctggcccgtccatcgtgcacaggaaatgcttctaattctttgggcccaagagatgcaaagccgagaggagccattatcgccagcctcccgccccgtttctttctccttttgttgctgtttcttcattagcatgaacaaagttttctgccggtctatcggcggccgctttctcctattcatcaagactgtaatgtctattgctacctaatgtttctcactttgtcattttggacacatgttcgacctattcaattttaatgagatgcctgatgaggctacttgcaaaaatacatgtggtgttctcaatgaataatatcaaatgttgagctctctatgcctgtgtaaacttgtgtgcctcgttgcatttgccttttgaattttggtcccagtccctcccctgttccatcagattccttcctgtcttgggtgtgctgctgctgcgtggaccaagagtaattctgtccaggctttagcagcg

SEQ ID NO: 90412 - DNA, 1742 bp, Zea Mays
gcacgtacggcacgtcggggctggctcgtccgcccgcgagtgggaggccactgtttcctctgcctcaccgggtcgtgtggcggaggggcgtggggccatggttcgcagcgcggggcgacgagcgcgctcctcctctcgcgcagcgccagcgccaccccgcaccgtggctttatatacacccctcctcccaaccctaccgaatcatcactaccaccgctctctcttcctctcctccatctctcaacgcctgaagctcaccgcacctcccctcctcgccgcggatcccccactactccgaaaatggctgacgctgaggatatccagcccctcgtctgcgacaacggaactggcatggtcaaggctgggttcgccggcgacgacgccccgagggccgtcttccccagcatcgttgggcgcccgcgccacaccggtgtgatggtggggatggggcagaaggatgcctacgtcggcgacgaggcgcagtccaagaggggtatcctgaccctcaagtaccccatcgagcacggaatcgtcagcaactgggacgacatggagaagatctggcatcacaccttctacaacgagctccgtgtggctcccgaggaacaccccgtcctcctcactgaggcgcccctgaacccaaaggctaaccgtgagaagatgacccagatcatgttcgagaccttcaacacccccgctatgtacgtcgccatccaggccgtcctgtctctgtatgccagtggtcgtaccacaggtatcgtgctcgactcgggagatggtgtcagccacactgtccccatctacgagggatacgccctcccccacgccatccttcgtctcgacctggctggccgcgacctcaccgactacctcatgaagatcctgactgaacgcggctactccttcaccaccactgctgagcgggaaattgtcagggacatgaaggagaagctcgcctacattgccctggactacgaccaggagatggagactgccaagaccagctcttctgttgagaagagctacgagctgcctgacggacaggtcatcaccattggtgctgagcgcttccgctgccctgaggtcctcttccagccatccttcattgggatggaagctgctggtatccacgagaccacctacaactccatcatgaagtgcgacgtggatattaggaaggatctgtatggcaacatcgtcctctccggtggtaccactatgttccctggcattgctgacaggatgagcaaggaaatcaccgccctggctcctagcagcatgaagatcaaggtggttgctcctccagaaaggaagtacagtgtctggattggaggatccatcctggcatcgctcagcaccttccagcagatgtggattgccaaggctgagtacgacgagtctggcccgtccatcgtgcacaggaaatgcttctaattctttgggcccaagagatgcaaagccgagaggagccattatcgccagcctcccgccccgtttctttctccttttgttgctgtttcttcattagcatgaacaaagttttctgccggtctatcggcggccgctttctcctattcatcaagactgtaatgtctattgctacctaatgtttctcactttgtcattttggacacatgttcgacctattcaattttaatgagatgcctgatgaggctacttgcaaaaatacatgtggtgttctcaatgaataatatcaaatgttgagctctctatgcctgtgt

SEQ ID NO: 90413 - DNA, 1450 bp, Zea Mays
gcacgtacggcacgtcggggctggctcgtccgcccgcgagtgggaggccactgtttcctctgcctcaccgggtcgtgtggcggaggggcgtggggccatggttcgcagcgcggggcgacgagcgcgctcctcctctcgcgcagcgccagcgccaccccgcaccgtggctttatatacacccctcctcccaaccctaccgaatcatcactaccaccgctctctcttcctctcctccatctctcaacgcctgaagctcaccgcacctcccctcctcgccgcggatcccccactactccggtagaaaatggctgacgctgaggatatccagcccctcgtctgcgacaacggaactggcatggtcaaggctgggttcgccggcgacgacgccccgagggccgtcttccccagcatcgttgggcgcccgcgccacaccggtgtgatggtggggatggggcagaaggatgcctacgtcggcgacgaggcgcagtccaagaggggtatcctgaccctacgagggatacgccctcccccacgccatccttcgtctcgacctggctggccgcgacctcaccgactacctcatgaagatcctgactgaacgcggctactccttcaccaccactgctgagcgggaaattgtcagggacatgaaggagaagctcgcctacattgccctggactacgaccaggagatggagactgccaagaccagctcttctgttgagaagagctacgagctgcctgacggacaggtcatcaccattggtgctgagcgcttccgctgccctgaggtcctcttccagccatccttcattgggatggaagctgctggtatccacgagaccacctacaactccatcatgaagtgcgacgtggatattaggaaggatctgtatggcaacatcgtcctctccggtggtaccactatgttccctggcattgctgacaggatgagcaaggaaatcaccgccctggctcctagcagcatgaagatcaaggtggttgctcctccagaaaggaagtacagtgtctggattggaggatccatcctggcatcgctcagcaccttccagcagatgtggattgccaaggctgagtacgacgagtctggcccgtccatcgtgcacaggaaatgcttctaattctttgggcccaagagatgcaaagccgagaggagccattatcgccagcctcccgccccgtttctttctccttttgttgctgtttcttcattagcatgaacaaagttttctgccggtctatcggcggccgctttctcctattcatcaagactgtaatgtctattgctacctaatgtttctcactttgtcattttggacacatgttcgacctattcaattttaatgagatgcctgatgaggctacttgcaaaaatacatgtggtgttctcaatgaataatatcaaatgttgagctctctatgcctgtgt

SEQ ID NO: 90414 - DNA, 887 bp, Zea Mays
atgcatcagcaacagcaccaggagcggccgcgggaggtgtaccgcgagtgcatgcgcaaccacgcggcgaagctcgggacatacgcttctgacggatgctgcgagtacacccccgacgacggccagcccgcaccgatgctctgcgccgcctgcggctgccaccgcaacttccaccggaagacgttcctggacgccgcggcgggggcgcacggcgcgatgctgccctcccctgctggcgcctccccgggctacggcagtggcacgcaccacactgcgactactgcggccggcatgggcggtgacgccggcgcgcacggctccgggggcaggcggcggacgcggacaaagttcacggaggagcagaaggagtgcatggcgcggttcgcggagcggctcggctggcggatgcccaagcgggagcccggccgcgcgccgggggacgacgaggtgggccgcttctgccgagagatcggggtcaccaggcaagtcttcaaggtgtggatgcacaaccacaagtccggcggcggcagcggaggcgccggcgccggcgccggcggggccgctcagacgtcgtcgtccacgacgcgtggcggcgggagcggcgccgttggaggaggcgggagcatgtctccggcgatttgcgcggacgtcgaggacgacgaggaggtgatgaggggcagtggaatgtgcatgtagtcgcgcccgcgctgcatatgtggctcgcgcggcggcaatggcatggcctggctggctggctgcgaacctgcgaccgatcatcgatgattaaccaagccttttgctgctaattcctttcggtgattttgcttctatgagttgattaattgttgatgatatgaaatattcattgttataaaggctttgctaat

SEQ ID NO: 90415 - DNA, 652 bp, Zea Mays
ccaattcccataccagactggaaggcagaagcgcccgcacaggcacagcactactcgaagcaagaactatagcagctgctgctcctgtacaccaagcgtacgtgcaaatacaaatacaatggccaccaaaagcatcgcctcgctgctcgccgtggccctgctgctgctgctctcctccccggccgccgtcgtcgtcgtccgcgcgcagcagcagcagcggggcaacccgtgcccgacgaacgcggtggcggacctcaaggtgtgcgccgacgtgctggtcctgctcaagctcaagatcaacgtgccgcagagccagcggtgctgcccgctgctgggcagcctcgtcaacctcgacctggccgcctgcctgtgcgccaccatcaggctcaacgtgctcggcatccccgtcaacctgccgctcgacgtgcccctcgtgctcaactactgcggccggaacgcgtccgccgtgccgggctccaactgttccttctgaggcatgttcgatcgatcggcaaccccgctccaattgtaagttggctagtttgttatatgcgggccgggtactgtataacagcagctgcttggaaataaaaagcgtgtaatgaccttactcaacatcatggcaagtacaatttctgaatgctaccaacaa

SEQ ID NO: 90416 - DNA, 766 bp, Zea Mays
ataacattgaattacaaataccttcagcttggaattatatgagagtacaggtgtggcgcaaaagcaaatgccagatcagcgtgaccagtacgggcgtactgttcacctatttataggcacaggacacaacccatacaaaattacatttatgccctttacatttgataataattctatagtaatctatcgaggtctgaatagccttttcatctttaagtcggtttcatttttgctaccacgccgaagctttcctgctcccaccttcggcgctgtatcaaccttcgtattattctggtctgctgtgataccgatttgagtccgaagatacctgttcacacattatactccagaaatactgttaaatcctgtttttgaggaccttcgtaagccgaaggcccccaacacagtgcatcacgaccggtcaaaacatatagatacaagatttcatttgatccgggagtatgcaaattcaggccaaattgaagtgaagttcatcaggacagaggagcagcttggggacattctcacgaagcctctcggcaaactgaagttcagagaactctacatgaagattggccttcgatcagcacagtagtatatgcacaagtattaggaggagaattgttgaaataatccttgtgcatgggtcttagttagtttacttaaggctgttgttttttttattcccaggttaggcgtatagtcatctattggctgtacgtgtagtcgtggccggcatacctatgtgtgggatggcacacaaagt

SEQ ID NO: 90417 - DNA, 760 bp, Zea Mays
ttgaattacaaataccttcagcttggaattatatgagagtacaggtgtggcgcaaaagcaaatgccagatcagcgtgaccagtacgggcgtactgttcacctatttataggcacaggacacaacccatacaaaattacatttatgccctttacatttgataataattctatagtaatctatcgaggtctgaatagccttttcatctttaagtcggtttcatttttgctaccacgccgaagctttcctgctcccaccttcggcgctgtatcaaccttcgtattattctggtctgctgtgataccgatttgagtccgaagatacctgttcacacattatactccagaaatactgttaaatcctgtttttgaggaccttcgtaagccgaaggcccccaacacagtgcatcacgaccggtcaaaacatatagatacaagatttcatttgatccgggagtatgcaaattcaggccaaattgaagtgaagttcatcaggacagaggagcagcttggggacattctcacgaagcctctcggcaaactgaagttcagagaactctacatgaagattggccttcgatcagcacagtagtatatgcacaagtattaggaggagaattgttgaaataatccttgtgcatgggtcttagttagtttacttaaggctgttgttttttttattcccaggttaggcgtatagtcatctattggctgtacgtgtagtcgtggccggcatacctatgtgtgggatggcacacaaagt

SEQ ID NO: 90418 - DNA, 309 bp, Zea Mays
gtgccacccagtaagcttggtcatggctgcgttccactcagagcaccatccgaactggtcggcgccaaatatcggaggaatgagcgggttcgggttgtgaatgatggccctgtagtccccctcaacccgggtaaatttgtccatgaccaacttatgaacagtcatatcctgggctacaaagcacaccccaacaacatggtcatgcatgtcacggctggcacaagcatttacaaccaagataacagggccatcgtccctcttggagccatgggttttcaactcaaatcgaacctccttctcttctctgcc

SEQ ID NO: 90419 - DNA, 515 bp, Zea Mays
gaggtcgcgcgtatcgcctgggccgcaccttcgcgtcgtgccgtggccgtaagtccgcgctgctgccggtcgcggggccgcgcgcctgcgcagggattccctcgccggggccacgcgcccgtggagccacgccccaggggcctcgccgtcgcctgcttggccggggctgcgcgccgccgggccgcaccggcgtcgagccgtggccgggccgcccgttggcgagccagggacggggggcctgcccgcgcgcgctctcggagctgtgcacccgcgcgccgcgccaccgtgggcagccgcgccacgggaaggcacgccgggaccggagccgccagggccagggctatagccgccgctccacgggaagccgccgtggccgggccgccgtgccgtggttggggccggccacgccaaggctgctcgcgcccaccggccggggctgcgcatcgccgaaccgcgcccgcgcccactggttgtccgagcctgcgccgccgttgcactgcgcatgctgcaggtag

SEQ ID NO: 90420 - DNA, 1972 bp, Zea Mays
gaccgcgtcgggcatcggttcctgctctgtgctatactgctatcccctcccccaagccgccaccaccaccagcagcggaaccccccgccctcgttcctcccccgccggcgagagatcgacgagatggtgctgtcacacggcgtcggtggctccgatgagtccgtccactcgacgttcgcgtcccgctacgtccgcacctcccttcctaggtaccggatgccggagcagtcgatccccaaggaggcggcgtaccagatcatcaacgacgagctgatgctggacgggaacccgcggctgaacctggcgtccttcgtcaccacgtggatggagcccgagtgcgacaagctcatccaggcctccgtcaacaagaactacgtcgacatggacgagtaccccgtcaccaccgagctgcagaaccggtgcgtgaacatgatcgcgcatctcttcaatgctcctctcggggacgctgaaacggctgttggagtgggcaccgtcggctcgtccgaggccatcatgctggctgggctggcgttcaagaggcgttggcagaacaagatgaaggcggccggcaagccctgcgacaagccaaacattgtcaccggcgccaacgtccaagtttgctgggagaagttcgcgcgctacttcgaggtcgagctgaaggaagtgaagctgagcgacggctactacgtcatggacccgcagaaggcagtggacatggtggacgagaacaccatctgtgtcgcggccatcctcggttccacgctgaacggcgagttcgaggacgtgaagctgctcaacgacctgctcaccaagaagaacgcggagacaggctgggacacgccgatccacgtggacgcggcgagcggcgggttcatcgcgccgttcctgtacccggaactggagtgggacttccgactgccgctcgtgaagagcatcaacgtcagtggacacaagtatggtctggtctacgccggcatcgggtggtgcatctggaggaccaaggtggacctgccggaggagctcatcttccacatcaactacctcggcgccgaccagcccaccttcaccctcaacttctccaaaggttccagccaggttattgcacagtactaccagctgatccgccttggctttgaaggttacaagaacatcatggagaactgccaggagaacgcgacggttctgaagcaaggtctggagaagacggggaagttcaacatcgtgtccaaggacaacggcgtgccgctggtggccttctccctcaaggacagcagccggcacagcgagttcgagatctccgacttcctgcgccgcttcgggtggatcgtgccggcctacacgatgccccccgacgcgcagcacgtgaccgtgctccgcgtggtcatccgcgaggacttcagccgcaccctcgcggagcgcctggtgctcgacatcgagaaggttctgcacgagctggacgcgctgcccgcccgtgtccccagcggcgacctagccgcgctcgccgcggccgagtccagcgagagggagatggagaagcagcgccaggtgatctcgctctggaagagggccgtcctcgccaagaagaagaccaacggcgtctgctaagcagccgagccgacgcatttctggccgtattggcatggggtgaaatttgtctgagtacgcgtttgcagtttttacccgggtgaagattgttatgtgtcgaggttgagttttagaggacggaattgctccggctcggtgtatgtagcgagtgttttacgtgctcaacaactctcagacttccctcccctcttgcatgtaagctgtaagtcgatgcaaataatgttgcgtgtcgagcgacgattagtaatagtacctgatggggtacttgtattagtattgatatttgaattacactatacattatgtgacatactattaatattgctcgacaaagtaatattatcggctcctgtttgattttctaact

SEQ ID NO: 90421 - DNA, 1192 bp, Zea Mays
tgacctctctctacatccttttgtttgttgccctcctccccatatcatcctcccttgttcgtcatcgtctctccctcagctccctccagccgccgattaatcgatcgatcacctattcacctagctagccggccagttgctggttctcttcttcgcatgctgccgattaatttattccacgctcgattgcggtggcggctttagttaatagttatagggagcttcaagatagcaagcaagaaacggtgcaggattattggaggaatagagcttcaattcagatagcagctgcaggctgctgttgattcggcgatcggtcgatcgaggatgtgcacgaggggccactggaggccgtcggaggacgagaagctgaaagagctcgttgcgctgtacgggccgcacaactggaacgccatcgccgagaagcttcaagggagatcagggaaaagctgcaggctgcggtggttcaaccagctggacccgaggatcaaccggagccccttctcggaggaggaggaggagctgctcctcgcctcccaccgcgtccacggcaaccgctgggccgtcatcgccaggctgttcccggggcgcaccgacaacgccgtcaagaaccactggcatgtgatcatggcgcggcggtgcagggagcggatgcggctgtcgaacaggcgtgccggcggcgctgctgctgctggtgctggtgccgtcgtcgtcgccaccggtgctgctgccgaagatggcagtaaccctaggagcgccaataagaagccgaggcctgacgcgagcggcatggcctccttgctagacaagtaccgaagagaattttccgccgtcccgtttgccattaaccatgatagcaatcagcagcagggctattgttcaaatactaacgaagacgcaaacaaatcagtcgaattctacgatttcctccaagtgaacgcgaactcgagcgacaccaagtgtggttcgagcattgaggagcaagaggcggagagccgggatgacgatcaagccgaagggcaggtgcagttcatagatttcctggaggttggggcttcccatcgccgccggtgatttttatctatatatttaactagggatgcatccaaagcaggttgtaatgctttgtgaaagaggcaggcatgctgcaaatagcaatcgtcgtctaacaccaaacgtacttgtagaggaa

SEQ ID NO: 90422 - DNA, 174 bp, Zea Mays
gtctcccaaactttttgtggtatgttgctacactatgtagacctatatttatcatttgtggacaattataacagagttttcaatagctagtagatttagttcgtttatttgaattttttcgaaaaatttagatttgaactgcaggtcactcgaaacttagaaaactgtgcatac

SEQ ID NO: 90423 - DNA, 984 bp, Zea Mays
atggcggcggtcaacctcctcgctgagtccgccgcagtgcgcttgcgcgcgccggtgccaccgggcgcgggggaggagctcacggccaggctcacggagcgggttcccagccacggcgtgctgagggggagcggccacgggggctggggagagcgcacgcaagtggagggagatggcggccaggaaggaggaactcctgctgcggagccgggaccgagtcgcgttcgtgttgccgaagagcgggcccgatatgctggagctggagaggtttccaagatcgaaggtaggttgaaaaatgggtattatgctcgccatggctttcgtaccatcaagcatgacatccgtaccatgtgccaagatgcattgagatataaagatggctatgatttggatgatgtaaagcaaattgttgtctccttcatacaactagcaaagagactagggaacccaaggtacatttctgagagaaacggagtagcagcccaggatagcctggacattagtcaatattcatttgatactaaactcaaaaagaagcaaaacaaaacaagagcaaatttggtggctgctggagcagataattcatctcgtgcatttgaccttgaaatcaaaagaagcctgtctaaattaaagaaaaaggatgtctgctctggtagtgaaacatctgatgatgatggctactctgaaggtgatgaaactgagagtgaaactaccgtttctgatactgagagtgactttgatgtaaattctggagcctgggatttaaaaggaaatggcctaaaattaactgaacatggggagtctgtgatcgatgatcgtatattaggtgcccgcatgacaaagaggaagtctatagaatcaagtcagcttgtcactcattcaattgatgagattctgtattggcacaatgctgttccgagagaactaagtgatatagcagaggagactaaaaggatacatcagtctggaatttttctgacatag

SEQ ID NO: 90424 - DNA, 91 bp, Zea Mays
tttactgatttcatatctcccattttcaactttcaaaattccaaattcaacttgagttcaattttaaacttaaaatttccaattaagtgca

SEQ ID NO: 90425 - DNA, 1044 bp, Zea Mays
gatgcactttctacccttttctctctgtacattcgtgatcttggccctgctgttgaatttggagatgcacactggcttggaagacagggtattgcattagcgctccactctaccgctgatgttttggccgctaaagatcttcctgttgtcatgacatttctcatctcacgtgccttggctgatccaaatgttgatgttcgtggtagaatgattaatgctgggatccttattattgataggcatggaaaggaaaatgttcctttgctatttcctatttttgagagctacttgaataaaagggcatcagacgaggaaacatatgatcttgtgagggaaggtgttgttattttcactggtgctctggccaaacatctatcaaaggatgatcccaaagttcatagtgtcattgagaagttgttagatgtccttaacaccccatcggaggcagttcaacgtgctgtctcagattgtttgtccccacttatggtatccaaacaggaagagggtcaaactcttgtttctagactcttggatcggatgatgaaatgtgaaaaatatggtgagcgacgtggtgcagcttttggccttgctggtgtggttaaaggatttggaatttcttccttgaaaaaatatggcattgctgcaacattgcagaaaaatttggaagacagaatgtctgcgaaatctcgtgaaggagctttacttgggtttgagtgcctgtgtgagaagctcggcaaactatttgagccgtatgtcattcaaatgcttccattcctacttgtgtctttctctgatcaagtcctagcagtgcgtgaagctgccgagtgtgctgctcgggcaatgatgtctcagctcactggtcctggtgtgaagcttgtccttccttcacttcttaagggtctagaagataaagcatggcgtactaagcaaagcagcgttcaacttcttggtgccatggcatattgcgctcctcaacagctatctcagtgtcttccaaagattgttccaaagttaacagaggtatatgacacaatttctttttga

SEQ ID NO: 90426 - DNA, 419 bp, Zea Mays
ggcttccgttcgtgatggacatcttacacttttccggtatttgccaaggtccttgggtggtgttttccagaattatctgcaggctgttcttcctgctatattagatgggcttgctgatgagaacgaatctgttcgtgatgctgcactttctgctggtcatgtctttgtggagcattatgcaactacgtcattacctctgttgcttcctgctattgaggatgggatcttcagtgataattggcgtatccgacaaagttccgttgaacttcttggggatctcttatttaaggtcgctggaacttctgggaaggcaatccttgaaggtggaagtgatgatgaaggtgctagtacagaggctcaggggcgtgctattattgaagtacttggaagggagaaacgcaatgaagttcttgccgcca

SEQ ID NO: 90427 - DNA, 1170 bp, Zea Mays
gtccgaacagcagctgttttaccccatatattgcccaaattagtccagccccctctctcttcatttaatgcacatgcattaggtgctctagcagaggttgctgggccaggtttgaattcacatattagaactgttctcccagcattgattcttgctatggatgatgaagatgtggatgtaaaaaactcagccaggaaagctgctgaaactgttctgttggttattgatgaggaaggagttgaaactttgatacctgagcttctaagaggaatcactgacagtcaggcatcaatgaggcggggctcagcctacctaattggtttcctctttaaaaacactaaactatatttggctgatgaggcttctgatatgatgtcaaccctaataattttgttgagtgatacagacaaggctactgtatcagctgctttagaagcattttcaagagttgttgcatctgttccaaaggaacagctcccaacacacataaaactagtgcgcgatgctgtctctacagccagagataaagagcgtagaaggcgaaagggtgtgcctattcttctgcctggcttatgtctttctaaagcactgcaaccttttcttcctatatttcagcagggtttaattagtgggtcggccgaaacaaaggagcaggcggctgaaggtctaggagagttaattgatgtaacaagcgagaagactcttaaggaagttgtagtgccaattacaggacctcttatccgcatccttggtgatcggtttccatggcaagttaagtcagcaatcctatcaaccctgacaatcatcatcatgaaaggtggaattgcacttaagcccttccttccacaacttcaaactacattcgtgaaatgtctacaggataacaataagtctgtccggacgagggctgcagctgctctcggaaagcttagtgctcttagcacacgggtggatcctttagttagcgatcttctgtccatgttgcagtcaggagatgaatctgtaaaagaaagtgtgctttctgcactcaaaggtgttatcaaacatgctggcaaaagtgtcagtgctccaataaggtcacggggatgtgctcttcttgaagatctgctgcaggctgaagctgatgatatccgcagttgtgctgcaaaagtgattggcacattgtctcag

SEQ ID NO: 90428 - DNA, 104 bp, Zea Mays
ctaaaaacagattattggaaggctacaactggtgaacttggtcttctcttctctacctacattctacatgtccaccctaagactatcggcgattgtgatcaagc

SEQ ID NO: 90429 - DNA, 639 bp, Zea Mays
atggcatgtcaaccgaagaaatatgggggcctcagaatccttgaccttgcaactcagaatggcactctcacgatgaaaaacctggacaaatacttcaacagacacatcattccctgggtgaacttggtttgggaaaactactacaactccggagcagtaccgtctatgaagaaagtggggtcattttggtggaggcaagttctagcaaacctttccagttacaaaaacatcgctaatccacgggctgggatggccacacgttgcaactatggcatgacaaaaatacctcactctcatgaaggcctggacaaccaccccgctctaggacgcgttcagacttccaaagtcaccggtagcattctagcagtttcggatcctagagaatacactatcaagtcaactaacctcaactaccttgggcaagtggaagtacccttgggtaggacagggattctcatctcagaaaacttacatgcaaatgatagatggcgaagtagtggagcccatgtttatgctgatgtggaaatcaaagtggtagccaaatcaagaattcttcttttggctaatcctgcgggacaaactcaatacaaaatcaatgctcaaaaagaggaaaatggaactagactcatactcatgtga

SEQ ID NO: 90430 - DNA, 956 bp, Zea Mays
cacatcaccgatccgtgcctcactgcctccgaactcccaccaatcacagcacgcgccccactggaaccctaacactataaaattgcacggcgtcgcccgcctttcaccaatctactcctccattctccaccgcgccccaacctcgaagagttccgaagtttccacaccctcaaagcgaagcagcatgagttccaccggaggcagcggccgtgggaaggcgaagccagcgaccaagtctgtgtcgcggtcttccaaggctgggctccagttccccgtcggccgcatcgcgcggtacctcaaggccggcaagtacgcggagcgcgtaggcgccggggctcccgtgtacctctccgccgtcctcgagtacctcgccgccgaggtgctggagctggccgggaacgctgctcgggacaacaagaagaaccggatcgtgccgcgccacattcagctggcggtgcggaacgacgaggagctgagcaagcttctgggcactgtgacgatcgcggccggcggcgtgatgcctaacatccaccaaaatttgctgcctaagaaggctggtcacaagggggacatcggctccgcctcccaggagttctgaacgcgtcttcggaaggaggagagacgcgtggtgatgtttgggctttgcggttttggggctgttgtcgatgggtttgagactgatggtttgtgggatgtaaacaaatgcagcgcgttgtttcatgaatgaacggatgaagatgaatgatggatagaagaaagtatttattcatgatttcctccctgcttgcatttgaattcgatttgttgtttgtcctatcgtttggcacattgtatcagggctcatgatggaattggttggattggttctgtcaactgtgcatcctctggtttgtcagattactattcctgtaggaaaatgcagtccgaaaactctgtatcgtctggtcttgggcttc

SEQ ID NO: 90431 - DNA, 309 bp, Zea Mays
atggcgtccttcgcgctgtggatgggcggcgacggcgcgtcgttcggcatcgtggcagtcaacggcgcagagaggagcgggcgcgaggatgaggaggctagcgcggtcgcttgtggcgtggcctcgacgacgtacgggaagggaaggcggatagatcggaaaggatcactggtcgagagattcagagatttgagcgggtgcgctacgtcccagctagcctttttgacccgcgcaccaagctcgtcaggagacgagagcgaattaaggtgggcgtttggcgacggtgtgcatggctgcatgcagcgttga

SEQ ID NO: 90432 - DNA, 3047 bp, Zea Mays
gcaaagagagaagaagaggaagacgcggcgcgctcccctttccagtccccatccccggctggtatcgccgggagtaagacgggaccgtcgggacgaagccaccggcgcgacatggaggccaagccgtcttcagcggcacatggtgacgcgcccgcggtcgaggccccccgccgccgtggcagcggcggtaagcgcaagtcggccgggtcctcgttcacgccgtcgaagcggcaggccaaggagcggaacgctgccttccacgtgccccagcatcttcttcacagcgggccgctcacccgcgccgcgcgccactcgccgcacaagctcgcgggcactccgccggagtcggggccagcgtcatcgtcggccgcaactggagacggggtgagcggtgggcaggcggaggttgatgcgatccggcccgagacggaggagacgccggccccagagctgccgctggtggacgagatgttggaggcggtccgatcccgtggccctggcgtccatgtggtccctacctttgctggatggttttcatggaaagaaatccactcggttgagaagcagatcttgccttctttttttaatggaaaatctgtgaagcggacacctgaggtgtatttggcgattagaaattcaatcatgatgaaatttcatgccaatcctcaattgcagctggagtccaaagatctggctgagttgtcaatcggagagagcgatgctcgacaggaagtcttggaattcttggaccattggggcttgataaatttccaccctttcccaccagctggacatgaagagagtaagccagaggagagccaagacaactctaatgatgagaaagcttctttgatcgagcagctgtttaaatttgaatcagttcaatcatatatgacacctttactgaacaaagaagatgtgggagctccaccccctctgcctagcttgtttcctgaacctgtactcattgaaaatatggttgcagcagctgagccttctgttgagtaccactgcaactcctgttcagttgattgctcacggaagcgctaccattgtcgaacccaggcagattttgacctctgttgtgtttgctataatgaagggaagttcgatccaggcatggccaaaactgatttcatcctcatggattctgcagaagtttcaggtgctagtggtactagttggactgatgaagagacattacttcttttagaaggtttggaaatttttggtggaaaatgggctgagattgctgaacatgttgctactaagacaaaagcacaatgcatgttgcactttcttcaaatgcaaatcgaagaccgcttccatgatggtgacgatattaatcaaaacatcccagtaagtacagagcaagccacaactgagaaagccattgttgaaacacctgagaaaatggaagttggagataaagtggaaggaagagataatgcggatgagaaggcctcggagaaaacagagggaagctgtgaagaaacaaaaactgaagatgcaaatgttgtaaataaagatactcagaaatcaggtggcaaagattcaggtgcatctccaagcactgaagaggcaaagcaatcttctgatgatcaacctatagtaaaggaaaattctgtagatgtagatacttctggtgaaaaactatcaaatgttgctattgatatcctaaaatgtgcatttgaggctgctggtcacagcccagaatatgaaggttcatttgctgatgcaggaaatccagttatagcactagcagcgtatttagctggtcttgtggaagatggtaacgctaccacttcattccgtagttcactaaaatctatatctgaggtgcctcctgcactccaattagcaagtaggcactgttttattcttgaggatccaccaaatgaactcaaagacatttgtgttagtgtaagtaagaaaaatacagatgctgatcaaacaaaagatgaggatatgatttcaaattcaatcgccaatgagaaaaaagagatcaatgagaaagaagataagtctttatctgtggaaaagacaaataattcatccatgtcacaaaatgaccatcaagaatcaaacattaagagtgtctcacgtgatgattgctcctcagtggagccaaaaggcaataatgctaaggagtcaagtgattcaactggtattggggatatgagtgcaatcggcactacaaaagatgttgttgcaggcaattctaaacaagtgaacgactcacctagtgttgaggtggaggctcctgatgactcttctttaaaaagcaaggatgagctcaatgatactgaagatgcagtggcgacaccagctaccgtacaggaacagaaacacagccaaacattggaaaatggtgataaggcagaacctaacaatattgaacgtgtagttgtccatgagaagggctctatagtgactgccaaccaaaatgattccataactaggctcaaacgagcagcagccactgctgtttcagcagctgctgtcaaagctaagtttctcggtgatcaggaggaatatcatattcgaaggctgacagcacttatgattgaaaagctgttccagaaattagaagtgaagatgtcgttgttttcagagattgagcaggtggtccttcgaacaagagagtacaccgagaagaccagaaaaaaactcctaatggaacgaaatgcgattattgcagctcgtatgggtgcattgccgtctaggccaaaccagcctggtgtagccggcaacaggttaccacctggatatggcaaccctcctttgaggtctccaaacgcaatgccgcggccttccagctgaggaaaatccggattccggacacccagtggtctatactccattcatttagaagcatacggacctcaaaaacctcaaacctgccagtttgttgtagcattttttagaaagtacattgtacaattgcctgtataactgcttatatgaaaattcaccattttcacttaattttgatgcacttgcttctaccaaacctccgcaactgtttaaaccttccatcaacagca

SEQ ID NO: 90433 - DNA, 1425 bp, Zea Mays
aagcgcgcattaaatgctgtagcaggtgaccgttgacgccgaatagccgttgctccgccgttacaccggacagtccggtgctcaccggacatgtccgatgaattatagcggagcggattcccgaagctggcgagttcagagtcgcttctccttggagcaccggacactgtccggtgtacaccggacagtccggtgaattatagcgcggcgcctctgagttttcccgaaggtgcgaagttcagcttggagtcctctggtgcaccggacactgtccggtggtgcaccggacactgtctggtggcacaccggacagtccggtgtgccagaccagggcacacttcagttaccccttgctctttttgttgaacccttttcttggtctttttattggcttattgtgaacctttggtacctgtagaacttataaacttgggcaaactagttagtccaattatttgtattgggcaattcaaccaccaaaatcaatttagaaaattggtgtaagcctaattccctttcacttcttattcaatctattcagttgcaacttataccataataaaacaatgcggatggtaatgaaaacaagcacccttctccttcgtaggtaatgattatagttattgtagtactcaagatacatcttctttgaacccatctaaaaaaatgcaaggtaattaaaatgtacactcgacagactaatggatttaggaattgtttaaaccaatctataaaaatacaatctaactgcttgtgctcacgtaccttgagcagtagcaaacaagggtctcctggtgccctcagcttgcaacaagtccatgaaaaagatgaagaaaatattaatgatggtctcctactaaatatgatatattgcaactagaaatctattacagcaaggtaaaaatcatgttatctagctgcagcaattgaaataaaagcaaatctgaaatagtactcgatttatcaaatgccaaataccgatgtgtggtcggactaccactaacagccatgtgaccagactacctaagctcatggcaaccggccagatctaggacaaacagccatggcaaccgaccagatctaggacaaggcgttagaagacaactacgacgagaaggcactacggcgctcgatccctctgttgagctgattcaccacgcggtctgatgctagcgccagcaaccaccgaccaggcgaggccgcaatatgagatgaactgaaggacgaaacacaggagaggaggcataatgcagattgggaacgagctcaccttctgatggcggtcgacggccagcaacagatccaatggtccaagcgtcggagttgcggtggaggtgctagggccagcactagcaccctggagaagtgtggcaggtctcaggtttgtggcggctgaatcagtagccgcaagtgcggtgaaaagtt

SEQ ID NO: 90434 - DNA, 3883 bp, Zea Mays
tggcagaagcgcaaatagatgaacaatccgagggccattctgcctccaactcctcgaactttcccgcctgaaaccctctcgcctccctcgccatctcctaaaatatagggccacagtccaggacccactagtttctgctctcggcctgttcccttctatttctcgccccctactgattaaattttcttcgcacgaggaaaaaaatcaagtggcaagggcttgatctggtggccgacccatggtggaagggatggtagtggccgtgccgaatggggtgaaggcggatggcgccgccgccaccgccgccgccgctaaggcagattctcctaaatccgttctggaggacgagaaaatttctgaatccaagaatgggaacgcctccttagccacggagccagttaagcaaggggacgagacctcggacgattttgtggatgcaatgatgtcccttcctgttgaccatgaaatcgacagtgccgatgtgccccctgctgttgaggcagtcaaggacgaagaccagcttctggagcctgccaaggaggagaaatttgatgatttcctggatgcaggtttatctatacctattgatcttgaggccaagaatggtgatgtatccctgatcacagaagcaatgaaaaaggaagaagaacagctcgaggaggcgcggattaaggcagaggaagaagaggaagccaggaagagggaggaagttgcaaaacttgcttttgatcctgagtcgcggtatagcaagttagatgagctactgacgaagacacaactattttcagagttcctacttgagaaaatggataaaatcgccgatgaagttgttgaacctcaaggtgaagagtcaccagtagagaagaagaaaagacgtggccgaaagaggaaagctaatgccacaccacaatacaatgataaaaaggccaagacagcagtggcagccatgcttacaagatctcgtgaagatcgtcttgctgatgactctactctctcggaagaagaaaggttgaaaaaagagcaagccaatcttgtgcctttaatgactggtgggaagttgaagtcgtaccagatcaagggtgtaaagtggctaatttcattgtggcagaatgggctaaatgggatacttgctgaccaaatgggccttgggaaaacaatccagacaattggatttcttgctcacctgaagggcaaaggcatgcatggtccatacttgataattgctcctctttccactctctcaaattgggtgaatgagatctcgaggtttgttccatctgtttctagtatcatttatcatggagataaagtggcccgagctgagataagaagaaaatttatgcctaaaactgctggtcctgattttcctataatagtgacttcatatgagattgctatgttagatgcaaggtttcttgctcactataggtggacgtatgttgttgtggatgagggacatcggttgaaaaattctaagtgtaaactattgagggagatgaagcgcataccaatggctaacaagctccttttgactgggacacccctccagaacaatctggcagagctgtggtcactattgaacttcattttgcctgatatattctcatccaatgaggaatttgaatcatggtttgatttttctgcgaaaggaagtgaagaaccagaagaaagtgaagaaaaaagaagggttcatgttgtttcaaagcttcatgccattttgcgcccatttcttctgagacggatgaaggaggatgtagaacaaatgcttccacggaagaaagagataatcatttatgctaacatgactgaggttcagaagcgaatcctgtatcacttagttgagaaaacctttgatgtctacttgatgattatctctttcttcctgttgcgtagacctggcatcaagacaaagctaaatagtctctttattcaattgaggaagaactgcgcccatcctgatcttttggaagctgcatttggaacaacaagcctttatccacctgttaataagcttttagagcaatgtggcaaatttcagcttctggacaggctactaacttccctacttgcacgcaagcataaggttctaatattctcacaatggacaaaagttttggacattcttgagtattacctagattcaaaaggccttggggtttgcagaattgatggtagtgttaatttggaagagaggcggcggcaggtaacatgctagcctgtgccaatatattactcctttcattccaaattataaaatattgacttttctagatacattacttttgctatgtatctagaatatacactcatgtggggagcctccacactggatctgccctagatacacactaagtctatatgcataacaaaaagtgatgtatctagaaaagccaaacgtctgtaatttgggacgtgtactatttttctaaagaacatctaaactctgaggatttgcactgtgttagatatcttggtacatgtataaatttatttcccttgtctgaattagaatttgcattgttgcatgctcttggtattaatgactttttacttgcaccattctgatggcacttgtatgtgctcacatattctttattttgttgatactgtttgtgttcagttcgattgttattgacacttcccaatttctcatttaacatcggcacatccaagtggcaaattctttagttggtcagcacgtaacattttctctccaacaatccaaccacaatttatgaaaacccatcgtttacagtagcaaagaagcaagcagtacctgtcgttgggtaaacacaaagaataacaaaagttgccttttgagcttttctgttgctccttttttttgctgctcgataatcgtctatctgtcgctacttttacttcacaaaaaatcttttgttactgttttttgttgcagatagcagagtttaatgatttgaatagcagtctgaatgtctttattctgagcacacgggctggcggacttggtatcaaccttacttctgctgatacatgtatcctttatgacagtgactggaatcctcagatggatcagcaggccatggatcgatgccaccggattggtcaaacacgcccagtgcatgtatataggctggctacctcatattctgttgaggagcggatcatcaagaaagcttttgggaagttaaagctagagcatgtggtgataggcaagggacagtttgaacaagaaagagcaaagcctaacgctttagaggagggggagctgctggcgctgcttagggacgagcaggacgaggaagatcggatgatccagaccgacatcagcgacgaagacctcttgaagctgatggaccggagcgacctgtccggaccacctggtgctgccgatgccgctccactgatcccgctgaaaggccctggctgggaggtcgtggtcccaaccaagagcggtggcggtatgctctcgtcgctcaccagctgagcgatgccggcaccatgtttggggtgcccattttgctagtcactcatcatgtggacgatggggcgcttgttggccggtcgccgatcaggcggatattttgcatgtatgcccccctacaaactgttgatctgggtgttgagcctgcaacagtagggttaggttatttcctcccgtgtccgtgccagtgacacgcaagtcggattgagttatgctgtgaacttctgatgagtcgctgcaagctgcctttctgacttgagctttttgctgcttctgttgctgcgttctatgatgtagtaacagtagctgatggtttacaccaaagcggagatggatgccctctatgatgtagtccttgctatataacttgaacactgatgtgattttctgtagtgtcaactgccatgctttatcggtttt

SEQ ID NO: 90435 - DNA, 3282 bp, Zea Mays
tggcagaagcgcaaatagatgaacaatccgagggccattctgcctccaactcctcgaactttcccgcctgaaaccctctcgcctccctcgccatctcctaaaatatagggccacagtccaggacccactagtttctgctctcggcctgttcccttctatttctcgccccctactgattaaattttcttcgcacgaggaaaaaaatcaagtggcaagggcttgatctggtggccgacccatggtggaagggatggtagtggccgtgccgaatggggtgaaggcggatggcgccgccgccaccgccgccgccgctaaggcagattctcctaaatccgttctggaggacgagaaaatttctgaatccaagaatgggaacgcctccttagccacggagccagttaagcaaggggacgagacctcggacgattttgtggatgcaatgatgtcccttcctgttgaccatgaaatcgacagtgccgatgtgccccctgctgttgaggcagtcaaggacgaagaccagcttctggagcctgccaaggaggagaaatttgatgatttcctggatgcaggtttatctatacctattgatcttgaggccaagaatggtgatgtatccctgatcacagaagcaatgaaaaaggaagaagaacagctcgaggaggcgcggattaaggcagaggaagaagaggaagccaggaagagggaggaagttgcaaaacttgcttttgatcctgagtcgcggtatagcaagttagatgagctactgacgaagacacaactattttcagagttcctacttgagaaaatggataaaatcgccgatgaagttgttgaacctcaaggtgaagagtcaccagtagagaagaagaaaagacgtggccgaaagaggaaagctaatgccacaccacaatacaatgataaaaaggccaagacagcagtggcagccatgcttacaagatctcgtgaagatcgtcttgctgatgactctactctctcggaagaagaaaggttgaaaaaagagcaagccaatcttgtgcctttaatgactggtgggaagttgaagtcgtaccagatcaagggtgtaaagtggctaatttcattgtggcagaatgggctaaatgggatacttgctgaccaaatgggccttgggaaaacaatccagacaattggatttcttgctcacctgaagggcaaaggcatgcatggtccatacttgataattgctcctctttccactctctcaaattgggtgaatgagatctcgaggtttgttccatctgtttctagtatcatttatcatggagataaagtggcccgagctgagataagaagaaaatttatgcctaaaactgctggtcctgattttcctataatagtgacttcatatgagattgctatgttagatgcaaggtttcttgctcactataggtggacgtatgttgttgtggatgagggacatcggttgaaaaattctaagtgtaaactattgagggagatgaagcgcataccaatggctaacaagctccttttgactgggacacccctccagaacaatctggcagagctgtggtcactattgaacttcattttgcctgatatattctcatccaatgaggaatttgaatcatggtttgatttttctgcgaaaggaagtgaagaaccagaagaaagtgaagaaaaaagaagggttcatgttgtttcaaagcttcatgccattttgcgcccatttcttctgagacggatgaaggaggatgtagaacaaatgcttccacggaagaaagagataatcatttatgctaacatgactgaggttcagaagcgaatcctgtatcacttagttgagaaaacctttgatgtctacttgatgattatctctttcttcctgttgcgtagacctggcatcaagacaaagctaaatagtctctttattcaattgaggaagaactgcgcccatcctgatcttttggaagctgcatttggaacaacaagcctttatccacctgttaataagcttttagagcaatgtggcaaatttcagcttctggacaggctactaacttccctacttgcacgcaagcataaggttctaatattctcacaatggacaaaagttttggacattcttgagtattacctagattcaaaaggccttggggtttgcagaattgatggtagtgttaatttggaagagaggcggcggcagatagcagagtttaatgatttgaatagcagtctgaatgtctttattctgagcacacgggctggcggacttggtatcaaccttacttctgctgatacatgtatcctttatgacagtgactggaatcctcagatggatcagcaggccatggatcgatgccaccggattggtcaaacacgcccagtgcatgtatataggctggctacctcatattctgttgaggagcggatcatcaagaaagcttttgggaagttaaagctagagcatgtggtgataggcaagggacagtttgaacaagaaagagcaaagcctaacgctttagaggagggggagctgctggcgctgcttagggacgagcaggacgaggaagatcggatgatccagaccgacatcagcgacgaagacctcttgaagctgatggaccggagcgacctgtccggaccacctggtgctgccgatgccgctccactgatcccgctgaaaggccctggctgggaggtcgtggtcccaaccaagagcggtggcggtatgctctcgtcgctcaccagctgagcgatgccggcaccatgtttggggtgcccattttgctagtcactcatcatgtggacgatggggcgcttgttggccggtcgccgatcaggcggatattttgcatgtatgcccccctacaaactgttgatctgggtgttgagcctgcaacagtagggttaggttatttcctcccgtgtccgtgccagtgacacgcaagtcggattgagttatgctgtgaacttctgatgagtcgctgcaagctgcctttctgacttgagctttttgctgcttctgttgctgcgttctatgatgtagtaacagtagctgatggtttacaccaaagcggagatggatgccctctatgatgtagtccttgctatataacttgaacactgatgtgattttctgtagtgtcaactgccatgctttatcggttttagtgtccttgtcggcagaagcgttgcaccatttttgtgatttgtgtccgcgtgtatggtgccaccttgtggacgtctcttctgatgaaatagaaactgttgtgcgagaatgaa

SEQ ID NO: 90436 - DNA, 534 bp, Zea Mays
atggagatggcggccaagcaggagttcgcggccaggatcatgagcagatggaggagcagggagcttgggggaaagagaaaccatggtgcgcaggagcagagcgcgagctgcagcaggggccgagcgccatgggaactccgcgagcggcgggggcgcaacgctggagaggcccagcaggacgccatgaaagctgcgcgtggtgccatgggacctgagtacctgctgggtagagaagaagcaaagctcgcaggggaagccgacatggggacgaaggccgagcagagggaggaagaagccagacgcggcaacagggaggaaaaccgcgggcctgggcgagcaggacgaaggagctccgagcaggagcaaggagaagagggggcgccatggtcggacttgggcaggacgctggccaaggaagaaggggctctggccggctggaagctggaggagatgaagactgcgcaacagagaaaggagatgcgcgtaaacaaaatggagccgggggcggcggcagtaagaaaatatcaggggtag

SEQ ID NO: 90437 - DNA, 1914 bp, Zea Mays
agagggatacgctgagacgcacacgcccgttcgcacagtggggaaggcagactgggagagaggaatcgagtgatctccgagatggaggcggcgctagtggagcggctggaggcggcggtggcgcggctcgaggccgccgtggcctccggcgcctcgctcgcgtcggcggcgccgcgcgacctcgacgctcctgaggcccggttggatccagccatcgtggcctaccacgagttcgtcgcggaggccgtcggccggctcacggctgcggccgagaagatcggcgggaaggtgcttgacgccaccaaggtgctcgccgaggcatttgccgtcgccaaggacctgctcgtacaggccaagcagctccagaaaccagcatcaatggctgatgcacaaggcttttttaagcccctcagtgatgttattgcaaaagcaactgcaatgaccgaaggaaggagacctgactatttcaaccatttaaagagtgttgctgacagtctcccagctttggcttgggtggcatttttaggaaaggactgtggcatgagtttcccaacagcacatgtagaggaaagctggcagatggctgagttctataataacaaggttcttgtggagtacagaaacaaagaccctgatcatgttgagtgggctaaagcattgaaggaactatacatgcctggtttgcgggattatgttaaaaagcattaccctcttggtcctgtttggggtcctgctggaagtgctgttgtttcccagccaaagcctgctgctccaacacctaaagctccagcggtcaaggctgccccccctccaccagctcctcctgctgcacctctttttagcacagagaagtcgccaaaatcttcaaagcctaaagaagggatgtctgctgtgttccaagagattagttcaaaacctgtgactgcagggttgcgaaaggttaccgatgatatgaaaactaaaaaccgtgctgagagaagcggtgttgtcagcagcgctgctactcctgctgcagctcctgaaaagacttctcgtgcggggtccttctctttcaaatctggacccccaaaactggaacttcagatgggacggaaatgggtggttgaaaatcaggttggcaagaagacccttgctattgatgattgtgattccagacaatctgtctatgtgtatggatgcaaagattctgtccttcaagtaaacggcaaggttaacaatatcactgttgacaaatgcactaaatttggaatcgttttcaaggatgttgtagcagcttttgaggttgtcaactgcaatggcgttgaggtccaatgtcagggtacgtcaccgacaatatcaattgacaacacatctggatgtcaattatacttaagcaaagattcgctgggagcttcaattacttctgctaaatctagtgaaatcaatgtgatggttccaagtggcggctctgacggtgattgggtggagcatgcattgcctcagcagtacatccatagtttcaaggatgggcaattcaccacttcaccagtttcacactcgggggcgtaaatacaatttgttgctgctgtgtttgttttttatttcgcttttgccttgtttttgaagatgaacgtatgatgatgaggtttgtaacagttttgggtctcgcagcactggactggaccctgactgcgattgttgtttgtgttgccccttgctcggtgcgcggtgtgtatgttctgcatgcacgtggttccattcgattggtgtatttgtgtgccaacaaaccactatacgtggtgtgtgtgtgtgtctttagctgaccattctttgacactgaatctcactatatttgaattgatgtggacgcttgctttttcgagtctcttttcagattcttgtttaacaaagtgacaatgacaatgcagttatcgt

SEQ ID NO: 90438 - DNA, 842 bp, Zea Mays
gatacagtacctccaaagaagcgaatactggacacatcacaggacttctatacagctggttttgtccctggggctaatgttcatttttcttatgatctccctgaagattcgttgttaaatgcagatgatctaaaagcaggaccctttctccgtgaagaaattctaagtttggatggattgtcacttctgctgaaacctgctagtcaacctgatgattctagaatgaactcttcttctcttcaatctgatgcatctcaatctgttcctgtaccaacaacaacaaataagaagcctggcagaccaaagtggctgaaaaggtgataccactctaggtgtcaagtgtgtgccatcaacacagaatcactctgttaggcttctaaacactattaatggccgaacaagctcaaatctgaacaggctacactgctgtagtacaataattggatcctctgtttacagaagctgcaggggcattagaaatagaatcccaccttttttctaggtgggagccaagtagcatgtaaaattgaatgtgtcgcgactcatcaagtcatcagaacagtgctccgctgtggctaagcactttgtcatcttacatttcatgtaaaccccataggaagttagaaacggcagagataatagtccagtgttgttaacacttcacggtgcaatgccatgcctgtcttcactattcagtcttgacaacaatacattttagaaaactgaaagtgcccgaggtagctggaatataccaagtgtggggctttcagttctggaggacatgatattgtggcaggttgatttcttgtaattgatggtgatggagcccttaccagcgacca

SEQ ID NO: 90439 - DNA, 1893 bp, Zea Mays
cccctgccgccgctcaaccccgccgtcccccctctccggctctccgcgacgagatcctctgcaccggctctcccccattccatccattctcccaaaacagcactttcgaattccacggccgcgccgctccccacccaccattctgcgattctcccactggaaacggaggggagcgccatggcgtacatgtgcgcggacagcggcaacctcatggccatcgcgcagcaggtgattcagcagcagcagcagcaacagcagcaccagaggcaccaccaccacctgccgccgctcccgctcccgctcccgccgcgccaggcgccgccgatgccgccggccccggccccggcttccccgcacggccagatcccggcggcatccctaccgtacggcggcggcgcgtggtcccaggcggaccatttcttccctgacgccttcgtcggaacgtccccggccgacgcggtgttcccggacctctccgccgccgcggacttcgactccgatgtgtggatggacagcctcatcggggacgcaccggtcttcgcggactccgacctcgagcgcctcatcttcaccaccccgccgccgcccgtcgacgcggcggcccagcccgagtccgccactcgcgcgtcgcttccccagcctgccgccgtcgcaacggcggcagcgtgttcctctccgagctccttggacgcctcctgctccgcgcccatcctccagtccctcctcgcctgctcccgtacagcggccgctgacccagggctcgcggccgtagagctcgtcaaggtgcgtgctgccgcctccgaagatggggaccccgcggagcgcgtggcgttctacttcggggacgcgctggcgcgccgcctggcctgcggcggcggggcgcaagcgcaacccttgacggcggtggacgcgcgcttcgccaccgacgagctcacgctctgctacaagacactcaatgacgcctgcccctactccaagttcgcgcacctgaccgccaaccaggccatcctggaggctacgggcacggcgaccaagatccatatcgttgacttcgggatcgtgcagggtatccaatgggcggcgctgctccaggcgctcgccactcgcccaggggagaagccgtcccgagtgcgtatctccggtttaccctcgccgtacttggggccaaagccagcgacgtccctcgccgcaaccagtgcccgtctccgcgacttcgcaaagcttctcggggtggagttcgagtttgtcccattgctgcggtcagtgcacgagctggatcggtcggatttcttggttgagcctgacgagactgtagccgtcaatttcatgctccagttgtaccaccttcttggcgactccgatgagcccgtgcggcgagtcctccggctggttaagtcactcgatccatcagtcgtcacccttggcgagtatgaggtcagtctgaaccgagctgggttcgtcgaccggttttccaatgcactgttgtattacaagccagtgttcgagtcacttgatgtggcgatgccacgggactcaccggagagggtgagggtggagcgatgcatgtttggggagcgcattagaagggccattgggccagaggaaggcgctgagaggaccgataggatggcggctagtagggagtggcagacgctgatggagtggtgtggctttgaacccgtcaaactcagcaactacgccatgagccaggctgatcttttgctttggaattacgattcgaagtacaagtattcgcttgttgagctaccaccagcgttcttatctctggcttgggagaagcggccgctgctcaccgtgtctgcttggcggtgagtcccttttttgtgtattggtgctgttgtatgtagcattgtcataggctcagcgaagaaa

SEQ ID NO: 90440 - DNA, 648 bp, Zea Mays
tcatggttcgctgaatctatactgtttatacttaatagaaaattctctttccagttctcgttccgtctgtgcatctgcggtttatgtatctaccgatcggtgtttcctttgagcaatgcggcaggcttgtactttggtatcatattcttctcaaacggaacctgctacctcaatttttcggttgcatctgaatgttgcaggctcctgatgacaccttatgaagttgtgtttctctgtgtatctgaaatgttctacatgtcctttcatcaggtgaggatgatgctcgtcagaagctggctccctgtcctaaacgtctgccgggacattattcaaccaatgcacttccagaaatcgaccaattgccaagacctggaggaggcgtttcttcagaacatctccaccttgcttgtcctagaagcccaggagctgttgcagcaatgcctggggttctcgacccgcaatgtcgatgactgcccacatctggtcgccgcgttcaagacatggttccggcgcgcttgccgggctccttcagcttcaggcggggaaaacttagacatgagcggatgtacattatcccccaatcagtgcgtggtcgctgtgtattctcgcatgtagtctgctgtaggcctaccttacatctctgtattt

SEQ ID NO: 90441 - DNA, 1569 bp, Zea Mays
caatcaacaagccaagccaactgaccccttccgtcccggtgaagtgccaaacgcgtgattccattcgggaggcaggttggtgtgcgttgagccgttgattcctgcgcactgcgctgcgcctcaaggccaacgcccggcgaggacaggatgaggggacagcgggcgacgagagggaggaaaatcccagtccaactctaggcgcttcccttctcccttttcctttcttcttccctgaggcgccggccccgctcaggtcgggacctgccgccatttcagaactcctagcttcttctagttcgtggttgctgcgcgccttgcgtaccctgggttgagcatcattggagtggaagaaaggaatcatgttcaggagaaagcatgcttctcattccaactcaagtgatgctgagcagcaagaagcaaagataaatgaattaaaatctgcacttggtcctttgtctgcccatggcgagaagtactgcagtgacacatgtttcagaagatatcttgaagcccggaactggaatgtcactaagtcgagaaaaatgcttgaagaaagtctcaaatggagggcaacttataagccagaggatattcgctggcctgatgtttctgttgaagcggaaacgggaaaaatgtacaaggcaaattttcgagatagagaggggagaactgtaatcattatgaggcctacaaaggagaattcaacgtcccatgacggtcagattcggtttcttgtgtatgttttggagaatgcgatcctggaccaacgtgaaggtcaagagaaaatggtatggctgatagacttcacgggatggacaatggcccatgccacacccataaagactgcaagagaatgtacaagcatcctgcaaaatcattaccctgagaggctggccattgcatttctgttgaatcccccaaaagtattcgaagccttttacagggctgttaaatatttccttgacccaagatcgatcgagaaactgaacttcgtgtacctgaaggatgaggagagcatgaaggtcctgtacaagtgcattgatcccgtggtccttcctgtggagttcgggggaaagaacagtgttgtgtacaaccatgaggactactccaagttgatgctgcaagaagatatcgaaacatcaagcttctgggaggatgatgcgaaaactgttaaccatgctatcaatgggaccttggttcctgatgttgcatctcagctgtcacggattgctgctaaagccagttaatgagctactacgatgggagctattcagaatgctttaatggagtaactagaaagtcgagcgccaataaaatgttcatagtaaacagaaatagagcaaataacagatgagatatcacttgtccatagtcgaaatagttgcacttatcgaacactttattcagtacacgatgagttacaggagactatcgtaatgatgtaagaggtagaagtgctacctgcttaatgtacctcaaaagcccttaaggctttacttgttttagccgtggctacggagaagctaattctgggttatggcttttaaaatgctggttctatatttggat

SEQ ID NO: 90442 - DNA, 978 bp, Zea Mays
atgttcaggagaaagcatgcttctcattccaactcaagtgatgctgagcagcaagaagcaaagacttgcccttgggcctttataagcttgacaaacagttttactatctgtattttcctggttgatttctcacataatgtggcctacgaacagataaatgaattaaaatctgcacttggtcctttgtctgcccatggcgagaagtactgcagtgacacatgtttcagaagatatcttgaagcccggaactggaatgtcactaagtcgagaaaaatgcttgaagaaagtctcaaatggagggcaacttataagccagaggatattcgctggcctgatgtttctgttgaagcggaaacgggaaaaatgtacaaggcaaattttcgagatagagaggggagaactgtaatcattatgaggcctacaaaggagaattcaacgtcccatgacggtcagattcggtttcttgtgtatgttttggagaatgcgatcctggaccaacgtgaaggtcaagagaaaatggtatggctgatagacttcacgggatggacaatggcccatgccacacccataaagactgcaagagaatgtacaagcatcctgcaaaatcattaccctgagaggctggccattgcatttctgttgaatcccccaaaagtattcgaagccttttacagggctgttaaatatttccttgacccaagatcgatcgagaaactgaacttcgtgtacctgaaggatgaggagagcatgaaggtcctgtacaagtgcattgatcccgtggtccttcctgtggagttcgggggaaagaacagtgttgtgtacaaccatgaggactactccaagttgatgctgcaagaagatatcgaaacatcaagcttctgggaggatgatgcgaaaactgttaaccatgctatcaatgggaccttggttcctgatgttgcatctcagctgtcacggattgctgctaaagccagttaa

SEQ ID NO: 90443 - DNA, 1474 bp, Zea Mays
atgaccaccggccacatgaaccccaactacactttgtcaatgatcatgccgctagtaacaaagaccttcaacctattgtcgatgctcgagggcacaaaactgaagcgtacaatggtggggaagatcaagaaacaatgttgggctttgagggaccttgttgctagtgtgaaggacaagacaaaggctcatgtgcgtcgcgtcgattcctggtcttcgagaggagcggaggaggagggcggcgagtgcggaggagaggcgagttcagctgtagcgtttcgcttcttgcccgtggcggcggcggtgccacctcgaacgctgctccctgttctggggcttactgcggatcctgatctgagcatcattcagagaggaagaaatatgtttaggagaaagcatggcgctgatgtcaactcagatgatgctgagcaaagagaagcaaagattagtgaactgaaagctgctcttgggactttgtctgcccgtggcgagaagtactgcagtgaagcatgcttgagaagatatctggaagcccgtaactggaatgttgctaagtcgagaaaaatgctggaagaaagtctcaagtggagggcagcttacaagccagaggatattcgttggcctgatgtttctgtcgaagcggaaacaggtaaaatgtacagggcaagtttccgagacagggagggcagaactgttgttgtcatgaaacctacaaaacaaaatacttcatcccatgaagggcagatacggttcctagtatatactttggagaatgcaatcttcagcctgcctgaaggccaagaaaaaatggtcatcaagattttcctcgatccaaaatcggtcgagaaggtgaacttcgtgtaccagaaggatgaggagagcatgaaggtcatgtacaaatacatcgatccggaagtccttcctgtagagtttggggggaagagcaatgtggtgtacaaccacgaggagtactccgagttaatgatacaagatgacatcaaaacagcaagcttttgggcagttgatgcgaaaactaaccatgctaaccctgccatcaatgggaccttggttcctgaggttgcgccacagtcgtcgtcgctggctgctaaagctagttgaagagtatctgcattctctgagaaaattgagaagccgaagactaatggaaccttgagagaaacatatgaaataagaaacatggtatactcgttcatcctcaagagttgtttcagtactggaagtttattcagcacacaataagctactagagaatgtcaccatgtgtgatttgatgcccaaaagagatggtttacaaggtacagccaagtttttgtacttgaattaattactatatgtcagtgattatcacatggataagtaactagcacaagcttaaccgtttacttttctcttattccttttacgatatactttgtcttctcgctaatcaatcgagtgtttctttcgatgatttaaa

SEQ ID NO: 90444 - DNA, 1609 bp, Zea Mays
aaagtcctaaacaacgctcacacttggcgaagcaaacagatcgagattcgagagaaatggcgatggcgacgccagctgccaaacaatcacttctcaccgtccaaccgtgcacaatgaattgaagcgccacgcggttccaatattctattgccacgggcaggtgcgtcgcgtcgattcctggtcttcgagaggagcggaggaggagggcggcgagtgcggaggagaggcgagttcagctgtagcgtttcgcttcttgcccgtggcggcggcggtgccacctcgaacgctgctccctgttctggggcttactgcggatcctgatctgagcatcattcagagaggaagaaatatgtttaggagaaagcatggcgctgatgtcaactcagatgatgctgagcaaagagaagcaaagattagtgaactgaaagctgctcttgggactttgtctgcccgtggcgagaagtactgcagtgaagcatgcttgagaagatatctggaagcccgtaactggaatgttgctaagtcgagaaaaatgctggaagaaagtctcaagtggagggcagcttacaagccagaggatattcgttggcctgatgtttctgtcgaagcggaaacaggtaaaatgtacagggcaagtttccgagacagggagggcagaactgttgttgtcatgaaacctacaaaacaaaatacttcatcccatgaagggcagatacggttcctagtatatactttggagaatgcaatcttcagcctgcctgaaggccaagaaaaaatggtatggctgattgatttcacaggatggacagtgtcccatgcttcgccaataaagacttgtagagaaactgcaaatatactgcaaaatcattttcctgaaaggctggccattggatttctatttaacccccccaaagtatttgaagctttttataaggtcatcaagattttcctcgatccaaaatcggtcgagaaggtgaacttcgtgtaccagaaggatgaggagagcatgaaggtcatgtacaaatacatcgatccggaagtccttcctgtagagtttggggggaagagcaatgtggtgtacaaccacgaggagtactccgagttaatgatacaagatgacatcaaaacagcaagcttttgggcagttgatgcgaaaactaaccatgctaaccctgccatcaatgggaccttggttcctgaggttgcgccacagtcgtcgtcgctggctgctaaagctagttgaagagtatctgcattctctgagaaaattgagaagccgaagactaatggaaccttgagagaaacatatgaaataagaaacatggtatactcgttcatcctcaagagttgtttcagtactggaagtttattcagcacacaataagctactagagaatgtcaccatgtgtgatttgatgcccaaaagagatggtttacaaggtacagccaagtttttgtacttgaattaattactatatgtcagtgattatcacatggataagtaactagcacaagcttaaccgtttacttttctcttattccttttacgatatactttgtcttctcgctaatcaatcgagtgtttctttcgatgatttaaaggttttga

SEQ ID NO: 90445 - DNA, 243 bp, Zea Mays
atgccccagccgtcaacatcctccaggagcacaggcacaaccacacagcttgctgaccaccgcctgacgacatctccatcagcatcaggcgtcagcagattggccattggtcatttgcttcaagacatggcaagcaacagctggagtgaagaggaggaagagatccaagaggtcaatgctcaagcaaattcagagcagcagcatgatggagccgtagagccagatgttattgtgactgtgtga

SEQ ID NO: 90446 - DNA, 1378 bp, Zea Mays
tattcgtgacgacgcccgcagccgccgccgccgacgatggaggagcagcacctctcgtctgtccaccgctgaccgctcgtttgtcagcctagcaccggggtgcatgaacgcccagtatatgctacagcaccgccgcccctggccctgccgcctgcgccgctcgttgccctgtgcactccgcgggccttgggaatggccaaccaggatatttatcggtttgcccaccctctcctctcttctcttctctcccgcccgctctccctctctcccttctctccggcttccgattgggtattgtttattggcttctggctttaattaattactgtatttgcatgttcaggtatgttgttcatccatctcgtatgatgaagtgttttatgctcttttccaattattgttgcaagtagcaaaattagaacatgtccttatgtttagactatgaaagaaaacactcatttcaatttgtaggtgtatttttctgtttcagttggcatatcatcatgaggatgtgaattccacaggaagacccatgtgatcttattgctcccttagatcttccacattttttacagtcttattccttgccgaggggagtcctgctccagtagtggtctcagaaggggcaaataccatggatgttggcaggcctgtgcttgtgcagaatgcaccaaggacaagactggatgcagggacatgggggacgatggggattggattggggtactgtattgcagctgcagtagctgaacctgaatgactcgtggttgctgtggagggcgattctggatttggcttcagtgcaatggaggttgatgtgaacaagggcttcaacagtgatgctgttttagcaatggagacgatccattccctgtcagcttcaaaatcaagttacccaatggctgatctcacccaactcttcatgacagctacccaagaagggaaaagatcagaatcgcaaggccagattcttagggtggaatgctatagcttaatgccctaatctttatatgcctcttcttatatctgcacttccatgggcaccgggcgacactaaattcacaagataccccctccacctcaaggtggtatggagttctgtgtatcacaagaggcatctaggttgacctcactcttcttagtgttcatgcccactacgcaagacaacaccgcaacgccgatggagttggaagatttcattagtttcgactggatctggatgagatggactctgcttgtaaggagagagagagtgcatggcttgggaggagcatatttttgttcatccttttcatgagtcatgttacctgccatgtcagattatgtaacttcagatatttctgtttttgttagaaaagtaccaaaatagtttcacttc

SEQ ID NO: 90447 - DNA, 162 bp, Zea Mays
ggtaagctttttgcaattttgggtcaaaactagtgtatttatgaattttaattatattttgatgattttatgtagaaagaaattaataatgtacaaatagcctcagaaatctatgaaattatacgaaggtacaacatatggccacatatagtcataaaaaat

SEQ ID NO: 90448 - DNA, 2034 bp, Zea Mays
ccagccgccgcgtaccgcaccacaccacaccacaccaggctcctcgacagtcgatagcctcccaagtcccaactcgacctgagccgattcggaaggacggtttgcctacctctggttccggcggccatggcggtggcggcccctggccagctcaacctcgacgaggccccgtcatggggctcccgcagcgtagactgcttcgagaagctcgagcagatcggcgagggcacctacgggcaagtgtacatggcgaaggagacgggcaccaacgagatcgtcgcgctcaagaagatccgcatggacaacgagcgcgaagggttcccgatcaccgccatacgcgagatcaaaatcctgaagaagcttcaccaccagaacgttatcaagctcaaggagatcgtcacctccccaggcccagagcgggacgagcaagggaagccaattgacggtaacaagtacaaggggagcatttacatggttttcgagtatatggaccatgatctcaccgggcttgctgatcggccaggaatgcggttcactgtgccgcagattaagtgttacatgaggcagctgcttacaggcctgcactattgtcatgtcaaccaagttctgcatcgagatatcaaaggatctaaccttttgatagacaatgagggtaacttgaagcttgctgattttggccttgcaagatcattctcgagtgatcacaatggcaaccttactaaccgtgtgatcactttgtggtatagacctccagagttgctacttggaagcacaaagtatggcccagccgttgacatgtggtcagtgggctgtatttttgcagaacttctcaatgggaagccaatattgcctggaaagaatgagccagagcagctgactaagatcttcgagctttgtggtacccctgatgacacaatctggcctggtgtcacaaaaatgccttggtacaacaacttcaagcctccccggccattaaagagacgagttaaagatttctttaagcattttgatcgacatgcactggatctgttagagaagatgttgactttagatccatcacagaggatatcagcaaaagatgcacttgatgcggaatatttctggactgatcccttaccatgcgatccaaaaagcttgcccaagtatgaggcatcgcatgaattccagactaagaaaaagcgtcagcaacagaggcaagcagaggaagctgcaaagcgtcaaaaacttaaccatcctccaccacattctcgtttgcctccactccagcagcctggccaagcacatcctcaaatgaggcctggccagggtatgcacaatgtgcctcctgtggcagccggcccaggccatcactatgcaaaaccccgaggaccaggaggccctaaccggtatcctcagggtgggaatcaagggggaggctacaatccgaaccgtggagggcagggtggtggctatggcagtggcccttatccccagcaagggcgagggcctccttaccctggagcagctggcccacggggcagcggtggcagtggctatggggctggagggccaaactaccaacagggtggcccatatggtacgtccggtccaggccgaggaccaaactactctcaaggtagtggttcccgcaaccaacagcagtatgggaactggcaataatgtggcagtattatgccattgatatgtatgtatttgcagaatgcatttgcagcacctttgcactttaagcatgttgtgagatgtatgtcatgatagtactctaattcagtccagatgtctcaaaaagatgtttatgactccagatgtagattatgattatcgagaaatgttttgtacttagaacccttgattcacttattagaagtatgccacaaagacctagcagagcttgctattagccccagtttcatacttcatatccatattggaatcatgaatgcatggaagaagcctgaagttcagaaatgaaatttgttatggttgtgtacagttttgttatcacttcgcttcaatcacattatcaagcttaaaaca

SEQ ID NO: 90449 - DNA, 2431 bp, Zea Mays
aggctcctcgacagtcgatagcctcccaagtcccaactcgacctgagccgattcggaaggacggtttgcctacctctggttccggcggccatggcggtggcggcccctggccagctcaacctcgacgaggccccgtcatggggctcccgcagcgtagactgcttcgagaagctcgagcagatcggcgagggcacctacgggcaagtgtacatggcgaaggagacgggcaccaacgagatcgtcgcgctcaagaagatccgcatggacaacgagcgcgaagggttcccgatcaccgccatacgcgagatcaaaatcctgaagaagcttcaccaccagaacgttatcaagctcaaggagatcgtcacctccccaggcccagagcgggacgagcaagggaagccaattgacggtaacaagtacaaggggagcatttacatggttttcgagtatatggaccatgatctcaccgggcttgctgatcggccaggaatgcggttcactgtgccgcagattaagtgttacatgaggcagctgcttacaggcctgcactattgtcatgtcaaccaagttctgcatcgagatatcaaaggatctaaccttttgatagacaatgagggtaacttgaagcttgctgattttggccttgcaagatcattctcgagtgatcacaatggcaaccttactaaccgtgtgatcactttgtggtataggtattgtctattttcacaggttttgttaccatatttacagcatgtttggaagtaaaatatttttatagtttctaggcaataccatggtttataggaataccaaagtattttatgccataaggtgtttggttccatcttcttaagaactatgttttcaaaaccatggtattctagataacatggtattttttggagtattggaaaccccacttcaacccaaagttttcatttcctgattaacttttgcctaaataccatagtttacaatattgtatccaaacaataggtactattattggagctggccaaaactatggtattgtcatgacaattgtatagtattgtaaaaccatggttttgagaaacattgttgccaaacaggcccttacagttgttgttgcaagcttcttaagtcttcctggattggctgcagacctccagagttgctacttggaagcacaaagtatggcccagccgttgacatgtggtcagtgggctgtatttttgcagaacttctcaatgggaagccaatattgcctggaaagaatgagccagagcagctgactaagatcttcgagctttgtggtacccctgatgacacaatctggcctggtgtcacaaaaatgccttggtacaacaacttcaagcctccccggccattaaagagacgagttaaagatttctttaagcattttgatcgacatgcactggatctgttagagaagatgttgactttagatccatcacagaggatatcagcaaaagatgcacttgatgcggaatatttctggactgatcccttaccatgcgatccaaaaagcttgcccaagtatgaggcatcgcatgaattccagactaagaaaaagcgtcagcaacagaggcaagcagaggaagctgcaaagcgtcaaaaacttaaccatcctccaccacattctcgtttgcctccactccagcagcctggccaagcacatcctcaaatgaggcctggccagggtatgcacaatgtgcctcctgtggcagccggcccaggccatcactatgcaaaaccccgaggaccaggaggccctaaccggtatcctcagggtgggaatcaagggggaggctacaatccgaaccgtggagggcagggtggtggctatggcagtggcccttatccccagcaagggcgagggcctccttaccctggagcagctggcccacggggcagcggtggcagtggctatggggctggagggccaaactaccaacagggtggcccatatggtacgtccggtccaggccgaggaccaaactactctcaaggtagtggttcccgcaaccaacagcagtatgggaactggcaataatgtggcagtattatgccattgatatgtatgtatttgcagaatgcatttgcagcacctttgcactttaagcatgttgtgagatgtatgtcatgatagtactctaattcagtccagatgtctcaaaaagatgtttatgactccagatgtagattatgattatcgagaaatgttttgtacttagaacccttgattcacttattagaagtatgccacaaagacctagcagagcttgctattagccccagtttcatacttcatatccatattggaatcatgaatgcatggaagaagcctgaagttcagaaatgaaatttgttatggttgtgtacagttttgttatcacttcgcttcaatcacattatcaagcttaaaaca

SEQ ID NO: 90450 - DNA, 107 bp, Zea Mays
atgtacacatctgtacgttcttactactactccatccgtttctttttattagtcgctggattacactatccagcgattaataaaaagaaacagagggagtacattgc

SEQ ID NO: 90451 - DNA, 141 bp, Zea Mays
atgacagccaatgtagataagagcgtaaccaggccgctcatcaatcttcttccttttggacccaaactttcacggtcttgtcattgtcaagcgccccggatgcgatcatgttttccttgggatgacatgagaccgcaatga

SEQ ID NO: 90452 - DNA, 855 bp, Zea Mays
gtggtcgacgccccggtacgaagtgggtggggaggcgcagagacaggcgtcttcgtactcgcctatctccgcgactcaaagcttcttccatttcctaccgccgccgctgcagctccaccccattccgtcgacaccatgagggagtgcatctcgatccacatcggccaagccggtatccaggtcggaaacgcgtgctgggagctctactgcctcgagcatggcattcaggccgatggtcagatgcccggtgacaagaccattgggggtggtgatgatgctttcaacaccttcttcagtgagactggtgctgggaagcacgtccctcgtgctgtttttgttgaccttgaaccaactgtcatcgatgaggtgaggactggcacctaccgccagctcttccaccctgagcagcttatcagtggcaaggaggatgcagccaacaacttcgcccgtggtcactacaccattggcaaggagattgttgacctgtgccttgatcgcatcaggaagcttgccgacaactgcactggtctccagggcttcctcgtcttcaacgctgttggcggaggaacaggctctggccttggttccctcctcctggagcgtctgtctgttgactacggcaagaagtctaagcttggtttcactgtgtacccatccccccaagtttcgacctcagtggttgagccatacaacagtgtcctgtccacccactccctccttgagcacactgatgtgaatgagttccagaccaacttggtgccctacccgaggatccacttcatgctttcctcctatgctccagtcatctctgctgagaaggcctaccacgagcagctgtctgtggccgagatcacc

SEQ ID NO: 90453 - DNA, 1791 bp, Zea Mays
gtggtcgacgccccggtacgaagtgggtggggaggcgcagagacaggcgtcttcgtactcgcctatctccgcgactcaaagcttcttccatttcctaccgccgccgctgcagctccaccccattccgtcgacaccatgagggagtgcatctcgatccacatcggccaagccggtatccaggtcggaaacgcgtgctgggagctctactgcctcgagcatggcattcaggccgatggtcagatgcccggtgacaagaccattgggggtggtgatgatgctttcaacaccttcttcagtgagactggtgctgggaagcacgtccctcgtgctgtttttgttgaccttgaaccaactgtcatcgatgaggtgaggactggcacctaccgccagctcttccaccctgagcagcttatcagtggcaaggaggatgcagccaacaacttcgcccgtggtcactacaccattggcaaggagattgttgacctgtgccttgatcgcatcaggaagcttgccgacaactgcactggtctccagggcttcctcgtcttcaacgctgttggcggaggaacaggctctggccttggttccctcctcctggagcgtctgtctgttgactacggcaagaagtctaagcttggtttcactgtgtacccatccccccaagtttcgacctcagtggttgagccatacaacagtgtcctgtccacccactccctccttgagcacactgatgtggctatcctgctggacaacgaggccatctatgacatctgccgccgttcccttgacattgagcgcccaacctacaccaacctcaacaggcttgtgtcccaggtcatctcatccctgactgcctccctgaggttcgatggtgctcttaacgtggatgtgaatgagttccagaccaacttggtgccctacccgaggatccacttcatgctttcctcctatgctccagtcatctctgctgagaaggcctaccacgagcagctgtctgtggccgagatcaccaacagcgccttcgagccatcctccatgatggccaagtgcgatccccgccatggtaagtacatggcctgctgcctcatgtaccgtggtgatgtggtccccaaggatgtgaatgctgctgtggccaccatcaagaccaagcgcaccatccagtttgtggactggtgcccaactggctttaagtgcggcattaactaccagcctccaagtgtggtgcctggtggtgacctggccaaggtgcagcgcgctgtgtgcatgatctccaactccaccagtgttgtggaggtgttctcccgcatcgaccacaagttcgacctcatgtacgccaagcgtgccttcgtgcactggtatgtcggtgagggtatggaggagggcgagttctctgaggcccgtgaggatctggcagcgctcgagaaggactacgaggaggttggtgctgagtttgatgagggtgaggaaggtgatgatggtgatgagtactagaagtatcctgatgcggtcatcgtcaggcttgtgtgctgctcttgtccccgttgtggtttgcaacacctgatgttgtaagactttctggttatgtccgccccgctgtgccactgggttattaagaacgtcgttatggatggttgtctacactacattattgcttctcgatattggaaaactgttatgcgcctcggtggattgtgttgttgtcgtaatgtcatcactcatacgccgctgggaattttgaggcctgtcaagcatcaggattgcgttatgagttaaatgcttcagcgacgttta

SEQ ID NO: 90454 - DNA, 1734 bp, Zea Mays
gtggtcgacgccccggtacgaagtgggtggggaggcgcagagacaggcgtcttcgtactcgcctatctccgcgactcaaagcttcttccatttcctaccgccgccgctgcagctccaccccattccgtcgacaccatgagggagtgcatctcgatccacatcggccaagccggtatccaggtcggaaacgcgtgctgggagctctactgcctcgagcatggcattcaggccgatggtcagatgcccggtgacaagaccattgggggtggtgatgatgctttcaacaccttcttcagtgagactggtgctgggaagcacgtccctcgtgctgtttttgttgaccttgaaccaactgtcatcgatgaggtgaggactggcacctaccgccagctcttccaccctgagcagcttatcagtggcaaggaggatgcagccaacaacttcgcccgtggtcactacaccattggcaaggagattgttgacctgtgccttgatcgcatcaggaagcttgccgacaactgcactggtctccagggcttcctcgtcttcaacgctgttggcggaggaacaggctctggccttggttccctcctcctggagcgtctgtctgttgactacggcaagaagtctaagcttggtttcactgtgtacccatccccccaagtttcgacctcagtggttgagccatacaacagtgtcctgtccacccactccctccttgagcacactgatgtgaatgagttccagaccaacttggtgccctacccgaggatccacttcatgctttcctcctatgctccagtcatctctgctgagaaggcctaccacgagcagctgtctgtggccgagatcaccaacagcgccttcgagccatcctccatgatggccaagtgcgatccccgccatggtaagtacatggcctgctgcctcatgtaccgtggtgatgtggtccccaaggatgtgaatgctgctgtggccaccatcaagaccaagcgcaccatccagtttgtggactggtgcccaactggctttaagtgcggcattaactaccagcctccaagtgtggtgcctggtggtgacctggccaaggtgcagcgcgctgtgtgcatgatctccaactccaccagtgttgtggaggtgttctcccgcatcgaccacaagttcgacctcatgtacgccaagcgtgccttcgtgcactggtatgtcggtgagggtatggaggagggcgagttctctgaggcccgtgaggatctggcagcgctcgagaaggactacgaggaggttggtgctgagtttgatgagggtgaggaaggtgatgatggtgatgagtactagaagtatcctgatgcggtcatcgtcaggcttgtgtgctgctcttgtccccgttgtggtttgcaacacctgatgttgtaagactttctggttatgtccgccccgctgtgccactgggttattaagaacgtcgttatggatggttgtctacactacattattgcttctcgatattggaaaactgttatgcgcctcggtggattgtgttgttgtcgtaatgtcatcactcatacgccgctgggaattttgaggcctgtcaagcatcaggattgcgttatgagttaaatgcttcagcgacgtttaaacttgtctaaggtgccatctagatcatgaacttgtcaagggttgccacttagatcatgaacttcgtaaatatgtttttggatccaaaatatgtttttg

SEQ ID NO: 90455 - DNA, 1506 bp, Zea Mays
gtggtcgacgccccggtacgaagtgggtggggaggcgcagagacaggcgtcttcgtactcgcctatctccgcgactcaaagcttcttccatttcctaccgccgccgctgcagctccaccccattccgtcgacaccatgagggagtgcatctcgatccacatcggccaagccggtatccaggtcggaaacgcgtgctgggagctctactgcctcgagcatggcattcaggccgatggtcagatgcccggtgacaagaccattgggggtggtgatgatgctttcaacaccttcttcagtgagactggtgctgggaagcacgtccctcgtgctgtttttgttgaccttgaaccaactgtcatcgatgaggtgaggactggcacctaccgccagctcttccaccctgagcagcttatcatgggaaggaggatgcagccaacaactttgcccgtggtcactacaccagtaattggcaaggagattgttgacctgtgccttgatcgcatcaggaagcttgccgacaactgcactggtctccagggcttcctcgtcttcaacgctgttggtggaggaacgggctctggccttggttccctcctcctagagcgcctgtctgttgactacggcaagaaatccaagcttgggttcactgtgtacccttccccccaagtttctacttcggtagttgagccatacaacagtgtactgtccacccactccctcctcgagcacactgatgtggctatactgctggacaatgaggccatctacgacatctgccgccgatcccttgacattgagcgcccaacctacaccaacctcaacaggcttgtgtcccaggtcatctcatcccttactgcctccctgaggttcgatggtgctctgaacgtggatgttaacgagttccagaccaacctggtaccctacccgaggatccacttcatgctttcttcgtacgctccagtcatctctgctgagaaggcctaccacgagcagctctctgtggctgagatcaccaacagtgccttcgagccatcttccatgatggccaagtgcgacccacgccatggcaagtacatggcctgctgcctcatgtaccgtggtgatgtggtccccaaggatgtgaatgctgctgtggccaccatcaagaccaaacgcaccatccagttcgtggattggtgcccgactggcttcaagtgcggcatcaactaccagcctcctagcgttgtgcctggtggcgacctggccaaggtgcagcgtgccgtgtgcatgatctccaactccaccagtgttgtggaggtgttctcccgcatcgaccacaagttcgacctcatgtacgccaagcgtgccttcgtgcactggtacgtcggtgagggtatggaggaaggtgagttctctgaggcccgtgaggacctggcggcgctcgagaaggactacgaggaggtcggtgctgagttcgatgagggcgaggatggcgacgagggtgacgagtactagagaagtttgctg

SEQ ID NO: 90456 - DNA, 1867 bp, Zea Mays
gaaacaatcccgcccacacttccttcgccggctcatggtggccactggccaggctgtcatcctgttctataaagcgagccgaggggaagagccggaaccctagcccagcaccgcagaggcgcagagacaggcgtcttcgtactcgcctatctccgcgactcaaagcttcttccatttcctaccgccgccgctgcagctccaccccattccgtcgacaccatgagggagtgcatctcgatccacatcggccaagccggtatccaggtcggaaacgcgtgctgggagctctactgcctcgagcatggcattcaggctgacggtcagatgcccggtgacaagaccattgggggaggtgatgatgctttcaacaccttcttcagtgagactggtgctgggaagcacgtgccccgtgctgtttttgttgaccttgaacccactgtcatcgatgaggtgagaactggcacctaccgccagctcttccaccctgagcagctcatcagtgggaaggaggatgcagccaacaactttgcccgtggtcactacaccattggcaaggagattgttgacctgtgccttgatcgcatcaggaagcttgccgacaactgcactggtctccagggcttcctcgtcttcaacgctgttggtggaggaacgggctctggccttggttccctcctcctagagcgcctgtctgttgactacggcaagaaatccaagcttgggttcactgtgtacccttccccccaagtttctacttcggtagttgagccatacaacagtgtactgtccacccactccctcctcgagcacactgatgtggctatactgctggacaatgaggccatctacgacatctgccgccgatcccttgacattgagcgcccaacctacaccaacctcaacaggcttgtgtcccaggtcatctcatcccttactgcctccctgaggttcgatggtgctctgaacgtggatgttaacgagttccagaccaacctggtaccctacccgaggatccacttcatgctttcttcgtacgctccagtcatctctgctgagaaggcctaccacgagcagctctctgtggctgagatcaccaacagtgccttcgagccatcttccatgatggccaagtgcgacccacgccatggcaagtacatggcctgctgcctcatgtaccgtggtgatgtggtccccaaggatgtgaatgctgctgtggccaccatcaagaccaaacgcaccatccagttcgtggattggtgcccgactggcttcaagtgcggcatcaactaccagcctcctagcgttgtgcctggtggcgacctggccaaggtgcagcgtgccgtgtgcatgatctccaactccaccagtgttgtggaggtgttctcccgcatcgaccacaagttcgacctcatgtacgccaagcgtgccttcgtgcactggtacgtcggtgagggtatggaggaaggtgagttctctgaggcccgtgaggacctggcggcgctcgagaaggactacgaggaggtcggtgctgagttcgatgagggcgaggatggcgacgagggtgacgagtactagagaagtttgctgatgacgcagcatcaggccagtgtgctgcccttatcccgtgatctgccgagagttgctcctgctatcgtgttatgtgtgtctgttctgaagtattgtgtggtttacaacacctgatgttgtaagagttgttaattcccctgcattgctaccgggttattgagaataattatggctgtttacgttgttgcttcatctcggagatgctttacatttaccaccttgttcatcttttgtcatcagtaaaatcgagtcggcggatgattttcttgcgtcttgtcat

SEQ ID NO: 90457 - DNA, 1867 bp, Zea Mays
gaaacaatcccgcccacacttccttcgccggctcatggtggccactggccaggctgtcatcctgttctataaagcgagccgaggggaagagccggaaccctagcccagcaccgcagaggcgcagagacaggcgtcttcgtactcgcctatctccgcgactcaaagcttcttccatttcctaccgccgccgctgcagctccaccccattccgtcgacaccatgagggagtgcatctcgatccacatcggccaagccggtatccaggtcggaaacgcgtgctgggagctctactgcctcgagcatggcattcaggccgatggtcagatgcccggtgacaagaccattgggggtggtgatgatgctttcaacaccttcttcagtgagactggtgctgggaagcacgtccctcgtgctgtttttgttgaccttgaaccaactgtcatcgatgaggtgaggactggcacctaccgccagctcttccaccctgagcagcttatcagtggcaaggaggatgcagccaacaacttcgcccgtggtcactacaccattggcaaggagattgttgacctgtgccttgatcgcatcaggaagcttgccgacaactgcactggtctccagggcttcctcgtcttcaacgctgttggtggaggaacgggctctggccttggttccctcctcctagagcgcctgtctgttgactacggcaagaaatccaagcttgggttcactgtgtacccttccccccaagtttctacttcggtagttgagccatacaacagtgtactgtccacccactccctcctcgagcacactgatgtggctatactgctggacaatgaggccatctacgacatctgccgccgatcccttgacattgagcgcccaacctacaccaacctcaacaggcttgtgtcccaggtcatctcatcccttactgcctccctgaggttcgatggtgctctgaacgtggatgttaacgagttccagaccaacctggtaccctacccgaggatccacttcatgctttcttcgtacgctccagtcatctctgctgagaaggcctaccacgagcagctctctgtggctgagatcaccaacagtgccttcgagccatcttccatgatggccaagtgcgacccacgccatggcaagtacatggcctgctgcctcatgtaccgtggtgatgtggtccccaaggatgtgaatgctgctgtggccaccatcaagaccaaacgcaccatccagttcgtggattggtgcccgactggcttcaagtgcggcatcaactaccagcctcctagcgttgtgcctggtggcgacctggccaaggtgcagcgtgccgtgtgcatgatctccaactccaccagtgttgtggaggtgttctcccgcatcgaccacaagttcgacctcatgtacgccaagcgtgccttcgtgcactggtacgtcggtgagggtatggaggaaggtgagttctctgaggcccgtgaggacctggcggcgctcgagaaggactacgaggaggtcggtgctgagttcgatgagggcgaggatggcgacgagggtgacgagtactagagaagtttgctgatgacgcagcatcaggccagtgtgctgcccttatcccgtgatctgccgagagttgctcctgctatcgtgttatgtgtgtctgttctgaagtattgtgtggtttacaacacctgatgttgtaagagttgttaattcccctgcattgctaccgggttattgagaataattatggctgtttacgttgttgcttcatctcggagatgctttacatttaccaccttgttcatcttttgtcatcagtaaaatcgagtcggcggatgattttcttgcgtcttgtcat

SEQ ID NO: 90458 - DNA, 1710 bp, Zea Mays
ccgaggggaagagccggaaccctagcccagcaccgcagaggcgcagagacaggcgtcttcgtactcgcctatctccgcgactcaaagcttcttccatttcctaccgccgccgctgcagctccaccccattccgtcgacaccatgagggagtgcatctcgatccacatcggccaagccggtatccaggtcggaaacgcgtgctgggagctctactgcctcgagcatggcattcaggccgatggtcagatgcccggtgacaagaccattgggggtggtgatgatgctttcaacaccttcttcagtgagactggtgctgggaagcacgtccctcgtgctgtttttgttgaccttgaaccaactgtcatcgatgaggtgaggactggcacctaccgccagctcttccaccctgagcagcttatcagtggcaaggaggatgcagccaacaacttcgcccgtggtcactacaccattggcaaggagattgttgacctgtgccttgatcgcatcaggaagcttgccgacaactgcactggtctccagggcttcctcgtcttcaacgctgttggcggaggaacaggctctggccttggttccctcctcctggagcgtctgtctgttgactacggcaagaagtctaagcttggtttcactgtgtacccatccccccaagtttcgacctcagtggttgagccatacaacagtgtcctgtccacccactccctccttgagcacactgatgtggctatcctgctggacaacgaggccatctatgacatctgccgccgttcccttgacattgagcgcccaacctacaccaacctcaacaggcttgtgtcccaggtcatctcatcccttactgcctccctgaggttcgatggtgctctgaacgtggatgttaacgagttccagaccaacctggtaccctacccgaggatccacttcatgctttcttcgtacgctccagtcatctctgctgagaaggcctaccacgagcagctctctgtggctgagatcaccaacagtgccttcgagccatcttccatgatggccaagtgcgacccacgccatggcaagtacatggcctgctgcctcatgtaccgtggtgatgtggtccccaaggatgtgaatgctgctgtggccaccatcaagaccaaacgcaccatccagttcgtggattggtgcccgactggcttcaagtgcggcatcaactaccagcctcctagcgttgtgcctggtggcgacctggccaaggtgcagcgtgccgtgtgcatgatctccaactccaccagtgttgtggaggtgttctcccgcatcgaccacaagttcgacctcatgtacgccaagcgtgccttcgtgcactggtacgtcggtgagggtatggaggaaggtgagttctctgaggcccgtgaggacctggcggcgctcgagaaggactacgaggaggtcggtgctgagttcgatgagggcgaggatggcgacgagggtgacgagtactagagaagtttgctgatgacgcagcatcaggccagtgtgctgcccttatcccgtgatctgccgagagttgctcctgctatcgtgttatgtgtgtctgttctgaagtattgtgtggtttacaacacctgatgttgtaagagttgttaattcccctgcattgctaccgggttattgagaataattatggctgtttacgttgttgcttcatctcggaga

SEQ ID NO: 90459 - DNA, 881 bp, Zea Mays
gtcgttctgttctataaagcgagacgagtgggagcaggcgtaaccctaattgagcatcgcagagataggcgtcttcgtactcgcctacctccgcggctcaaacctttcccccttctcccaattccttccgccggccgccgctccacccgtacgacgacaccatgagggagtgcatttcgatccacatcggccaggccggtatccaggtcggaaacgcgtgctgggagctgtactgccttgagcatggcattcaggctgacggtcagatgcccggtgacaagaccattgggggaggtgatgatgctttcaacaccttcttcagtgagactggtgctgggaagcacgtgccccgtgctgtttttgttgaccttgaacccactgtcatcgatgaggtgagaactggcacctaccgccagctcttccaccctgagcagctcatcagtgggaaggaggatgcagccaacaactttgcccgtggtcactacaccattggcaaggagattgttgacctgtgccttgatcgcatcaggaagcttgccgacaactgcactggtctccagggcttcctcgtcttcaacgctgttggtggaggaacgggctctggccttggttccctcctcctagagcgcctgtctgttgactacggcaagaaatccaagcttgggttcactgtgtacccttccccccaagtttctacttcggtagttgagccatacaacagtgtactgtccacccactccctcctcgagcacactgatgttaacgagttccagaccaacctggtaccctacccgaggatccacttcatgctttcttcgtacgctccagtcatctctgctgagaaggcctaccacgagcagctctctgtggctgagatcacc

SEQ ID NO: 90460 - DNA, 347 bp, Zea Mays
gtcgttctgttctataaagcgagacgagtgggagcaggcgtaaccctaattgagcatcgcagagataggcgtcttcgtactcgcctacctccgcggctcaaacctttcccccttctcccaattccttccgccggccgccgctccacccgtacgacgacaccatgagggagtgcatttcgatccacatcggccaggccggtatccaggtcggaaacgcgtgctgggagctgtactgccttgagcatggcattcaggctgacggtcagatgcccggtgacaagaccattgggggaggtgatgctgagttcgatgagggcgaggatggcgacgagggtgacgagtactag

SEQ ID NO: 90461 - DNA, 1889 bp, Zea Mays
gtcgttctgttctataaagcgagacgagtgggagcaggcgtaaccctaattgagcatcgcagagataggcgtcttcgtactcgcctacctccgcggctcaaacctttcccccttctcccaattccttccgccggccgccgctccacccgtacgacgacaccatgagggagtgcatttcgatccacatcggccaggccggtatccaggtcggaaacgcgtgctgggagctgtactgccttgagcatggcattcaggctgacggtcagatgcccggtgacaagaccattgggggaggtgatgatgctttcaacaccttcttcagtgagactggtgctgggaagcacgtgccccgtgctgtttttgttgaccttgaacccactgtcatcgatgaggtgagaactggcacctaccgccagctcttccaccctgagcagctcatcagtgggaaggaggatgcagccaacaactttgcccgtggtcactacaccattggcaaggagattgttgacctgtgccttgatcgcatcaggaagcttgccgacaactgcactggtctccagggcttcctcgtcttcaacgctgttggtggaggaacgggctctggccttggttccctcctcctagagcgcctgtctgttgactacggcaagaaatccaagcttgggttcactgtgtacccttccccccaagtttctacttcggtagttgagccatacaacagtgtactgtccacccactccctcctcgagcacactgatgtggctatactgctggacaatgaggccatctacgacatctgccgccgatcccttgacattgagcgcccaacctacaccaacctcaacaggcttgtgtcccaggtcatctcatcccttactgcctccctgaggttcgatggtgctctgaacgtggatgttaacgagttccagaccaacctggtaccctacccgaggatccacttcatgctttcttcgtacgctccagtcatctctgctgagaaggcctaccacgagcagctctctgtggctgagatcaccaacagtgccttcgagccatcttccatgatggccaagtgcgacccacgccatggcaagtacatggcctgctgcctcatgtaccgtggtgatgtggtccccaaggatgtgaatgctgctgtggccaccatcaagaccaaacgcaccatccagttcgtggattggtgcccgactggcttcaagtgcggcatcaactaccagcctcctagcgttgtgcctggtggcgacctggccaaggtgcagcgtgccgtgtgcatgatctccaactccaccagtgttgtggaggtgttctcccgcatcgaccacaagttcgacctcatgtacgccaagcgtgccttcgtgcactggtacgtcggtgagggtatggaggaaggtgagttctctgaggcccgtgaggacctggcggcgctcgagaaggactacgaggaggtcggtgctgagttcgatgagggcgaggatggcgacgagggtgacgagtactagagaagtttgctgatgacgcagcatcaggccagtgtgctgcccttatcccgtgatctgccgagagttgctcctgctatcgtgttatgtgtgtctgttctgaagtattgtgtggtttacaacacctgatgttgtaagagttgttaattcccctgcattgctaccgggttattgagaataattatggctgtttacgttgttgcttcatctcggagatgctttacatttaccaccttgttcatcttttgtcatcagtaaaatcgagtcggcggatgattttcttgcgtcttgtcatgagtattgagtagtatggattgtttgatgctttatatcacattgcagaagatagtacgatctctagctatatatatgttc

SEQ ID NO: 90462 - DNA, 100 bp, Zea Mays
gttacggccgacagagacataagcaattctaatctgacacacttcctgtttctattatattattatataatatatgactaaaaacatgaaacaaaggttt

SEQ ID NO: 90463 - DNA, 1546 bp, Zea Mays
actctcctctcctctccgcctcaccttgccctgcccgcacacaccacctgtccccgcacggccgcaccgctccgctcccgaggcttagggctccggccgcgctcccttcccttcccggcattcccgatctctcgccgccgcccgcctggccttgatctcgatcgccctcccctctccgctctcgctccggcaggccggcccgggtttgtctcgccgctattgggcctcggcacgctgcgatggtgtcgggcgtgtgcgtggggacggaggggcaggtggaccctgaggcggtggcgccggctgtcgcggaggaggcggtggtgccggcgcccgcgagggaggtcgtggtggggtacgcgctcacgagtaagaaggccaagagcttcctccaacccaagctccgggggctcgccaggaaaaagggaatcttgtttgtcgctattgatcagaaacgcccattgtctgatcaaggtccatttgacattgttcttcataagttgactggaagggggtggcagcaattgctggaggaatatagggaggcacacccagaagttactgttcttgatccacctggcgcaatagcaaacttgcttgatcgccagtctatgcttcaagaagtatctgaattggacctcacagattgtcatggtaaagtacgtgtgcctaagcagctattcgttaatactgatccctcatcaataccagctgcagttaggagggcaggtctctctctcccattggtggcaaaacccttggtggcgaagtcccatgagctatcccttgcttatgatccaacttcactgaccaaacttgagccccccttggttcttcaggaatttgttaaccatggtggcgtcatgtttaaggtgtacattgttggggatgcaataagggttgtacgtcgattttcactcccaaatgttgatgaaggcgatctatcgaacaatgctggggtatttcggtttccaagggtctcttgtgctgcagccagtgcagatgatgcagatcttgaccctcgtgttgctgaacttcctccgagaccattgcttgagatcttggcacgagagctgcgccgacgactgggtcttagactattcaacatcgatatgattagggagcatgggacgcgagatcggttttatgtcatagacatgaactactttcctgggtacggcaaaatgcctggatacgagcacgtgttcaccgacttcctgctgagccttgccaagaaagagtacaagagacgacaaagctatagctcgctaagctcaggcgaatggtgataagcgaggagactactcggcggggcatgtatatgtctatcatccacgatgcgtgcgtacagatgtacttgtgcatgacgagagataatgggtcgtagaagcggagggctgttgtcaggctataactaactgttgctttacatgtgctaactgttgatgcttcagaataaattttgtttgggtggatgatggctctgctgaaatcgagctacttgtagaacttatgactggaacctcgaaataaacggagaatttggatt

SEQ ID NO: 90464 - DNA, 2066 bp, Zea Mays
actctcctctcctctccgcctcaccttgccctgcccgcacacaccacctgtccccgcacggccgcaccgctccgctcccgaggcttagggctccggccgcgctcccttcccttcccggcattcccgatctctcgccgccgcccgcctggccttgatctcgatcgccctcccctctccgctctcgctccggcaggccggcccgggtttgtctcgccgctattgggcctcggcacgctgcgatggtgtcgggcgtgtgcgtggggacggaggggcaggtggaccctgaggcggtggcgccggctgtcgcggaggaggcggtggtgccggcgcccgcgagggaggtcgtggtggggtacgcgctcacgagtaagaaggccaagagcttcctccaacccaagctccgggggctcgccaggaaaaagggaatcttgtttgtcgctattgatcagaaacgcccattgtctgatcaaggtccatttgacattgttcttcataagttgactggaagggggtggcagcaattgctggaggaatatagggaggcacacccagaagttactgttcttgatccacctggcgcaatagcaaacttgcttgatcgccagtctatgcttcaagaagtatctgaattggacctcacagattgtcatgttctcttctgcaggtaaagtacgtgtgcctaagcagctattcgttaatactgatccctcatcaataccagctgcagttaggagggcaggtctctctctcccattggtggcaaaacccttggtggcgaagtcccatgagctatcccttgcttatgatccaacttcactgaccaaacttgagccccccttggttcttcaggaatttgttaaccatggtggcgtcatgtttaaggtgtacattgttggggatgcaataagggttgtacgtcgattttcactcccaaatgttgatgaaggcgatctatcgaacaatgctggggtatttcggtttccaagggtctcttgtgctgcagccagtgcagatgatgcagatcttgaccctcgtgttgctgaacttcctccgagaccattgcttgagatcttggcacgagagctgcgccgacgactgggtcttagactattcaacatcgatatgattagggagcatgggacgcgagatcggttttatgtcatagacatgaactactttcctggtatgcaatctgacattcttgagcttgcacaagctatcttttgtttcggtaaagctgacccctacatgtacattttagaattattgatcaaagaatctcctgtttaatcctgttctactatagctaagtctttaaattaattcgcagtgcattgctgacactaatatgaaataccaaattggagacactgcgaatagaggtagtttatctcccgtgtcatcatgactaatgatgatatcaggtatactgcttgatggatgtactgaacgaacgagatgcctgtgctgtgacacttgttccactctgtcggttttattgtttttaaaaacagtttggagtccaaagagtggctagaacctggcacgccgaagttatcccagctcagcctgttttcttgtgggtagattctttgatttgacaatgatattagccataaacccataacttctcggccccctattctacttatgctgccttttttcctgaccaaacttttgttggtcgcagggtacggcaaaatgcctggatacgagcacgtgttcaccgacttcctgctgagccttgccaagaaagagtacaagagacgacaaagctatagctcgctaagctcaggcgaatggtgataagcgaggagactactcggcggggcatgtatatgtctatcatccacgatgcgtgcgtacagatgtacttgtgcatgacgagagataatgggtcgtagaagcggagggctgttgtcaggctataactaactgttgctttacatgtgctaactgttgatgcttcagaataaattttgtttgggtggatgatggctctgctgaaatcgagctacttgtagaacttatgactggaacctcgaaataaacggagaatttggatt

SEQ ID NO: 90465 - DNA, 110 bp, Zea Mays
ggcgtcctatggccttgcgtgcttgttcttgtctcgaagccctttaggtttattgggggcgaaatatctggtgtttgagctactgaaggtgttggataatggatttgtgg

SEQ ID NO: 90466 - DNA, 1233 bp, Zea Mays
atgttgaggcagagctctagtagaaatcagagatccaaaggtctgaagctgaagaaagctcttcagattagtctcttgcttctggtttctgtttggttgctctaccaagttaagcattcttatgagaagaaggcatacagcgaagatgaagtgagtggttcacataaagatgacaaggaccagggagagacagtcagactaggcaggaaggatctgcctccaaagatggaggccgactcttcaacattggatgaacgggttgaggatgaagagaatgatgaaatggagcaagaaatgaaacatgatgagaacgatgatgatcccatcgatgagcaagacttggagaaggatgaggatcttcctgagcctggtgagcattcttctgaaagggatggagatgtgggtgtgtttgatgatgaagagcggaaggagcggtcacaggaggatcaagagaagagcttccatggtgacaatgtttctagtgctgttactcatgaccccccatcatcggagcaagatgagctgttccatcgtggccaagagaaggtcttatttgtggatgatgcttcaactgcagtgcctaatgaaaatcacgaggctggaaacgaggatgaagtgcgcagggctagggaaaggagcttcagaggtgatgatgtgtcaagctctgtagatcatgacggcaaggtgacaaaacctctcccagaggaacaattgaacatcatggataggatatttgaaggcaccacaaacttatctaatggaatttcatttcgagctcctggaataaatggatcatataccaccgcaggcaatgtggctacaccaacgaattcatcttcccagaaaaacacagacattcctagcgatgacattgaaagcaagacccatccatctccaacaaatttgaccagcaaccctgagcaaactaattcaactttgaaaggtcatccggatcaacaagtgaattcaatggcagtgctcggcaaccaagtacagcctttgactaaccagacgtcgcttgagttggattctcctccaaatggcaccttggctctggtaacagatgccaaaaagtccacatctggagctggagatgatggcagcaacagcacctcaccctccactcatgtggacaagaagacggacggcggagatggtcccaaagaagacgtggatgtgtccactaaaataatgaataaggcaattagtgaagatgaagttgttccagagtga

SEQ ID NO: 90467 - DNA, 415 bp, Zea Mays
tttactcttaattgcagtttgttggacaaatatggtgggcagttggctgagggggaggaggaggaggagggggaggagggggaggaggagtaggacggcggacgaggcagagcaggcagcgcagcaggacgaggcagagcaagcagcgcagcagcaggcggcgcctcacgacaacgacgaccagcagcaggacgacgacgaccagcagcaggacgcctcaggttcaggcggctcaagttcgaggagcatctacctgcgaggccccgcgagtctccctcagcgtcccatacttcgggacaggcggccgctgattcggccggaaggggagaggtatgtaactttatgttcttcattcttgttcatattatgtgttcaaaatcataatataaactaatactttttatttatcacttgg

SEQ ID NO: 90468 - DNA, 489 bp, Zea Mays
atggatcgatcgaccattcaccagcaacagttcctccaaagaaaagaaaaaacacgtaagtacagtacaccaatgggctcatcagcagcagcagctggagacctgacgaggggatcgcaatcgcagcatccggatcgatcacgggtccagtgctcgccggtccgcgcagcggcacctccagttgagaggcttgtagtcggtgtagctctcctcggcgctgccgaacagccctccgcggcgccggggctcgcccccgcggctgtcggcccgcggcgccaccggcacctgcaccgcctcgcaccgcccgcacggcgcgcacttgccgtcgcaccgcggcggcctcgacccgatcagcgactccgccgtcgccgccccctcgccgtcgccgatctgctttggtggacgcggatccttgagccggtaatgcggcgctctactaccgtcggcagagcgcaggccgtgagaggaggaggaagaagaagagggtag

SEQ ID NO: 90469 - DNA, 645 bp, Zea Mays
aacttttcggcctaactcaatcgacaccattgtccaagctaaaaggcccaacttaataggctgccacttgccagtagaaccgtttgcctctcgcctgcatcctagtccggcggccgcacccgggcagctccggcggttccccgccgccgtcctccgtctatccccgactgcgctagagctccgtctcatgggggcgtccgaatctctcctatctaggcagcagcttcagcagccgcggcctcagtgggcggatgagatcacgacggtgtccgagggccggcgcgacgacgccgacgccgatcccctcgtccgccgtatccggtctctcaccatagctcctccgctattgagctcccaatctgaagcggaagcagagagcagcctcacggatatcctcgtcgggaagccctctaactcctcagccacctctggtgagtggctgccagccaggacgctattttggaaatctgaacccaaatgtcctagctgagcttttcgccatgtaccgcgaatggcaagaagagaatgccaagaaaattagccgaaaacaggtaggtgggaattgttgtaagagttctctctttcagttattgcttattgaggggactcaatcaggatatggcattgtggttcgagtcactagtt

SEQ ID NO: 90470 - DNA, 1299 bp, Zea Mays
aacttttcggcctaactcaatcgacaccattgtccaagctaaaaggcccaacttaataggctgccacttgccagtagaaccgtttgcctctcgcctgcatcctagtccggcggccgcacccgggcagctccggcggttccccgccgccgtcctccgtctatccccgactgcgctagagctccgtctcatgggggcgtccgaatctctcctatctaggcagcagcttcagcagccgcggcctcagtgggcggatgagatcacgacggtgtccgagggccggcgcgacgacgccgacgccgatcccctcgtccgccgtatccggtctctcaccatagctcctccgctattgagctcccaatctgaagcggaagcagagagcagcctcacggatatcctcgtcgggaagccctctaactcctcagccacctctggaaatctgaacccaaatgtcctagctgagcttttcgccatgtaccgcgaatggcaagaagagaatgccaagaaaattagccgaaaacaggaggagatagaaaacaagatagaaacagctgatgcattggcagttaaacttctccagcggttcaattattgtcttacttacatgagatccacctcccacaatcttgctgaagtgcatccgctgcagatcgaagttggtgagtcaaagggcaggttaactgaagtcataagcaactgcgatgcattgtgtaagagaattgctgcagaaggaccagaaagcctacgatcatctgttcaacctttcatggctgctagagcggaggcagaagggagtggttcacttgacccaaaacaagagtcctgaattgtacaatctaactgctgacagcatgcgcaaagaaacttcagaggatgattagtttgtcctgaacaaatatattatataaacacgtttaggaattgttcggttattctcaatacatatggattggatgagattggaaaaaattaagaagaagtttgacttgtttgggattcaaacctatcaaatcccactcaattcacgtggattgagagctaatcgaacaagcccttataatgttggaaaacatgttttagtcttagaaaccgtctacattgacactagtatatctatcacgttaaccaacgtatcattcgaatggagaattgtatcattcgaatagagaattgtagatctttactactagacgcatagcgtagatgtagtggaagtagtcgaatgttcttgtgttcattcatcctcaagtttgttgttgattactgtcgcaataatagcagcttctccacggtgttcacaca

SEQ ID NO: 90471 - DNA, 1873 bp, Zea Mays
accaaaaatttcgctgccgccttctcgtcttccttaaaaccgctgctcttcaacatcaatttcgccgccgcggcatcgcgcctgattgttctactaccccgccgcgccttggcattgcgcctgaatcctgattcgattttctgctaccccgtcgcgccaccgcatctcgccatggtgtcctcctgcatcgtccgccgcaagcgctcccggtcgccgacacactgtttcgactccgggagccgcacgcgcccacgcccctcgccgtcctcccccgacgtcggccgcaagcgttcccggtcgccgccgcactgttctgaccgcgagggccgcaagtgcacgcgcccctcagcgtccccctacggcggccccaaccgctccctgtctacatcgtgcggtttcgactccgcgcggtttgagcgcgcgcgcctgacgacgggagatggcaaagtcgcggcggtggcatcgctctccgacgatatgctcctggaggtcttcaagcggctgccgcccccgcgcgacgtcatccgctgcgccgcggtgtgccgccgctggcgccgcgtcatctccggcgctggagcggcatgtcttcccaggccgcctagccatttcggtttcttccgcaactacggtccatcgccgctgcccccgttcgtgcgcaccgcgggcctctcccttgacatcagtttcctcccggtgccgcccgcgtgcggcgcggtcctcgtcgactcccgcaacggccgactactcttgcgggaactcggccctggctaccctcgcgaactcaggctcctcgtctgcagcccgctggagaaggcgtacgttcgggtgccgcctctgtgcatagcggagcacatggtggcgtgtagcgtgctcgtcccgggggaaggcgatgcattccgcgtggtggttgtcctcttcggcaacgacccgaaacacttcagtgttctcgtctacttttcgatatcttccgcttgggagtctgccactgggccggttcatcggaatctggtccctcgtcaaggcccatcagtcgtcgtcggagatgtcatgtacaagctgcagagcgaagagaagtacatcatggttgtcgacgcggtccagatgactctgtcggcggtgccccttcctgatgccagaacgctcctctacgctggtaaccactggattggcaggacaccggacggccggctttgtttcttcgtgatcagggagcagcttactctcgccacctgggttctccaagcacctgggaagtgggtggagcagcaacccgtggacctgcgcacgctgatgcacccggcgtttatgggtgatctcgcccacatgaagctctcggcgaagatgtcggaccagctccgtggcttcaaacttgtgagcttcgcagcgttctgtgagggtacatgcacgctgttctttgtcatggcagattgggttgtgatgctcgaccctaggacgaggagactgctgaggctgtggcgcaacagtgatgagtcgcggccattgggtgatgtatacccgtgtgagatgctgcagtggccgccagtgcttaagaactttggcgggtctgaatcagatgaggcgggtatttaaaatacgacttggcggcgtagtgtttgtggtgatttgactagaaaagttgtgtgccacgctatatggccgcttattgtcatgaatccatgtatgtgaactgaattcaattgggaaaacacggatttgaatgaattccaattcaatgtatttttccatatagttttcttgttcggacagttttttcatttgtttattgtaaatctttgaagatggcacactattatagccctatttagctttgttgtccaaatttaggaataatatctccaatatttcaaatttc

SEQ ID NO: 90472 - DNA, 2394 bp, Zea Mays
atcgcccgcatgtgcatctcgtccgccacgggccacagccggcctcactccgcaagtccgcgaccatgcggtgcaccctctccgcccctctccggcgctgtctctcctccaccggcgccgccgatcctagcctagtctcttcagctgagcatgcgtaccggctcctccgccgccaccactccgacccgcagaggctctccgccgcgctgtccgcgtcgggtctcgacgcctcctcgccgcacctcctcgacgccgtcctccgccgctgtggcgctgcctcctccctcgcgctgcacttcttccactggtgctccccgtcgctgccctcgccgctcccgtcctccctagcgctcctcgccaagtccttctcccgcgcctcctccgcgccgtccccgtccctactcgcgccgctcccctctcaactccttggcccctccctcctctgccccgtcctgcgccgcctcccgcaaccgcgcctcctgccgttcgcgctctcactactctccgcccgccccgaccacgaccagcccgccctctttctttccctcctcgagtccctctccaaggccggccacgtcctcaccgccgagcagcttgtcgaggagctccagccccggctcccgctttcgctccgccactatacggccttgctctacggatggtgccgtcagggcaagctcgacgaggccaagcacgtgctcgctcgcatgaaggctgcggatgttgcccttgacgtcgtcgtatttaacaccctgctcgctggcttcgtcgcggaagggagattcgaggacgcgttcgagctggcggggcagatggagcagcgtggctgtccaccgaacgcggtgtcgtacaccaccctgattcaggggcttggcgcgagggggagagttgatgaggccatgcgcgtgtttgtggaaatgcgaaggaaggggtgcgcgcccgatgctgtcacgtacggcaccctggttaacacgttttgcaaggctggcaagatatcccaggggtacgagttcttggatgctatgtcgagggatggcctgcgggtggacgctgccgtgtaccatggtttctttgtagcacacgagaagaaggagcagcttgaggagtgcttggagctgatggagaggatgcgggagtgccggtgtccaccagatctcaagatatacaatgtggtgattcggttggcctgcaggcttggggagaccaagcaagccatgacattgtggaatgagatggaaagtgctgggctcagtcctgtggtcgatacatttgctatcgtggtgagtggccttgttgggcagggtttgctgattgaggcatgtagttattttaaagacatggttgggagggggctctttgtggtaccgcaatatggggtgctgaaggacctcctcaatgcgttggtcagagatgagaaacttgagcttgcaaaggatgtttggaaatgtattgtgagcaaaggctgtgagctcaatgtgagtgcatggactatctggattcatgcactgtttgcgaagaaacatgtcaaggaggcctgcctgtattgcttagacatgctagaggcaggactgatgccacagcctgacacatttgcaaagttgatgaaggggctgaagaagttgtacaaccgtcagattgctgctgagattactgagaaggttaggaagatggcggaggagagacatgttagctttaagatgtataagagacgtggggtgagggatcttgaagagaaactcaaggcaaagaggagaggacagaaaaagaggcatctgcggcagcctggtcatggtcagtctagtagggatgctggcaatttggatgcttctgatgaagtagaattttccggctaattgaaatagaattcattgggggcaatgcatctctgttcatttgaattgttttggggagtgatagacttactaaacaataaaggagtgctggtgatcatgccttgccatcataatattattcttatgctaaagatgtattgggtttcaggcaagagccaagtggtacatcgattacatgtgaagttgtgtgccaagagttactgaccatgaggaggtagaagaatatgacgggtgatttatttgatctgcacttaggccttgtttggctgtacctcaatccactccaatccacgtgtattggggtggattaaggggccgttcggttactgcagaatgaagtcctggaacaattcctatccgaattgtttctctcatttatataaattttgattagctggaataattcctggtgtattcctatgcaaacagggcctaagggtttgtctagctacactgcaatccatctcaatccacatgtggattggggtgaattgcaacgtaaccaaataagggccaaggtggaagcaatgtttcagattat

SEQ ID NO: 90473 - DNA, 954 bp, Zea Mays
ccagggcccaacctgcctggggacgtgcccgggcttggcttcgttggtggtcgtgtggatccctgcgttagctgcgcaggttgccccatgtccgcaccctccgacctaaatctcgctcatgtcgtccggtgccatgcgactcgctgttgtgcgctcaggtgcccaacgcggcgtgatgagaccggcaacgtggctggaccggcgacgcggctgcgtggcagatacatgtgagcatgggcactgtcgccacctactcgaccaggggctgctcctccccatctcacgtggaactcctcccttggttgcttctcaaccgcatcagcgaggaaaacaagcacagaactatgcacacttgttctagcatgaatggaggtcgccaagatggatttggcaaacttcatggtggatactagagacgtacaccaagaagaaactcacgtaggctcagcaaagtcattgtcgcaaggtgttgctagggacaacttctattcaatgtttcacattacccagagaggaggaaattctcaaaagaggaatacaaagcattcacgagagagatgaataaagctatgaagcagctgttgtcgtgaccggatttcaacaggtgggcgttggctaacgcggacatgatatctgtgtggctctgccaggaggaaactacagcagcagcaacagcaaccaacagcggcatcgtttcttgggactatttttgatctgcatgtgtgtagtgtgctttcttagcagcaataggagtgctccctactcagtcatttcatgtgagttgattagcaagggtagggtaacatctgagtgttccacattatgaagtggcagcaaatatgtagaatattgtagtttagtgagtcacatcttaggtccaaaaagtccaaacagcatctgaatcttgtaacattcagtgctaaggtgagtgaatctcaatttgttgagttgtat

SEQ ID NO: 90474 - DNA, 2479 bp, Zea Mays
ccacccctccccacggcccccgtaagtaaaacccaaggccaccaccatgcacccaccgagcacacatacacactcaccagcaggcagcagcagctagccaagctataccactagaaccagagcacaactcaaagcaatgccgccgcctcctcctcctccgccccactcccacgcttcccatcccgcgccgcatggacgcgagcagcactagcgcgggggcacacagcacggcgagcgggcgggggcgcgacgatggacctgggcgggtcggtggtgatggacgcgggcgcctcggagctgggcctgctcggcggcggatctagcaggctgctcaagcacgggcgggggcccaatgcggcggggggagacgacgacgtgtggggcggcggcagggccaagcagcccaggacagggacagcgcccgtcgtcgccggggacgtggcggctgccaccaaggcggcggcggcgccgttcctgctgggctcgtgcagtcccggccacggcggggagcagatgctcagcttctcgtccgccgccgccgccgccgcggcctcgtgcgcctcctccaccgctgcggctgatggcggcggggccatgccgctgtactacgggaccccggcctcttgctcaggattgagctcggtgagcttgagcaccagcatgcagggggcaatggccagggtgagggccccattcacgccgtcccagtggatcgagctcgaacaccaggccctgatctacaagtacctggccgcgaacagccccatacctcacagcctcctcatccccatcaggaggagcctcgcagcgtctccctacccgccttcatacttcggcacgagcacattggggtggggctctttccagctgggctactccggcaatgcggatctggagcctgggcggtgccgccggacggacggcaagaaatggcggtgctccagggacgcggtcgccgaccagaagtactgcgagcgacacatgaaccggggacgccatcgttcaagaaagcatgtggaaggccagcctggccatgccgcgaaagccatgtccgcggtggcggcggcggctgctgctgctgcccagcctgctgctctggccggcgccggagctcctgctgctggcctcactgtcaatcagcaccagctgccggcgaagagctacgccacgggtgcgactgacccttgctctctgcaatataacagggaactggtgaacaaacagaatgagagcgaaaacatgcaggactccgacaacctctcgatgctgacttccatgaacacaggaaacacaggcagcgtgttcccattctcgaaacaaaacaccaatccttttgaagtgaccagctcaaggctagagttcggcctcgtttcatcggattcactgatgagttcccctcacagttccttggagaacgtcaacctgctcggctcacagagtatgaacgaacaccagaacccagcctccctgcaacacttcgtggactggcccaggacgcctgcccagggaggcctttcatggcccgaagctgaagacatgcaggctcagaggtcacagctctccatatctgctcccatggcatcctccgagctatcgtcggcctccacatcccccatccacgagaagctgatgctgtcgcctctgaagctgagccgcgagtacagcccgactggtctcggcattgcggcgaacagagacgaggctagccagctagaagcaacctgggcgacgatgttccgtgactcttcgatgggcggtccgttgggggaggttctggccaagaacggcaacgtggaagcgagaaattacctgtcggcgcctctgaaccttctcaccgactactgggattcaagccacgggatggagtcctcccctgtgggcgttctgcagaagacgaccgccttcggatcggtctccagcagtacagggagcagccctagggttgagaaccacggcgcctacgacggtttcggcaacctgcgggatgatctcggctcaattgtagtgcgccatccaagcatccgccttgtgtgagctttctgagttctgaccatggaaaactgcaacaagacggcggcccgcagccatagaagtgggcatatgggctactatgctaatcctcaaagcgtgaggggggggcatttacctcgtagtttgtcatttgagactgatctcctgttttttgtcacttcagttcttcttttgcttccctttttaacttggctttgtaactttcaccttccttggatcgtgaaaagcgctgtggtgtgtggtgtggatggatttggtgcgccgctgatgcatatcatcatgtgatagaagaagccagtatccgtcgaggattactgcgagtatcgcctgtttgttgttcatacgtcatactgctgcactgcacttcactgtttgtgtgcccgttgttgcattgtatggttcggttatattaatttacaaacaggtcgtgaggctgcacatttagatt

SEQ ID NO: 90475 - DNA, 1963 bp, Zea Mays
cttgcatgcaggcgctccgttccaggtttttgtgtctttttttgcttgccttttatcctgccctaggatcgtgtttaggaaacgcttgcatctcggcggtcatctctatgaagcagattgagctcggtgagcttgagcaccagcatgcagggggcaatggccagggtgagggccccattcacgccgtcccagtggatcgagctcgaacaccaggccctgatctacaagtacctggccgcgaacagccccatacctcacagcctcctcatccccatcaggaggagcctcgcagcgtctccctacccgccttcatacttcggcacgagcacattggggtggggctctttccagctgggctactccggcaatgcggatctggagcctgggcggtgccgccggacggacggcaagaaatggcggtgctccagggacgcggtcgccgaccagaagtactgcgagcgacacatgaaccggggacgccatcgttcaagaaagcatgtggaaggccagcctggccatgccgcgaaagccatgtccgcggtggcggcggcggctgctgctgctgcccagcctgctgctctggccggcgccggagctcctgctgctggcctcactgtcaatcagcaccagctgccggcgaagagctacgccacgggtgcgactgacccttgctctctgcaatataacagggaactggtgaacaaacagaatgagagcgaaaacatgcaggactccgacaacctctcgatgctgacttccatgaacacaggaaacacaggcagcgtgttcccattctcgaaacaaaacaccaatccttttgaagtgaccagctcaaggctagagttcggcctcgtttcatcggattcactgatgagttcccctcacagttccttggagaacgtcaacctgctcggctcacagagtatgaacgaacaccagaacccagcctccctgcaacacttcgtggactggcccaggacgcctgcccagggaggcctttcatggcccgaagctgaagacatgcaggctcagaggtcacagctctccatatctgctcccatggcatcctccgagctatcgtcggcctccacatcccccatccacgagaagctgatgctgtcgcctctgaagctgagccgcgagtacagcccgactggtctcggcattgcggcgaacagagacgaggctagccagctagaagcaacctgggcgacgatgttccgtgactcttcgatgggcggtccgttgggggaggttctggccaagaacggcaacgtggaagcgagaaattacctgtcggcgcctctgaaccttctcaccgactactgggattcaagccacgggatggagtcctcccctgtgggcgttctgcagaagacgaccgccttcggatcggtctccagcagtacagggagcagccctagggttgagaaccacggcgcctacgacggtttcggcaacctgcgggatgatctcggctcaattgtagtgcgccatccaagcatccgccttgtgtgagctttctgagttctgaccatggaaaactgcaacaagacggcggcccgcagccatagaagtgggcatatgggctactatgctaatcctcaaagcgtgaggggggggcatttacctcgtagtttgtcatttgagactgatctcctgttttttgtcacttcagttcttcttttgcttccctttttaacttggctttgtaactttcaccttccttggatcgtgaaaagcgctgtggtgtgtggtgtggatggatttggtgcgccgctgatgcatatcatcatgtgatagaagaagccagtatccgtcgaggattactgcgagtatcgcctgtttgttgttcatacgtcatactgctgcactgcacttcactgtttgtgtgcccgttgttgcattgtatggttcggttatattaatttacaaacaggtcgtgaggctgcacatttagatt

SEQ ID NO: 90476 - DNA, 1873 bp, Zea Mays
cttgcatgcaggcgctccgttccaggattgagctcggtgagcttgagcaccagcatgcagggggcaatggccagggtgagggccccattcacgccgtcccagtggatcgagctcgaacaccaggccctgatctacaagtacctggccgcgaacagccccatacctcacagcctcctcatccccatcaggaggagcctcgcagcgtctccctacccgccttcatacttcggcacgagcacattggggtggggctctttccagctgggctactccggcaatgcggatctggagcctgggcggtgccgccggacggacggcaagaaatggcggtgctccagggacgcggtcgccgaccagaagtactgcgagcgacacatgaaccggggacgccatcgttcaagaaagcatgtggaaggccagcctggccatgccgcgaaagccatgtccgcggtggcggcggcggctgctgctgctgcccagcctgctgctctggccggcgccggagctcctgctgctggcctcactgtcaatcagcaccagctgccggcgaagagctacgccacgggtgcgactgacccttgctctctgcaatataacagggaactggtgaacaaacagaatgagagcgaaaacatgcaggactccgacaacctctcgatgctgacttccatgaacacaggaaacacaggcagcgtgttcccattctcgaaacaaaacaccaatccttttgaagtgaccagctcaaggctagagttcggcctcgtttcatcggattcactgatgagttcccctcacagttccttggagaacgtcaacctgctcggctcacagagtatgaacgaacaccagaacccagcctccctgcaacacttcgtggactggcccaggacgcctgcccagggaggcctttcatggcccgaagctgaagacatgcaggctcagaggtcacagctctccatatctgctcccatggcatcctccgagctatcgtcggcctccacatcccccatccacgagaagctgatgctgtcgcctctgaagctgagccgcgagtacagcccgactggtctcggcattgcggcgaacagagacgaggctagccagctagaagcaacctgggcgacgatgttccgtgactcttcgatgggcggtccgttgggggaggttctggccaagaacggcaacgtggaagcgagaaattacctgtcggcgcctctgaaccttctcaccgactactgggattcaagccacgggatggagtcctcccctgtgggcgttctgcagaagacgaccgccttcggatcggtctccagcagtacagggagcagccctagggttgagaaccacggcgcctacgacggtttcggcaacctgcgggatgatctcggctcaattgtagtgcgccatccaagcatccgccttgtgtgagctttctgagttctgaccatggaaaactgcaacaagacggcggcccgcagccatagaagtgggcatatgggctactatgctaatcctcaaagcgtgaggggggggcatttacctcgtagtttgtcatttgagactgatctcctgttttttgtcacttcagttcttcttttgcttccctttttaacttggctttgtaactttcaccttccttggatcgtgaaaagcgctgtggtgtgtggtgtggatggatttggtgcgccgctgatgcatatcatcatgtgatagaagaagccagtatccgtcgaggattactgcgagtatcgcctgtttgttgttcatacgtcatactgctgcactgcacttcactgtttgtgtgcccgttgttgcattgtatggttcggttatattaatttacaaacaggtcgtgaggctgcacatttagatt

SEQ ID NO: 90477 - DNA, 1290 bp, Zea Mays
ttgcatgcaggcgctccgttccaggtttttgtgtctttttttgcttgccttttatcctgccctaggatcgtgtttaggaaacgcttgcatctcggcggtcatctctatgaagcagtacacatgtttttggctgcgccttgttggcttccaccgttttgctgctcatctctcctaactatgcctgcctgtttgctccccgcaggattgagctcggtgagcttgagcaccagcatgcagggggcaatggccagggtgagggccccattcacgccgtcccagtggatcgagctcgaacaccaggccctgatctacaagtacctggccgcgaacagccccatacctcacagcctcctcatccccatcaggaggagcctcgcagcgtctccctacccgccttcatacttcggcacgagcacattggggtggggctctttccagctgggctactccggcaatgcggatctggagcctgggcggtgccgccggacggacggcaagaaatggcggtgctccagggacgcggtcgccgaccagaagtactgcgagcgacacatgaaccggggacgccatcgttcaagaaagcatgtggaaggccagcctggccatgccgcgaaagccatgtccgcggtggcggcggcggctgctgctgctgcccagcctgctgctctggccggcgccggagctcctgctgctggcctcactgtcaatcagcaccagctgccggcgaagagctacgccacgggtgcgactgacccttgctctctgcaatataacaggtattttcttctgctctgcttgtgctcgaaatgctgtaacacgtaaggaatatgtcgtctagtcttggtcttgctagccaaactatctgctttcgtcaaactggcgctagattgaatgtttatttgctttctcctacattcttccagctgccctagtgtgacactggacttctctgatgtgatattgtgatacttgtccaggtgctggtagtgtagtgtagggctgtaggtgttgtgtttacagtatcgagttccatcccaaagtcttcaatctatatacaagtgtttccatgaatttgcaaacatgaacatgttcatgggccctcaaatttcagtcgctctttgatgtacatgctaactaatcccactgctgaatgatccatgcagggaactggtgaacaaacagaatgagagcgaaaacatgcaggactccgacaacctctcgatgctgacttccatgaacacaggaaacacaggcagcgtgttcccattctcgaaacaaaacaccaatcct

SEQ ID NO: 90478 - DNA, 1684 bp, Zea Mays
cgattgtttcttttccggatcttgatttggcgctgttgcgtgttgggcgcagtggggtggggctctttccagctgggctactccggcaatgcggatctggagcctgggcggtgccgccggacggacggcaagaaatggcggtgctccagggacgcggtcgccgaccagaagtactgcgagcgacacatgaaccggggacgccatcgttcaagaaagcatgtggaaggccagcctggccatgccgcgaaagccatgtccgcggtggcggcggcggctgctgctgctgcccagcctgctgctctggccggcgccggagctcctgctgctggcctcactgtcaatcagcaccagctgccggcgaagagctacgccacgggtgcgactgacccttgctctctgcaatataacagggaactggtgaacaaacagaatgagagcgaaaacatgcaggactccgacaacctctcgatgctgacttccatgaacacaggaaacacaggcagcgtgttcccattctcgaaacaaaacaccaatccttttgaagtgaccagctcaaggctagagttcggcctcgtttcatcggattcactgatgagttcccctcacagttccttggagaacgtcaacctgctcggctcacagagtatgaacgaacaccagaacccagcctccctgcaacacttcgtggactggcccaggacgcctgcccagggaggcctttcatggcccgaagctgaagacatgcaggctcagaggtcacagctctccatatctgctcccatggcatcctccgagctatcgtcggcctccacatcccccatccacgagaagctgatgctgtcgcctctgaagctgagccgcgagtacagcccgactggtctcggcattgcggcgaacagagacgaggctagccagctagaagcaacctgggcgacgatgttccgtgactcttcgatgggcggtccgttgggggaggttctggccaagaacggcaacgtggaagcgagaaattacctgtcggcgcctctgaaccttctcaccgactactgggattcaagccacgggatggagtcctcccctgtgggcgttctgcagaagacgaccgccttcggatcggtctccagcagtacagggagcagccctagggttgagaaccacggcgcctacgacggtttcggcaacctgcgggatgatctcggctcaattgtagtgcgccatccaagcatccgccttgtgtgagctttctgagttctgaccatggaaaactgcaacaagacggcggcccgcagccatagaagtgggcatatgggctactatgctaatcctcaaagcgtgaggggggggcatttacctcgtagtttgtcatttgagactgatctcctgttttttgtcacttcagttcttcttttgcttccctttttaacttggctttgtaactttcaccttccttggatcgtgaaaagcgctgtggtgtgtggtgtggatggatttggtgcgccgctgatgcatatcatcatgtgatagaagaagccagtatccgtcgaggattactgcgagtatcgcctgtttgttgttcatacgtcatactgctgcactgcacttcactgtttgtgtgcccgttgttgcattgtatggttcggttatattaatttacaaacaggtcgtgaggctgcacatttagatt

SEQ ID NO: 90479 - DNA, 768 bp, Zea Mays
atgagccgtcgagccaagcatcagcagcagtcgtcggcggcgggtagccgccggaccaggcgtgccgagctggcgagcctcgccgaggccccccagatcgtgtccaaccccatctttcgctacgaggccgggccgagccagcccaacaacagtccaccgggtggacagctgcgctgcgtctacggcccgggctcgctctacgcgctcgtgcacgaccctgccgctgccgctgccgcggagacggggagcggcatcggattcggcgagggcgcgcagcagcccctgccgcttcccccgtgcagggtccacccgtcagggcgtgtggggcccgcgcgcgctgtgggcggcccacacccacatggtagggtactgaggagggcgccccatgacccgttcctggccgcctacgtggcgtgcagcaagagcgccgctgaggcagtcgaccgcccccaccagaagcggagacagaagcaagggaggaggaggaaggagaaggaggaggaggaggcgacgggaaagaaatgcggcgaggtgctgtttcggggatgtggggtctggagcgggtgggcggcgggcgccaagtacgccggggcgatgtcgtgcaggtacggctgcgccgtcgccgggcaggacggagacgcagacgcagacgcggccaagaccaagaccaagtctgaggacgacgcgccagggggcccaacgctcgacctgtcgtggacgccggcggtgctctcggcgagggccctggaacggagggagcagcgctga

SEQ ID NO: 90480 - DNA, 2230 bp, Zea Mays
aacgaacggaggcgcgcggagcaaatcggagattcggagcccgggaccgggcgcgctccaccaccacacgtgacctcgctctcggcctcccgggcctcggcttgggcgcttggcaggctccccgctcctgcgggagaacgcaaggcaatcgatctcccgcccgcctccgatccctcctccattctcgctcgtccacggtctgccctatataacccctcgctccgttggtttcgtcgcctccgttcccccaagggagaagggtacgttggtgatatcccgcgtccccagcgaggatgctgtcattgcgctgccacgccgccgcgccggcgacccgcggcgtcgcatgtgaacacggggcgcgttcatcgtttccacctaggcagagataaataagatctgcggaatcaagaagctctgtccaaggaggaagccagcggcacggcagtgccctcggcggtgatgaagtacgtctccgggccgtacttcgaaccggacttcgacccgctactcgaccgcttcggcaccccaggggtcgtcgtcgacaatgagacacgcgaggactgcacgctcgtcaaggttgacagcgtgaaccgggacggcgtgctgctggagatggtgcagctgctcaccgatctcgacctcgtcatctccaagtcgtacatctcctccgacggcggctggctcatggatgtgttccatgtgacggaccagatcgggcgcaagctgacggacccgtcgctgcccgagttcatccagcgcgcgctcgtgccgacccaccggccgggcaacggcccgtctccgaggttcaccacgtgcctgggcaacgtggtcgggccgggcggccccgacgtttcgggctgcgccgcgctcgagttcacggtgcacgaccgcccggggctcctgtcctccatcacgtccgtgctggccgacaacgggtgccacgtcgcgtccgggcaggcgtggacgcacaacggccgcgcggctggggtgctgtacgtgacggacaccgcgggcggcgccgcgctgctcccgggccggtgcgcgcgcatcgagcggctggtgaacgccgtggtggacgcgcgcgagaacgtgaccggggagcgccactgggtgcgcgtgtcggagcccgcgcagggccgcgtgcacacggagcgccgcctgcaccaactcatgcacgacgacagggactacgagtccggcccggccccgacccccgtcgacgaggacctcttcagcgtgggcgaaaaggcggcgaccgcgcggacggcccgccgcgccgtgacgcgggtgtccatcgacagctgggaggagcggggctacgccgtcgtcaagatgacgagcagggaccgccccaggctgctcttcgacacggtgtgcgcgctcaccgacatgcagtacgtcgtcttccacgctaccgtcggatcccaggggcctcttgccattcaggagtattacatccggcacaaggacgggcgcacggtcgacaacagcgccgagaggcagaaggtctcccggtgcctcgtggccgcggtggagcggagggccactcatgtcaggctcgaccattcctcgccgccatacttatcgggcgccgaccgccgcctcgttaaactaacacgcggccggcgttgaacgttgcagggcgtcagggtggaggtgcgcgccgccgaccggtcgggcttgctatcggatttcaccagggtgctgcgggagcacggcctgtcgctgctgagagttgagctcaagaggcacaaggacgaggccttcggcatattttacctcgtcacggacaccggaggcgaggtgcgcgctgagtcgttgcgcgccgtgcaggcgagggtcgccgagatggatatctcgctcgacgttgtgaaggaggcccctggctggccgccggtgaggaagactagcgtaccagccccgcccgccgccgggtctcagcctcaggagaggcccagaccttccctggggagcctcctatggtcacaccttgggaagctctcgaataacttcaacaacatcaggtcttgatacctgttcgcagaatgcacctgttgttctgcatagacgcttccattggtgcgtcggttccaataacttcctggacctcgagtaccaagaatttatgtcaggaagcagtacaaaactgtacataaagtgtatcagataaaagtaagcagagtgacgttcaatttatcaagaacttaggtgtgtttggttcgagaaataa

SEQ ID NO: 90481 - DNA, 690 bp, Zea Mays
caacccgtacgtacgtttgatccctcgaggccagcagaccgtaccatggcggcggcggtgacggcgagcagggggacgcgcgcgctggccatcttagggcggtgcgtgcgcgcgccgttccgcgccctggtccgcgcgcgggacctgtacgtgagccggatggcggcctgcgcggggggcggcggcggccggggaggcctggcccccgtggggctggtggcgatgccgcggtgccagagccacgggttctaccgctcggcggcgggcggtggcaccgacgaggacgtgcgggagctcatcagggcggcctcccgtgccggcccgcccagggcccccgccggcgtcgggccgcggagccagagcgtggccatcggccggatcgacgaggaccggccgtgcgagttcgggctgggcgaggaggagaaggcgcaggcgctgatggggcccaggagcaagagctgcgccgtggggccgtcgtccaggacggcggctcgtagggctggcgtcgccgtcgcggcttagcttaataaatccaacgccggccggccgacgttgcattgcaccagaaaatccgcgtgcgctgtactagtaccacaacataaaatctgctgttttgtgataaaaaagaaacgcgaaaaatacgtgcgtccgtctgtgggttgcttaattcagtacagatttcggctctgc

SEQ ID NO: 90482 - DNA, 254 bp, Zea Mays
ggaccaaatggtgcggagcttgtatccgcccctggttcactcctctgaatctgaatcacttaaactaagggacaaccaactcatgaatagtagcaaactactaagtgcggaataaataactaccaccctgctaatgatggctgcaccacaaacctacagtttgcgacgcttcaccattactgtcttcattgcgatatatgatggtgtcatcaaatcatccaacattagtccgtccaaaatatttccagatcacc

SEQ ID NO: 90483 - DNA, 408 bp, Zea Mays
atggcggatgtagttgaatcttgcgggcgccaagcagtggagcttgagcggttgccaggaaggattctggtcaagctattcgcttcggtgggtctagtcgggttcaagttatcgattagtccgactaatcagattaatcgcgtttcagaaatcgatcatggtcatgaaaagatccccccacaaaaaatcaaagaaatggggatgaatcaaagaaatggggatgaatcgaagacagcattcattgctggagttgattcaacctcttttgccactgaacagctttctcctagtcaaaacacaaatccacaacagttgctctataaccacatgctcatcaaggaaaaagggacagttataccttctcacaaggaacttcagagtccagaagatcaattaacgactctatag

SEQ ID NO: 90484 - DNA, 1649 bp, Zea Mays
cccctgggccctgagtccctgacccccactccaaccccaccaacaccagcaccgccgtccgctacccttctcgcagactcgcaccatctaacaaccgccgccccgccaaacccgaaccagatctggtacgtgccgcccctcgatttggcgcgctcgatccggcctcgtggtgctggtgatatgccagtccctaactcaaatctgggaggttccactgaagcgagattgtagtcgcgaatcgcgggcgccgagatgcaggcgcgtgtggcgtccatggaggacgtgaaggaggcgcggcaggcggccatggcggcggggcaggggagggtgcttccctcggggatgctcaaggtgttcctggggttcctgctgctggccgtggggctgtccgccgtcggcatgtacatggcgcggcacgcggtggcggcggccgcgcccgcgctattccgcccgtgcctgagcggctcctccgcggaggaggaacccgaggggctggagcggtggacgcggcccccagcgcgcgtagagcacgcgatgacggatcaggagctgctctggcgcgcgtcgttcgcgccgcgggtgcgcggatacccgttccgccgcgtgcccaaggtggccttcatgtttctcacgcgaggcccgttgccgctcgcgccgctctgggagcgattctttcgtgggcacgaggggcgctactccatctacgtgcacgcgttgccatcctaccatgccaacttcacctctgaatccgtcttctatcggcgccaaattcccagtaaggttgcagaatggggtcagatgaccatgtgtgatgctgagagacgcctacttgccaacgctttgctggacatatccaacgagtggtttgtgcttgtgtctgagtcgtgcattcctatatttgatttcaacacaacatacaggtacttccggaactcaaaccaaagctttctcatggcgtttgatgaccctggaccttatggacggggaagatacaactggaatatgacccctgaggtcgaactcgaccaatggcgcaaaggctcacagtggttcgaagtacacagagagcttgccattgaaattgtgaaggacacggtctattatccaaaattcaaggagttctgcaggccccattgctatgttgatgagcactatttccccacaatgctgacgattgaagctccaaaccgcctggctaacagaagtgtcacttgggtggattggtcaagaggtggtgcacatccagccacgttcggcaggggcgatatcacgttggagttcctgaggagagtccgcgagggacggacatgtctacacaataaccagaactcaacgatgtgcttcttgtttgcgcgtaagttcgctccaagtacattggagccgttgttagagctagcgcctactgtgctcggttttggttgatggctgtgtcagtctgaagaggtgccgtctgtaattttgatattagatcattgtaggattacacgctcgcttggagacatgggctcagattgatggatggaaacgtatagtgtcccccctccgcttgttcattatacataaatctgttttgtttttgtacagtaatggcgtgtttagaggcatatgtacttacctcagttcacatggattggagtgatttggtgttg

SEQ ID NO: 90485 - DNA, 1491 bp, Zea Mays
gatctacaacttgtctctgaagtttatagatcgaaatgctctttttctgtcatcacaatacattttgtctctgaagtcaaacttagttagttggctaaaaattgctagtgaaattagctatctaacacatatctagctaactattagctaatttgctaaaatagataatagctgaactattagttagcctgtttgggtgtttctgctaattttagcagctagcattcaaacatggccttaaccagagtaaaaatgggctactcattgtagagtattgactactatcactgggaaggttgtgtggttttgtttttttggtaagactggccattgctgtgatattcagccatgttctagagttttttccatactaagtggtgcatataccttgatcaactgcttaaaaaactctgcctatagtctataggcgtctcttgtgggcctcacaattacttatgggttcctgttcttttaccgtgaagatagatagtaaaccttatgaaccaacttatacagcaacattgtgtgttgcatcatttgatccgttgtaataagttctgcttcctggttttgagataccctgaaagtatttgtttgatttgtgttctgattacaggttgcagaatggggtcagatgaccatgtgtgatgctgagagacgcctacttgccaacgctttgctggacatatccaacgagtggtttgtgcttgtgtctgagtcgtgcattcctatatttgatttcaacacaacatacaggtacttccggaactcaaaccaaagctttctcatggcgtttgatgaccctggaccttatggacggggaagatacaactggaatatgacccctgaggtcgaactcgaccaatggcgcaaaggctcacagtggttcgaagtacacagagagcttgccattgaaattgtgaaggacacggtctattatccaaaattcaaggagttctgcaggccccattgctatgttgatgagcactatttccccacaatgctgacgattgaagctccaaaccgcctggctaacagaagtgtcacttgggtggattggtcaagaggtggtgcacatccagccacgttcggcaggggcgatatcacgttggagttcctgaggagagtccgcgagggacggacatgtctacacaataaccagaactcaacgatgtgcttcttgtttgcgcgtaagttcgctccaagtacattggagccgttgttagagctagcgcctactgtgctcggttttggttgatggctgtgtcagtctgaagaggtgccgtctgtaattttgatattagatcattgtaggattacacgctcgcttggagacatgggctcagattgatggatggaaacgtatagtgtcccccctccgcttgttcattatacataaatctgttttgtttttgtacagtaatggcgtgtttagaggcatatgtacttacctcagttcacatggattggagtgatttggtgttgaattta

SEQ ID NO: 90486 - DNA, 123 bp, Zea Mays
gaaggtttggcccggtatatttctcgaaaatatttagagagaagactccattcaaaaaatgcatccttgatccaccctcgggccggtcttattcaatccggattcataaaaggacaatattaa

SEQ ID NO: 90487 - DNA, 874 bp, Zea Mays
gcaaaggcaacccgcgtcccagctctcgaggcgccacccacacaaatcccaccaccacccgcatggccacatcggagttcgcgccagcccaatcgtgcgcgccgccgcgaccccggcccgagaagggtcagacctggagcgcgtgccagtgccacacatgatccgcgtcgtccggaggcattgcgatggtcgcgcccaaatacggggaggaacgaattccattccacggcgtcgaaagaaatcctagccgggggccgcgatggcgatggcgatgcgggtggaatccgtggaggaggcgaagcaggccgccatcctgcccgcagcgcaggagcagcgcagggtgttccctgcggggatgctcaagctgttcctggggctcatgctgttcggcgtggtgatggggctgtcagcgttcggcgtgttcctggcgcggcacgcggaggagatggcggcggtcgcgcccgcgctgttccggccgtgcctcggggcggctgcagcggcggagccggagccggaggaggggctggagcggtggacccgccccccggctcgcgcgcagcacgcgatgacggacgaggagctgctctggctcgcgtcgtacgcgccgcgaatgcgcggccggagcgggtacccattccagcgcgtgcccaaggtggcgttcatgttcctcacgcacggcccgctgccgctggcgccgctctgggagcgcttcttccgggggaacgaggaccgctactccatctacgtccacacgatgcctctataccgcgccaacttcacctccaactccgtcttctaccgtcgccaaatccccagtaaggtctgctcatcgcctccgatcccctctggcttacgaaaacaagctccaatctag

SEQ ID NO: 90488 - DNA, 2076 bp, Zea Mays
cgcgtcccagctctcgaggcgccacccacacaaatcccaccaccacccgcatggccacatcggagttcgcgccagcccaatcgtgcgcgccgccgcgaccccggcccgagaagggtcagacctggagcgcgtgccagtgccacacatgatccgcgtcgtccggaggcattgcgatggtcgcgcccaaatacggggaggaacgaattccattccacggcgtcgaaagaaatcctagccgggggccgcgatggcgatggcgatgcgggtggaatccgtggaggaggcgaagcaggccgccatcctgcccgcagcgcaggagcagcgcagggtgttccctgcggggatgctcaagctgttcctggggctcatgctgttcggcgtggtgatggggctgtcagcgttcggcgtgttcctggcgcggcacgcggaggagatggcggcggtcgcgcccgcgctgttccggccgtgcctcggggcggctgcagcggcggagccggagccggaggaggggctggagcggtggacccgccccccggctcgcgcgcagcacgcgatgacggacgaggagctgctctggctcgcgtcgtacgcgccgcgaatgcgcggccggagcgggtacccattccagcgcgtgcccaaggtggcgttcatgttcctcacgcacggcccgctgccgctggcgccgctctgggagcgcttcttccgggggaacgaggaccgctactccatctacgtccacacgatgcctctataccgcgccaacttcacctccaactccgtcttctaccgtcgccaaatccccagtaaggctgtgcaatggggccagatgactatgtgtgacgctgagagacgtctgcttgccaacgctctactggacatatccaacgagtggttcgtgctagtgtccgagtcatgcattcccctcttcgatttcaacacgacctacgaatatttccagaattcaagccacagcttcgtcatgtcgatcgatgatcccggaagagacgggagagggcggtacaacctgaacatggcgcccgaggtcgagctcgagcagtggcgcaaaggctggcagtggttcgaagcagacagagacctcgccgtcgcgatcgtcgaggacacggtgtactatccgaagttcaagcagttctgcaggcccggatgctacgccgacgagcactacatccagacgatgctcaagatcgaagccccgcacaagctggccaacaggaccgccacctgggtggactggtcgagagggggtcccaactcggcgcatccagccacgtttggtcggggtgacatcacggaggagttcttgaagggggttcgagggggagagacctgcctatacaacggccggaatacgacggtgtgcttcttgtttgctcggaagttcgctccgagcgcgttgcagccattgttagagttagcacccactgtgctcggttttggttaatggtcgttttgttttgatcggtgcatcctgctgctcctgtagtttctttgttaggtcactgtggatcattgcgtgtgtggagatatttcggtggaagaattgacgcagccatggacattgctgcccacctcctccaggtgatcattttacagggtatatatactgtattacagcatgtattttacttataaggacatgttttagtagtttgtatggtgaacctacaacggatcatatgaccctgtatttcttggttccttcggaagaatatggttcaaatcttcagaaaagaaaactgatgttcccacagctatagcttggaagactccttgggtgccgctctgtggattcccgctaaggcctgcactacacgtcgatgatctcttgcttttttaaggggagtttggttcccacctcctagtcacttttggttccatcagtgtttgttgtaacaattgttgtcacaatggaacttgacgtatatatgagacaagagggacattagattacatggtccgagggacgccaagccatttcattacttttgtttgaacctcttatgaaatgggcaactgatgttgatgaacatgtggatatgtttgtgatcagaatgcagg

SEQ ID NO: 90489 - DNA, 1666 bp, Zea Mays
tatctcttcttgactgctgcagtgctgctctctacttcacccgctcccacgcacgccccgccccaccccacgggacgcagcagaacacgacgaagccggtgccggtccatgcacacggttcccttcatgctttcatagaccgggtccatgtaaccggaccatctccattgatggacaaaagccggcaagcagcggggccacccacgatgcggtgcgcgtgcctcgtgccgtcgtgcgctccctgaggtcccgatccggcattccggcgtcgcgccgatggtatgccaaccttgctctcgaattttggcgaccccacattcccacggcgcttgaagaaatcctagccccgtgctgccgcgctgcagacggcacgcacggcatccatggagaacgacgcgaaggaggcgaggcaggggcagcacagggtgttcccgtgggggatgctcaaggtgttcctgctgctcggcttagggctgtccgcggccggcgtgctcatggcgcgtcacgggcacgaggtggcggcggccacgctgttccggccgtggctgggcgtctcccccaccgccgccgccgcggaggggctggagcactcgatgacggacgaggagctgctctggcgcgcgtcgttcgccccgggggtgcggcggtacccgttccggcgcgtgcccaaggtggccttcatgttcctcacgcgcggcccgctgccgctggcgccgctctgggagcgcttcttccgggggaacgaggggcgctactccatctacgtccacgcgctgccgtcgtaccgggccaactttacctccgaatccgtcttctatcgacgccaaatccccagtaaggttgctgaatggggtcagatgaccatgtgcgatgctgagagacgtctacttgccaacgctttgctggatatatccaacgaatggtttgtgcttgtgtccgagtcatgcattcctatatttgatttcaacacgacgtaccaatactttctcaactcgagccagagctttgtcatggctattgatgaccctggaccatatggacggggacggtatgactggaacatgacccctgaggttgatgtcacacaatggcgcaaaggatcgcagtggtttgaagtaaacagggaagttggcatcgaaattgtgaaggacacggtctattaccccaagttcaaggagttctgcaggcctagttgctactctgatgagcactatatccaaacaatgctctcaattgaaactccgcagagcctagctaacaggagtgtcacctgggtagactggtctagaattgctgcgcatccagcaaggtttggcagggttgacatcacggaggaattcttgagggaagttcgagagggacagacctgtctgtacaatgagaagaattcaacgttgtgcttcttgtttgctcggaagtttgctccaagcgcactggagccattgttagagttagcacccactgtccttggttttggataacgcatgtttttttagagatttgctggttgaatgtgacttgaatttaatcttacaatacataaagggggcttaggcttattaaggggatgtttggtttgaagaaccaatctattctaatgaattggtgtatcataagctcgttccacaaatttggtggaataaatccattcgtcatgttattagcc

SEQ ID NO: 90490 - DNA, 912 bp, Zea Mays
agctagcaatctactagcgtccagcagcaccatccaactggctcatccgcaagcgaacccgatggatccaatcacaaggccggcagctccatcgttccatcggccagcagtcgcgaccgcgaagcatctccatcaggccgccgccaccttggctcggaggaatggagtcagcaggaggtgccttctgacgctgctgatgtccactgcggccatacctggcggcagcgaatcgaggaaggctctactgcaagagtatctgaagaaatcgaaggagaacaaggaaaagaacgacaaggagaggctggatgactacaacaagaggaactacagggactacttcgggctcatcgagggccaggtcagagagaagacggaagaggagcgcacggagtcggagaaacggatcctcgagtggctcgacaagaacaggtagtctaatgagcaggatcgaatggtcgatcatggagggccggccggtcgcacggggtgaaaattctcgcaggattcttcgtgttcccgctctagctatggcacgctttgtgtaaacaagtactccgtatatgattgactgagcgtactacgtcgtgtttgttttcctgttacagcgagagcgagcgaggaaacatgttatctcgttcgcaacataaacaaagattagaaaatttcaaatacacgatgcctgactttctgttcacagacagaaaacaaaacacaacctgaagattcactacaagttaatctccgcacggagagtcaatgtgcaatgcatgtacggtgaattgcaaaatctgatgtagactatcatataaaatataatttgttattacaattaacaggatgtctgggtggtgtagttggttatcacgttagtctcacacactaaaggtccccagttcgaacctgggctcagac

SEQ ID NO: 90491 - DNA, 1888 bp, Zea Mays
tctagccttcacgactaaatccaccaccactcccgcacacctcacctgcccgcgtcgcctcctcccctgtcctccgcgcgcgttgggcgggcagccagctcccccaccaaaccctaatcactccggcgccgcgccgcgccgcgcggccctgcctcgatccgctccagcggccgcccgccgaggcggctgtgcggtggttgcgcttgcgcttacgcgcgcaggtccccgtgggtctctgcgcgcagcgggacccgtccacggcggcgaggcgcgggcttcaaggcgggcgcaggcggaggggcggaattgctcgggcgatgacacggaggctcgcggccgcggcgtcgcgtccgaggccgtgaatgggagtggcggggcgctgcgggcggcggctgcgtacatggaggccggggcaccgccccgcggctggcgctgtggggtgctctggctcgtcagcgtcgagattgtgttggttctagtctgcactcgcggagctggtgcggattctggtgaaagcaaaggatcgtttctgcaagactctgaagctggagaaaaggatgtctaccttagccactcctgcatccacgacgagatactacatcaacggcgacgagctgggaggaaggagtactctgtcatgccacaagtgtaccatgagtctcgggaggatgcggagcgtgtaagaggacgacacttgttgggcatgtcatcttggcgtgctccgcacgagaatgccaggaagccaatacgaatatacctcaattatgatgccgtcgggcattcgcccgaccgtgattgtaaaaatgttggcgacatcgtgaagcttggcgaacctcctgtatcatcagcaccaggaacacctatatgcgatcctcatggtgatccaccactggtgggagactgctggtacaattgcacccttgaggacatagctgggaaagacaagaggcaacgtctccgtaaggcactggggcaaacagtagagtggtttagaaaagctctagctgttgaacctgtcaaggggaacctacggctcagtgggtactcagcttgtggtcaggatggaggtgtacaactacctcatgcgtatgttgaagatggtgttgctaatgctgatttagtcctcttagtaacaactagaccaacaacaggtaacacccttgcatgggctgtggcctgtgaacgtgaccagtggggtcgggccattgcaggacatgttaatgtggcccctcgtcatttgacagctgaagctgaaacattactttcagctactctaatacacgaggttatgcatgttctagggtttgatcctcatgccttcacacattttcgtgatgaaaggaaaaggagacgtggtcaggttactgctcaaagtttggataaaaagcttggaagaatggttactcgtgttgtcctaccacgagttgtcatgcacgcgagacatcattatggagcattttcccaaaacttcactgggttagaattggaagacgggggaggccggggcacctcaggttcacattgggagaagaggctcttaatgaatgagatcatgactgggtcagtggatacgagatctgtggtttcaagaatgactttagcattactggaggacagtggatggtatcaagctaattacagcatggctgaacatttagattggggtcagaatcagggaacagagtttgttatatctccttgcaactcatggaaaggggcataccattgcaatacaactcaattatcaggatgcacatataatagggaggcagaaggttactgccctatagtaaactatagtggggacttgcccaagtgggctcaatattttccccaagccaataaaggtatgcccaaatgtagcataaattattatgtttatgacatt

SEQ ID NO: 90492 - DNA, 444 bp, Zea Mays
gctgttatatgtatgcatcatgcaagtttccaaacacattcatttgttttgatgtttgatatactattaggttcacattgggagaagaggctcttaatgaatgagatcatgactgggtcagtggatacgagatctgtggtttcaagaatgactttagcattactggaggacagtggatggtatcaagctaattacagcatggctgaacatttagattggggtcagaatcagggaacagagtttgttatatctccttgcaactcatggaaaggggcataccattgcaatacaactcaattatcaggatgcacatataatagggaggcagaaggttactgccctatagtaaactatagtggggacttgcccaagtgggctcaatattttccccaagccaataaaggtatgcccaaatgtagcataaattattatgtttatgacatt

SEQ ID NO: 90493 - DNA, 1711 bp, Zea Mays
taatgagcaggtgcatggcctcaacactagtgcgaactgggtttgtacggggatctatgacccaaggaaatggctgttatcagcaccgctgcacgaacaactcactagaggttgctgttgatgggatctggaagtcatgtccacaatctggtgggcctgttcagtttccaggattcaacggggaattaatttgcccgatgtatcatgagttgtgtactactgtaccagttccaatgattggccaatgtccaaagtcatgcagttttaacggtgactgcattgatggaacctgtcactgctttcctggttttcatggccatgactgcagcagaagatcttgcccagacaagtgcagtaaccatggtacatgcaaagctaatgggatctgtgaatgtcaaagtggatggacagggattgactgctctacagcggtttgcgatgaacaatgtagtttacatggaggggtttgtgataatggtaaatgtgaattccgttgttcagattatgcaggctacacatgtcagaagggttctgcaatactgccaagtctgtcaatgtgtcatgatgtacttgttagagattcagatgggcagcattgtgcgccaagtgaactcagtatactacagcagcttgaaactgtagttctcgtgccaaattacaatagattgatgccaagtgggcggaccttccttaacttcttcaacaatgccaactgtgcagcagctgcaaagcggctagcctgctggatctcaattcaacggtgtgacgaggatggggacaacaggctcagggtatgctactctgcatgcgaattgtacaatacagcttgtggagcgggtctggattgttcagaccagaccctttttagcaaaagggaagaagaagagaagggtgttccgtgcacaggatatggcgagaagaagtctttctggctataacatctctgaagcttcttccgttatggctctggtagaagctcagcgtttgtgtaaagtattttccaccccaaattattttctcttttttccccatttcatccactacttcccaattgtaggatacgggaagtaagcgtccgtttcacctaggcacccgaagatgggctgccctggtgtacaagctatgttggagtgggctctttgttagaaggttagtctgacatgaaaaggggagtggaccggtgagagttggatggtagatttttcgttttcaccgcttcagaattagtgattggaatgaatgtaaagattgatgtgtcttgtacacactctttacagaatcatttcaatgggagcccgtgttgtgttctttgctccacgcggccatgccccttgccccatttcttaagctgtcgttggcttttatgatatttgattgacgcatccttggccaacacagtggcagtggcttcgcttatgttcaactggaattcgttataacatagatgatgacgcttgtgggtgattacttcgcttagcggctgccgtggaactagatcctgtattgctgatccctgatggcttgatacgagtgttggagccgtcacatgacatttagcacaagtatgtcacaatataaacagcagtaacgaagtgtcaaggacagtagttatatgagcagctttcgttgttggaaaaagtatatattactgtgatggaatagtcattttggccgctcaactattgcctaaggcgcaaattagtccctgact

SEQ ID NO: 90494 - DNA, 728 bp, Zea Mays
aacttttcgcagcacttgtggttgccgattcggccgccacaaacttgagacccgccacacttctctagggcgccagcgccggccctagcacctccactgcaactcccttgatacttggaccaccggatctgatgctggctgtcgactgccattagaaggacttgttgcaagctgagggcaccaggagacccttgtttgctactgctcaaggtacgtgagcacaaacagttagattgcatttttctagattggttcaaacaattcctaaatccattaatctgtcgagtgtgtaaagaaaatggagcccgaaccatttggctaattgagttttcgtgtttgatgaacaacacaatccgtgaactaataagttatctagtgtttatgtttgtagttcacaggatgcgttgaggattggaccaaggaaatgaggatgcaacacctcaaaagaagtcataaaaagatgcatagaagtccaagactcaagaacaaaagaagcccaaagaaatcagcgaagaaacctgagaagagggctgtcagccagcgactggtgacgcaccggacagtgcatagtacctgtccggtgtgcaccggactgtccggtgggacaaccggacagtctgcgcagagaggccgaagtcaggcgctctcgggctgtagcaccggactgtccggtgtgcggcaacggtcagatccaacggtggactgctacagctgccaacggtcggctg

SEQ ID NO: 90495 - DNA, 1973 bp, Zea Mays
atactctgttacctatgcatagaggaagttagtctattcaaatcatgttttgcaccttaaatttttttcacatgcttttttcctaagtagaagatctctgtcagggggagtatttctttgtctctaaaaagggagaaacgctctttccaaaagagaacactcatttagggggagtaatcttttgagggcaagccttttatttacttcctacatgctttcaatgtcttccttttcggtggttgatgccaaagggggagaagtgtagggaccaaagcaacgaaaactagatcaaacaccaaacaccaccaatttaaaattttaatccccaaatggtttttcaagtggttttggttatttggtccaaaataggaagtaagtgaattatggagttagggggaggcttaagtccataatatcactttgaggggacaattatgcatcctagcaagtagattgcatatttacattcaaatatttgtattatttgcttgctttggttgtgttgttatcaatcaccaaaaagggggagattgtaaggaaaatggaccccgggccatttggctaattgagttttggtgtttgatgaacaacacaattcgtgaactaataagttctctagtgtttatgtttgtagttcacaggatgcgttgaggattggaccaaggaaatgaggatgcaacacctcaaaagaagtcataaaaagatgcatagaattccaagactcaagaacaaaagaagcccaaagaaatcagcgaagaaacctgagaagagggctgtcagccagcgcctggtgacgcaccggacagtgcacagtacctgtgtggtgtgcaccggacagacggcaacggtcggatccaacggtcgactgctacagctgccaacgatcggctgacgtggcgtgcaccggacactccacagtagttgtcgggtggtgcaccggactgtccggtgcacccgacgacagaaagttgctgctttctgtccaacggctagtttggggtgtggaggctataaataccaccccaaccgaccattctctagtgtgggagcccaagcaacataccaagacacatagtgcatatttccaagagctcaaacacccaagtgcttaatagaatcactcggtgattagtgtaggtgctttgcgaagtgcttaggctagttagaccgctctagcgcttgctctaggtgaaccctagattgttgagtgagtttagacaaacctcacaacccctcggctcttgcgtgagccgtagtaattgtaccgagtggggcgagagtcttgcgagaccgtgacaaccgcgtttgtgtcacagccgccaccgtgtatcggagggaacgaggcccgcggcgtttcggccggaagctcgatagtggagacggcggggagcgtccgagaggagccggaagcggagcaccacttgcgcgtggagaaggcccgtggctctctacggagttactcgaccgaggtgcttggccctcgcgtgggcttccctttgcgtaggggcaccaacgaggattagttgggaccttgcgcggttccggatacctcggtaaaaataccggcgtcatccacgagagtttgcttctctactttgctctttaagtttccgcatttatattaagcatttaagtttcaatcttgtatacatacttatttagtgtagattgaaacttagccattgcggtagagatagcaacacttagacaaaacctagtttgcacattctagtttgattatttgcataggttttgctctagggatttaattgtggcctagtttagtaaaagttttagaagtcctaattcacccccctcttaggcgtcacccgtttcctacagagtgtacattttaattaccttgcattttttagatgggttcaaagaagatgtatcttgagtattgcaataactataatcaatacctacgaaggagaagggtgcttgttttcattaccatccgcattgtttca

SEQ ID NO: 90496 - DNA, 651 bp, Zea Mays
tgtattggagcactagatggcacacatataccggcatgggttcctatttatatgcaagataggttcaggggtagaaaacactacctaacacacaatgtattagctgcggtggactttgatcttaggtttacgtatgtgttggctggatgggaagggtcagctcatgattcctttgtgctccaagacgcattatcacgcccttcgggcttaaaaattcttgaaggtcattactttctagatgatgctggttttgcagcaagacttggcatactacccccgtatcgtggtgttcggtaccatcttaaggagtttcagggtactagacgaccaaaaaatccaaaggaattgttcaacctccgtcactcgtctcttagaacaacaattgaatgagcatttggcacacttaaaaatagatttaagatactaacaagtcaaccattcttccctttgaaaactcaagtgaagatagttttggcttgttatgcattacataacttcataatagatgatggtcctgatatttatgtatacgatgatgagacttggtttcaaagccttccaagaagcaatcgtttccatgttgacatgaatagagacaaccaacaatgggctaacatgcgtggtcagttagctcaacagatgtgggacaat

SEQ ID NO: 90497 - DNA, 105 bp, Zea Mays
agaagaaaccactctttattctttagtcatcagaaaatgagtaacatacttcatcagctaggagcttggttaatttatctttcggcatgcactcactttttggac

SEQ ID NO: 90498 - DNA, 570 bp, Zea Mays
cttacacggtagcagctgtcacacaccggtgtaagcgccgccggcggcaggaacaccccgatctcgacgatagatcgagaaagcgatggcgctgaccaacttcatcgtgacggtggccgttgtcggcgcgggtgtgctcctcttcaccaccgacatgcgcaggtccggcgccctcttccgccgcaatgcgcgccagctccagcagtggctccaggaggacacggcctccgccgcgtccaagtccacgaaagaagcagctccgaagaaacttgactcaactgtctccaaggagaggccaaaggaaggcagtcactgattcgagttgtttatatgattggtatgacccctgtttaaagccgttcattttttttgtaagtaacgtgataggaacctgtagctcttaagtagatgcacggccagattatgtttccgtttgaacagaagcactgggcctgtgtggaacagctagattatgttgttgtatttcgcttgtaaaggatctaaagctcttagctaatgtacatgtgccctgctggtagctttgatatttggatggcttgcccagtaagt

SEQ ID NO: 90499 - DNA, 2425 bp, Zea Mays
tgtctcggtttatccctttcctcatcaacatcaacatagccttttagttctaagcaagttgggataggctatagttgaaacccaacaagatgtcaccaaaaggggaaaaagagagaaaggggaagggaaaaacttttgagagcactaaaaggaaaaaatgtctaatcacagttcaggcacatggatagtttctttccaagcaattctatccaaacacaacttcattgggatattccattccttcaagtctcttttgattgtctccccctatgtcaagtttgatcgacctctacctctcttcacattattgtcccgtcttatgatgcctctatgctccggtgcctctgggggtctccggtggacatgcccaaaccatcgcaaccggtgttgaataagcttttcttcaattggcgctactcctagccgattgcgtatgtcatcgtttctcactcggtccaatattgtgtgcccacatccaacgcaacatacgcatctctgcgacacttagttgttggatatgtcgtctcttagtagaccaacactcagccacatataacatagcaggcctaatcgttgtcctgtagaacttgcctttcaacttctgtgacaatctcttgtcgcataggactcccgatgcttgacaccatttcattcactccgctttgattctatggctaacatcttcatcagtatcaccatctctctgtagcatcgatcccaaataacggaaggtgtccttctttggtactacctggcttcccaaacttacatctccatcctcactaattgtagtaccaaagtcacagctcatatactcggttttggtcctgctaattataaatccttttgactctatggtctgacgccataactctagctttctatttactcttttccgactttcatctactagaactacatcgtcagcaaaaagcatacgccaagggatatcttcttgtatatccctcgtgacctcatctatcactaagggattcttcagtactgggtctgcccatcatatttgtggttctgcaatattctaacgagactaagctattggtcctccatttggagagacatttttggtcacttgcatccaaatagcatggctgtccatttaaacaagtaggttgaattgcaccacatatatgatgggtattggttaggcttgggctttgtttggccaattcaggctgggcacagcttgggctggacaaggctttgatccaccctttgttcccgccttcatggacaaatcaacaaacgacattatgtatagggtggcacttacaacaaaaaaaaacacttactgtcatattacaattttcctagcttcgcatcatttccaatatgcacatgaagtatagtagtatatacatagcgttgcactctaaaatctgaatacaccaacatttgtatgcaacagtagttacatactatttgactaatgccactaccattacatattgaattccagctacctgtttaacttatacctagagttgtttgaaccagtctggaaaagaaacgaccagctatggtattgcataaacctgtgaagctgtatctgagcgaatcttaccctactgttgtgtacttgttgtgtgatgtagcttctgcatcttgaaagaattgatatctttgcagtagcatggagcaaatgtcccttgtagttttttcttttaaccttaaacggatagttcatgtctttccgctgttaactagtagcagcatgatcacgacactttatttaattccaaagttataccaaacaacatttcaggtccacgaaagaagcagctccgaagaaacttgactcaactgtctccaaggagaggccaaaggaaggcagtcactgattcgagttgtttatatgattgctcttgcaccacccactggtttctctgcgccctgttgaatcggaagcggtcaattataaagcagaccttgaatgaagcgaagcgtgcctttgaatgcaacctgtcgcgaagtgctgctctacaaccccatagcgagtgaaagcttggagcttgttagtagaaccgaaccgttgagcgatttgcattgctgtttacagaaatatcatggaggaagctgcatgcctgtttggacatttggtggccagagcgtgtacggggggcagtactacccagagtggcaaggtcccgtgtggcactgaacgcctgcccgactggttgttttgagcaggagacgaaatcgtcggcattctggtagagggggcgccacctgcgacaggtgccgggtggatcggctggactggtccgcggattgctggagaggtgagcagcgactgtactgtactgtactgtacccgagggctgggctttcggtggttgcaacttgcgagccggcggtgttgatggctgctgctcctccaatccaatggtgtgcgagagggacatgg

SEQ ID NO: 90500 - DNA, 554 bp, Zea Mays
atggtgcatgatgtggtgtcggtgaagagcgccacggtcgctggcaagaaggggtcggtttccttcacgatcgactgtagcaagccagtggaggacaagatcatggaggtcatctcgcgggagatggtgacggagttgccaaggttgccggccttgacgggcccttctccaagaggttgtagaaactctgatggggatgagatttctctacgggttgatttttgcaggatagagtatgaccgctgggtgaacaccttctcgccgaaggggtggctgttctatgtcggcatcgatcgttgccccccacccgctttttttgaaaagaatgaacatcctaaatccttactctgtgtatttaagaaggcttccttggaagatagagaagcacaatcaggaaagagcggcattgattcaagcaaaaacaagggaacaagatcatctgatgaagaattgtttcaaatatacactcattcagaaaggttagtttatcaaaatgtttgataacatggattcaagtgaagttctgatattttatctccaaaccatgtggcctt

SEQ ID NO: 90501 - DNA, 800 bp, Zea Mays
gaatacaagcgtgtcaatttgcagaaaaatcaatggataagtttgctgcattgatatcatctttcagataccccgacccccgtgccagtggccttcgtgctcctttaaaggatgtgaaaaacacactttctgtgagatctattcttaaagctctagaaaaaggcgcattcagatgcacaacaaagaaaacagttatgcagagagcggcagctttaaatgcattttacaatgggtacatatgcattgcaaattctgacctcgcatgatgtgcatgttcaatcagatcctgctggacgtatggttatcacaggggatccagagcagcctgatgatccttgggggatcactctgttcaagaaggtggtcaacttgccatcaagaatcaatcctcaccaaacatccgctgttgtcacgcttcatgatcagttgtttgtgcgtgcaccatttgggtcatcctgatatgtagatatgacatcatttttagttcagttttgttgactgtggcgcctcttcaccggtgatattccttgatatcactagggtttatgtcagttttgttgaggaaataggatttcatttgagcagatacatgatgtcaagctgacttagcagaacccttctgtggttggatgctggttgctggtgttgcgatctgttgccaccttgtttattgttacagtagtgccataaaattagctggttcatgcgtgtattccagtttcgtagagaaaggagatgttggtcgtagtagggctaatttgacattattgttacttattattctttaaatacctctctcg

SEQ ID NO: 90502 - DNA, 81 bp, Zea Mays
tgttgctttttttttgatacacgaacccgaaggagtcaaacattccaacagccgcagcaaaaaaaaaaaaaaaaaaaaaaa

SEQ ID NO: 90503 - DNA, 162 bp, Zea Mays
tcctccgccttgccattgttctggttgtcgaggatggccaggatcagctgcttgttctcgtccaggacctgctggatgagatcggtggtcacggcggcaggagaggtgtagccccccatcatgttctggttcatctgcatcaggtgttgctgctgcattcca

SEQ ID NO: 90504 - DNA, 557 bp, Zea Mays
gaagacgcatacgccgtcagctcagcactcagctggtaatataatgccaatcagctggtccgccttgctcacagaaaaatcaaatctttctcgcagttcacacacgggtcacggccgggacaaccatggcggcggctgactccactaagctctccctcgccttcgtcctcctcctctccgcgctcgtcgtgctcggcgaggtcggaggaagcatggcagccgactgctcgacgctccggtgcatccagggcggctacatcacctgcgacaactacccggggaagcagctggacgggtgcgactgcgtctgcgcgcccgacaacggccggaactgcgttctccacctccagtccggctccacctacaactgcagccgcagcaacaagggatagctagctagtcgatctcgaccagtcttcgacaataataatgcttcaagctgtacgctgtcgaatagtaacagttgtgctgaaacgaccgggtgatgcgcaaataatttgcaataaaactatttctctgttgtgttttaaagacactttagccttaactactcttct

SEQ ID NO: 90505 - DNA, 1946 bp, Zea Mays
gaagacgcatacgccgtcagctcagcactcagctggtaatataatgccaatcagctggtccgccttgctcacagaaaaatcaaatctttctcgcagttcacacacgggtcacggccgggacaaccatggcggcggctgactccactaagctctccctcgccttcgtcctcctcctctccgcgctcgtcgtgctcggcgaggtcggaggaagcatggcagccgactgctcgacgctccggtgcatccagggcggctacatcacctgcgacaactacccggggaagcagctggacgggtgcgactgcgtctgcgcgcccgacaacggccggaactgcgttctccacctccagtccggctccacctacaactgcagccgcagcaacaagggatagctagctagtcgatctcgaccagtcttcgacaataataatgcttcaagctgtacgctgtcgaatagtaacagttgtgctgaaacgaccgggtgatgcgcaaataatttgcaataaaactatttctctgttgtgttttaaagacactttagccttaactactcttctataaatagattccatggttcctcaatatgctaattgctgaaatgaagactgtagacaattaataagcaaaaatgtaggcgcaaacttcggaaagtcaggcaagcacatctacttcatactagaagcatcaagtccttctacaaacgactaagaaaaagtctggtatagtatttgctattctgaacattacataattgaagcagcgccactgaagtcttactttgcagtttccttcactacatgccagctatttgagtactttggagtaccatcggtgccaggccgttgctgaaaaatcacacgtttataagtcatcaaaactccgagaaaataaaatttaaaaaatagaatgggcatgaaaagtctgaaaaatgaaacctgcaagcgggcacggatgacctgcatgcagattacaaaaaccttcaatcgatatgttcaatgagaaggtagaatatacttatggagtttatgagaatataagtaagagtaagagcaaaggaaattgcctggtaaggataagtaagtagaatagcagctactttaattttgaaccagccccaagtgccgcgaaatcgatggaatttagctaagtatgaagagtgaagagaatggaatattaggcaaggtagtaaataccaacaggatagtatttatatctacaattctgcatatgttatgggtggagtcaaaccatatgatactgcacgaactattttcataaagctgctatatatgtcatctctggcttatatatatgtcatgacaaatgttcaaacgtgtatataaattgagacataggtttttgtcagaaattccctgagtttaggatgacatatatataagccagataaactaacaaaggtagcaccattgcgaaaaaaaaatgcatgcattgtgttgccgcatttatctcgttaccctgtttcaacctgactaggtgaccgggccgggtagcaagttagcaacacaaaacgtcttccagtatactatggcatttttgggaaatgttttgtttattgttgtataaaccacttaaatagaaatttgcatcagcttcaatgcaatttattttataggaaaatcccgtgatattttggtatgttctagtggaattatggatttgtggtttgaccaactgacaacatatctatttattttacaggcaattggtaaatcgttcaacatcacacctttagtatgaataatgtggtatttattacttattatttgcattgaccacaagaagtattattacatcacttttatatctgattcgagttttatatggcatatctgaagcaaagtatcaggaccaggcaagctacctctactttcaaaatctataaatcattggtaatgcagtttcaaacatgcaacctataatgtgga

SEQ ID NO: 90506 - DNA, 279 bp, Zea Mays
taccttattgtctaaagcattcgaacctctctgaaaatgtcttctgtttttataagcaggagggcaattcacacagtcaggattatcacattgccccaaaggcccagacatcatcaaatgttcattctttggaacctgcccactgtaagaccacaccacacattcagacttcatattgaagaaaagacaactcccataatgttaattgatgtagatgaaattcatggacttgagttggggcgaaacattgtgaagaacctgcacttagctgctaaatga

SEQ ID NO: 90507 - DNA, 3003 bp, Zea Mays
tcaaaaccctaacaagctgtgagccgactctctcgagcgccttgcactaacactctgcgccgcctgcggcctgcccccaggccctaactcacgcaccatcgcgaagtcctcgacctcaagctcactaccttctagaatacgaggatcaccagcgccgccgcatcgggccgctggcccatggacaagctccgcgtccaccgctgtaccggcgacgcggtcgagtggtccccctcccctatcgtcgcgctcgccgcctctccttgcgcctctcaggtcgccgccgcgcgtgaagacggctcactcgagctctggctcgtctccccgggctccgtcggctggcacaaccagctcactatacaggggaacgacgagtcgagggtcacatcactggtgtgggggcggagaggaggtgaagcgaccggccggctgctctcgtccagcgttgatgggtcggtttgtgaatgggatctattctacctgcagcaaaagattgttctagatactgttggaattccaatctggcaaatggcaattgagccttcagttgatgctaaaaatactgaaaataatagctcagagtttgctgtcaatggccatccaaaccaaaatgactccagcgattctgacttaagtaacattgatgatggtgataactctgaggatgaagatggttctaccaacacaatatcttcatatcatgtgaatgatttccagcgactggctcttgcgtgtgatgatggttctgtacgattgtataatgtgcctgaatcaggtgcattgacttactataggtctcttccaagagtgagcgggcggactctaagtgtggcgtggagtagtaacgccaaatttgtattttctggcagcagcgatggtttaatcagatgctgggattcaacatctttccatgaaatgtatcgtatcactgttggattgggaggggctagtaactcacctgaactttgtgtctggtcactattgtttctgaggtgtggaactattgttagtggagatagtaccgggagtgtacagttttgggatagccgccatggaacacttctgcaagctcactcttatcataaaggcgatgtgaatgcactaacaactgtgcctagtgggaacagggtattttccgcagggtctgatgggcaggtaattttgtacaaaatatcaaaagatgaattcggtgctagtaaaaatgtgatcaaagagcaagttcagaaatgggtctatgtgggatatctcagagctcacactcatgatataagggcattaaccatggctgtgcctatctgtagagaagatgcattacctgaggaaaaggtggtgaagattcgccggcgtgaaaaacatgaattcagctaccacagatgggctcatcttggggttccgatgcttatatctggtggtgatgacgccaagctgtttgcatattcagcaagagagtttactcagttctcacctcataacttctgccctgcacctcaacaccctttgataaagctggctaggaatagcacagtcaatggagattatgtaatgcttgtccagtcttcgaacttcttggatgttttacttgtgacagttcagaacaagctgacgactccaagtacatcatcatctagaggagatgctacagtccgacaacttgttcgtttgaaaagcaaggggtccagaaaaataatttctagtgctgcctgtgccaatggaacacttttggcctattcagatggtgtgagaccctgcctctttgcactaagacataagggtggaaagaagtacacccttgacaaattagagctgccaaaaggattgccctgttctcagagtatgctgtttactgtggactcgtccaatttgatacttgctgggcgtaatggaaaaatatacatcattgacattgcaacaagagaaatttcaaatgtatttcaccctacaagaagggcagatggagcaaaaatctcaagagaaccacctgtaacgaagatgttcctaagtgcagacgggcaatggctagctgcggttaactgctatggggatatttatgtatttaaccttgaggtgcaaagacaacactggttcatatcccgaatgaatggtggttctgttacatctggtggtttttgccctaagaacaacacacttatcataactacatctaaaaacgaggtgtatgtatttgatgtggaaacaaaacaactaggtgaatggtccaagcgatatacgcaccagttgcccagaagtttccaggaatttcctggagaggtcattggcctatcattttctccgcaaagctcgtcatcggttattgtatacagtaccagggctatgtgctacattgattttggattgccagtagttgaggatgttgacttgccaaatggatcagctggagctgcagagaagtcggacacaaaaaaaattaaaaaagcaaggcagaaacgtaaggcccatgatgaagagtctaaacaagagaaaaggaataacttaagtttttttgcgtttaaagaaccagtgctctttgttgggcacctactggacagttcaattttaatagtagagaagcgatggatggatgtagttgaaggttttggcgcaccggttcacagacatatatatggcacatgattctttctaacatcaaactttggcgcccgtgacaagcagaccattatttttgtttttgcattcggcctcgagtatgttaccggttgaaagggctccaagttttgcagtacaaagtggcagctgcatctaatctttagaattggggactctggcaattgtgtagtgttattttgttctcgagtaatgcagtttttcataccttgtcactgcgcaaaattgtcagatgtaaaaactgtataactatgttattgttagtttatatctgctgttcgtctcaagtagcatgttgtctgtataaaggccccattgacggccgaactgttgtgtcgcactatgtgataaattagttatttatagcgtgtttggtttgagaaa

SEQ ID NO: 90508 - DNA, 273 bp, Zea Mays
cgaccatgctggcattcatcttcttcaactcgaccatattatcattcaccttcttcattttggcagcaaatttgttccagttcgtagtcacatcttccgcttgttcatcccatattttagacagcatcatctctctcaaaccaccaccaactctgccccttcaatcatcttgacataatcatccatccacatgaaaaaattgcatattttaagaacctaaacaatccaaataaggtttcacaattcagtagtaagcacaaaaatgaaatcaac

SEQ ID NO: 90509 - DNA, 1545 bp, Zea Mays
ctcatgttcgccccctcctctgcgccgtcgccgccgtctccttccccatctccgcctccgtctccatccccatcccgcctcgtgccgcagcttctggtcgccctcctccagcgccgccgcttcgacgtcacgctccgggtctccccgaccttccccggcttctccccgcactcaatcgccgccgcgctcgccgccatcccgcgcttccttctcccgggctcaccgcgccgcctctgcccgcaacggccgttcccctccgcctcgcacccttccaaccgtcgcctcgccgctgctctcactctcgccttcctctcctggtcgcacgcccacgcccacccccaccccgtcccgctctccgaagccccgctccgcgccgcggcgctcgcgctgacccgcgcccacgcgctctcgccgctcttccgcctcctccgtgcgcacgcttcggtcgtctccactgctgcgctcaccgacgtaatccgcgtgctcggtgaggaagggctcccgcgccacgcgctcgccgcgttccaccgcatgcgccagctccactgcgcccctgacgcgcagtgctacaacactttgatcgctgcgctgtgccggaacgggcggtttagtgatgcccggttcctgctcgaccagatggagcgacccggtgcgcgctgcaagccggacacctacacgtacacggtgctcatttcctggtactgccgcatcggggtgggcacgggatgccggaaggcggcacggcggaggatctacgaggcggggaggctgttcaggaggatgggagaaaaggggctcgagccggatgtcgtgacttacaactgcttgatcaatggcctgtgtaaaacgtaccgcgtggagcgcgcccacgagatgttcgatgaaatgctgaggaaggggtgcacgcccaaccgggtgacttacaattcgttcatcagatactacagtgtggtgaaccaggtggacaaggctgttgaatggatgagggaaatggttgcgaggggccatgggatggcctcgtcgagcacatacacgcctgtcatccattctttgtgtgagagccggcgtgttaccgaggcgaggcaattcttgattgatatggctgaaagtggacatgtgcctagggaacatacatacaagctggtgaaggctgcaatcgacgatgctggtgaggatgccttgccagcagggctatgtcaatcaattgaggatggcattacagcaaggtttcgacaggtgatgcaaattaaacccataatgcgaccagtcacaagatgatctgaaacaaacgagcttatggataaccataatctgtttgcatgagagatgctggtcttgcaagagaagtgttcttggttgagatacctaggatggtagtggtgcatggctacaagctaatatatgtgtaaactagtgccaactgagtgctcttgtaagaaaggagcaggcaatgagagcagggagaagttttggcatatgcctattcccaagataatttgaggctataataaagtttgtttgcacataaggtaaaatatttctaag

SEQ ID NO: 90510 - DNA, 3526 bp, Zea Mays
atgaatttttcctcgctgctggcggagctcgcggcgtgcgagaagcgtctcattgcttgcatcgaaggtgtgcctgccaagtgttcggtgaactgccagaacgccttcggcggcttcacagcaccggctacggacgacaaaatgtctagcaccaagcctagcctcaccacatccacgaccatctatggcgctcccgtcttcgaccaatactgcgatgcggatctcggtgacaacgccatggagctcgtccagcgcggccccgtcgacatcgagcgcatcgacctccgcagcggtgcgctggctggctgctacggcgagcagtccgcacgcggacacactccttcctccttcaacgacgatttgggtgcctcgctcgactcggtcgccaacagctccgtccatggcggccacggatccgtgctgccccacctcatgcccatctgcgcgggcactagcaggatccatgtgcccgacgaccggagtctggactacgccgaggatttcgacaccaatcacttggacaaggggtgcgtactcttcggtggcgtgcgcgcgtccagggaggaggtagcgcaggcgcgatgcgacaacaccaagctcgtcatcaagcaggccttggctgaggccaacaccgccaaggactcgctggagctcgccggcggtgacaacacgcacttcaacggcgtgcatcgcggccaaccgtttgagacgctgagcaacccgtccgcccaccaccgccttctccacgcgagcgtcgacaacgtgtgcctcaatgatgtcgtccccgacagggagagcgcgctccagaacctccgcctggagtacgagtgcgtcagggtcagcgaggtcacagcgcagggccgcctcaaggaactcaacagcatcctcgccgccacaacgacggcgacggcgtgcagcacacccacgtccaccaagtgttcgatgcgagtcctcaaccacggcgcatactcagttcccaacctccccgtgttcgaggcggcgtgctcgggcaagatctcgtgcgcggacatcgtcgccttcaccgccagcgacgcgtcctacttcctcagcaacgacgacatcaacttcaccatacccgcggggcggtacgacgggaccgtctccatcaccagcgagaccctgccgaacctgcccccgccgttcgccggcttcgaccagcttgtgaagatgttcgctgacaaaggggatcgcctgccgtccagcaacacctctgatatggacccgtcgttcgccgccatgctgcagaccaaatgcaagtcgacgaatgacagcaacaacacggtgatgcaggacttcaagacccccgacatcctggataaccgctactacaagaacgtgttggctcacaaggttcttttcacaccggacgtgacgctcaccaccaacttcatgtcgaacaatctggtgcaactgtgtggctgccttctcagcgtggcagcgaacaaaggcaatttctcagcctttccttgggatcctggtgaagatggagcagttatacttggtgttcttgggtgctcaagttatccaataaagacgaagtggctcaattatcatcaaaagtgctacaggttgctgtctaaagtagcgcctcctccattggggtcctggcatacatgctgtgtggtgaacgctcagagaggaggtgaccaagcttggatgcagcccctggttcatgacttgggtcggcttaatgggcaccaaccgagggagattcaagtatcatccatcatcagtgatccaatctcagctacgttatggaaaacagttgaacaaaccaattcaagccattcctccacaacaggacctgctcaaagtgtaggattcaagcaaccgtggccttcacctatggagtttgagtgcttggactgtgcatggcctccggcaacttggcgaatatgtgagcagggtggcctcccattgcattcccctccccctcctgttgtcccgtacgatggcacgctcggtagccgttgcaacgattggggatcgtctaatatagccgttgtcctgcagcgccttccctccccggccaccgcctcgcccaacggctctattccgtgctccacgctccacggtgaccgttgtgagtttaaagcctccctctcacctcccgtcccccggcccccggtcgctcttccttttccccgccgattcgttccaccaccgcaaacatctatcccagtagccctacacggagagagctgcaaaggcaatccagtgatcggcactatgaacgacctcatgaccaagtccttcatgagctacgtcgacctgaagaaggcggcgatgaaggacctggaggcggcgggcgacgggatcgagctcccggaggcgggcgccggcggcgtcacggacgagcgcctgcgcgggttcttccaggaggcggaggcggtgaaggcggagatggcggccatccgcgacgcgctcgaccgcctgcacgccgccaacgaggagggcaagtcgctgcgccaggtggacgccctccgcgcgcaccgcggccgcgtcaacgccgatatcgtcgccgtgctccgccgcgcccgcgacatccgcgctaggctcgagtctctggaccgcgccaacgccgcgcagcggaggctttctgctgggtgccgcgagggcacgccgctggaccgcacgcgcaccgccgtcacctcgggactccggaagaagctcaaggacctcatgctcgacttccaggcgctgcggcagcggatgatgtccgagtacaaggagaccgtggagcggcgctactacacgctcaccggggaggtccccgaggaggaggtgatcgagcgcatcatctccgacggccgcggcgaggagctcctgggcgccgctgtcgcggagcacggcaagggcgccgtgctcgccgcggtgcacgagatccaggaccgccgtgacgcggcgcgcgaggtggaacgcagcctcctggagctccaccaagtgttcctcgacatggccgtcatggtggagacgcagggggagaagctcgacgacatcgagagccacgtcgccaacgcctcccactacgtgcagggcggcaacaaggagctgggcaaggccaaggagtaccagagaagcagccgcaagtgtctctgcatcggcatcataatcctgctgctcctcgtcctgcttgtcatcgtgccaatcgccaccagcctcaggaggtgatcgagttgtgatgggaggaacaacgccggggttgtgaattgtgaaatgaaatgaggggttccaattcgatccgatgggtgggattgggggttctaatgatcaggacactctgcggttgtgtcttgtcttgttcgattcagtattcgttaatttgagcatgaatgtttccgtggaatcttactgaattgtattgtatgaggtgagattcggtaaaccaaattcgtacttgtaagttcaaatttaaaattcacgtcgcatgagatggatggtgtctgtgccaattgccaaagcgcttgtcatttgccccaataaagagatgatagctttatatgaa

SEQ ID NO: 90511 - DNA, 1477 bp, Zea Mays
cgcttggctttcgaggcacgcggatgccagatttccccggatggggcgtgtgcggctgccggggccgcatcgtgtgcacgccaaattctcccgtcctcgacaccagctagcgaggctacgcagcagctgatgataccttatcccccgctggcactctggcagctagctattacccccctgctgcgccgcgcagccttctggtctacccccgttggctgcttcttctacctaccctcgccgtcgcctcaacttcccggccgccgtcccctccgatcaccagctgctgcttgtgctgctgagccaagagcagctagcgatgaacatcttgaacctgcagcccatcaacccaggcgggcacccggcgttcccggcggccaaggagagcgggcacctcacgccggcgtcggtgcgcttcgacggcgtgccggtgccggcgcagtcccacgcgcactgtccgaggtggcaggctcagacgctgcgccgggacagcagctacgtcggcgtggagcacgaagggaccaggaccaccgcgtccgtcccggtcccggtcccggtcccagccgttgccccggtgcctgccccgttcaagccgctcacgctcgacttcctgcggtcgctcatggacaggagctgcagcatgagccccgccgtcgcggagtacggcgaggacagcgccccgccgccgccgcagatggtggcgctccgcgtggtggtggcctccgccgtggagctggacgcgcgccagaccgagctcatcgcgcgcaagatgcgccgcctcaccgggttcgtcaacctcaaggtcgacaacgtcgtggacgcgtccctcctcgccggcttcgtcgtccgctacggcaccgacgactcgcacgtcatcgacctcagcgtcaagggccagctcgccgcgctccagaaccgcgtcgactccatcgaccaccagaccgcccacgtccacggacacccgcaccactgatcatccgatccaacacctctggactctggtgcacatgcaccggaaccggactacaccggagcgaagcgcgccattgccaaaccgtgctacagcttgcagtatacaagagcctatctccatgactgtgattacgagactatatacagaaccgaattgaacgccatggcaacaacagttttcctgtctaatgttgttgtaaatcgcgactgctacctatccttcctgctgagcctatatatgtttctattgctaaaaaaacgaacgttattgtataatatgatcgatgtggagacatcatcctctatggcgtaaagtgcaatatactatctcaagggccaaggccgaggtttgtatatggaggaggattcaggggttgcagcactgcaatggactctatgaccatgagaaagatggctaaatgagactgtatcactctgcaccgatcagattagagacgcaaacacatcaggattattaattcgatgtttctctaattatcgaagaaca

SEQ ID NO: 90512 - DNA, 1346 bp, Zea Mays
ggcatcacgcttcactgttcgagtgcttgtgttcttcttcttgtgcttgcggttggttgtatccatgtggctagcgctagcacgtctgtgctggtgccagcttgctcaaatgtccggagaggcctagttcgaccgtcgcagcctaataacgatcaccggaatgtgtccgtgcagagcagctagcgatgaacatcttgaacctgcagcccatcaacccaggcgggcacccggcgttcccggcggccaaggagagcgggcacctcacgccggcgtcggtgcgcttcgacggcgtgccggtgccggcgcagtcccacgcgcactgtccgaggtggcaggctcagacgctgcgccgggacagcagctacgtcggcgtggagcacgaagggaccaggaccaccgcgtccgtcccggtcccggtcccggtcccagccgttgccccggtgcctgccccgttcaagccgctcacgctcgacttcctgcggtcgctcatggacaggagctgcagcatgagccccgccgtcgcggagtacggcgaggacagcgccccgccgccgccgcagatggtggcgctccgcgtggtggtggcctccgccgtggagctggacgcgcgccagaccgagctcatcgcgcgcaagatgcgccgcctcaccgggttcgtcaacctcaaggtcgacaacgtcgtggacgcgtccctcctcgccggcttcgtcgtccgctacggcaccgacgactcgcacgtcatcgacctcagcgtcaagggccagctcgccgcgctccagaaccgcgtcgactccatcgaccaccagaccgcccacgtccacggacacccgcaccactgatcatccgatccaacacctctggactctggtgcacatgcaccggaaccggactacaccggagcgaagcgcgccattgccaaaccgtgctacagcttgcagtatacaagagcctatctccatgactgtgattacgagactatatacagaaccgaattgaacgccatggcaacaacagttttcctgtctaatgttgttgtaaatcgcgactgctacctatccttcctgctgagcctatatatgtttctattgctaaaaaaacgaacgttattgtataatatgatcgatgtggagacatcatcctctatggcgtaaagtgcaatatactatctcaagggccaaggccgaggtttgtatatggaggaggattcaggggttgcagcactgcaatggactctatgaccatgagaaagatggctaaatgagactgtatcactctgcaccgatcagattagagacgcaaacacatcaggattattaattcgatgtttctctaattatcgaagaaca

SEQ ID NO: 90513 - DNA, 1156 bp, Zea Mays
atttctacgcgcaccacccgttcgtcgccggtgactcgtctcggctcgtgctacttctacttcggattgccaccggtctcgccaccactcccggcgcctcgaaccatcaacctgtcgcaagaggtcgcgggcggtccgatcggtggtgccgtgcgcgatggcggcgccgcctaccgtgcggggctacgggccagcgtcgccgtcgtcgtcggtggcgctgcctcgggcgcgatcgcgggtgcctgcgtcgctcgtgcccgtgccgacgcggcgggcgccatcggtgcgcctgcgtgcggcggtcgcggacgtgccccgcggcggcctgcagctccagcggcgggaggtggaggtactgtcggggaccgtgttcggcagagaagaggatgaggtgttggagaaggtcggggaggagaaggtggacgggtggatacgggagtcgatcgcggagatcgtgcggcacataggcgaggcgccgttcctggtgcacctgttcagcagcggcgacggcgacggcgagcacgtgacggtgcggcgggagaccgcggcgccggagagctggccggacgtgcggcgccggtgggggatgggcgggcagcggaggccggacggggtcatcctggtcgagcaggtggcggccgtggccgtggacggcggcgcctcggcgtcggaggcggcgcggcaggtgtgggggctggtggtgcaggcgcgcggcatggagcacgcctcgtgttacgtgctcgacacctgccgcgtgcgctcgtcggccgggttctgcacgcacttctgcctcgcgcgggccaagtgcttcggcgaccccgtcgagctccagctccgcaacgcctggctcaaccgcctcgccggccgccgatagccgccacccgtggcctcggctaccactggactgatagtattagatgcgccaaggaccaaacgcaatgacgatgggtcctcttcgctggcaagaacgaggaagagaagcacgcgaaatcagaatccatcaaatcttttcgttcagttctgtttctccctgaattggagttggagatcatgtgtacagattattggctgtaattcttactggcgttcttcgcttattcaatcaagaagcgattcttcgaggcaaattacagttaattcattgcctactccgaaa

SEQ ID NO: 90514 - DNA, 939 bp, Zea Mays
gactcgtctcggctcgtgctacttctacttcggattgccaccggtctcgccaccactcccggcgcctcgaaccatcaacctgtcgcaagaggtcgcgggcggtccgatcggtggtgccgtgcgcgatggcggcgccgcctaccgtgcggggctacgggccagcgtcgccgtcgtcgtcggtggcgctgcctcgggcgcgatcgcgggtgcctgcgtcgctcgtgcccgtgccgacgcggcgggcgccatcggtgcgcctgcgtgcggcggtcgcggacgtgccccgcggcggcctgcagctccagcggcgggaggtggaggtactgtcggggaccgtgttcggcagagaagaggatgaggtgttggagagctggccggacgtgcggcgccggtgggggatgggcgggcagcggaggccggacggggtcatcctggtcgagcaggtggcggccgtggccgtggacggcggcgcctcggcgtcggaggcggcgcggcaggtgtgggggctggtggtgcaggcgcgcggcatggagcacgcctcgtgttacgtgctcgacacctgccgcgtgcgctcgtcggccgggttctgcacgcacttctgcctcgcgcgggccaagtgcttcggcgaccccgtcgagctccagctccgcaacgcctggctcaaccgcctcgccggccgccgatagccgccacccgtggcctcggctaccactggactgatagtattagatgcgccaaggaccaaacgcaatgacgatgggtcctcttcgctggcaagaacgaggaagagaagcacgcgaaatcagaatccatcaaatcttttcgttcagttctgtttctccctgaattggagttggagatcatgtgtacagattattggctgtaattcttactggcgttcttcgcttattcaatcaagaagcgattcttcgaggcaaa

SEQ ID NO: 90515 - DNA, 1185 bp, Zea Mays
ttctagagattcgtatgtatttagtgttttgactggacattccagctaactaactttcgtctcacaggttaacatgtgtatatgcttcttgcaaagtggaagaaaaccatgtttctgctgaggaacttggtaaaggaattcagcaggaccaccagatcattctaaataatgagatgattcttcttaaaactttagattttgatctcattgtttatgctccatatcgatcgattgaaggatttattgatgacctagaggatttctgcagggcaggtaatggtccattccagcgtttgaaggagttgcgccaggctgctatatcccatgttgacaaaatgatgttgactgatgcacctcttctctatacccctgggcagttggcactggcggctcttcacaagtctaatgatcttctcagggtcgtcgattttgaaagatacttggaaattatcttctcaaggcaacattctgattgtccaatcgaacagtttgttcagtcgatcaacgaaatcaattacttagtcgaccagcttaatatacctactgtcaaagacatgagacacgtggaccgcaagctgaaacattgctgggatccaagctcacatgacgagcataacaagaagaaagaaaagaagtcaaagcacaaatcgaaaagaacatctaccgatgcccaactataggaagcatatggtccagcagtggctttgtgtaagagtacaacggtgaggaatttcgctaggctgtctagtgtgcttcattatgtatgctatcatgttaaccagtggagcagcttcgtttaatcatttcattcagggcctccaaatgatcgaaactgaactcaggcatctaagcacagcagctctaagacagctttctacaccagctgaggcatacctgaggtcaagcaattttgtgacgatgtgggctatggaacttcattgctccaatgggagagttgcagcaaagatacaaactaagagatgtaacattggatgcctatctccaaagtacggagaacttcaaattttatatggccgactttgtgtcagccacaattacttgagttccttttgttacggatgtagcattgtttattaagtttaaacgccgaatccaagatgatccacctgctgttgtgaatcgttttttaactgatcagtgattttgaatctggattgtgtatat

SEQ ID NO: 90516 - DNA, 1165 bp, Zea Mays
ttctagagattcgtatgtatttagtgttttgactggacattccagctaactaactttcgtctcacaggttaacatgtgtatatgcttcttgcaaagtggaagaaaaccatgtttctgctgaggaacttggtaaaggaattcagcaggaccaccagatcattctaaataatgagatgattcttcttaaaactttagattttgatctcattgtttatgctccatatcgatcgattgaaggatttattgatgacctagaggatttctgcagggcaggtaatggtccattccagcgtttgaaggagttgcgccaggctgctatatcccatgttgacaaaatgatgttgactgatgcacctcttctctatacccctgggcagttggcactggcggctcttcacaagtctaatgatcttctcagggtcgtcgattttgaaagatacttggaaattatcttctcaaggcaacattctgattgtccaatcgaacagtttgttcagtcgatcaacgaaatcaattacttagtcgaccagcttaatatacctactgtcaaagacatgagacacgtggaccgcaagctgaaacattgctgggatccaagctcacatgacgagcataacaagaagaaagaaaagaagtcaaagcacaaatcgaaaagaacatctaccgatgcccaactataggaagcatatggtccagcagtggctttgtgtaagagtacaacgggcctccaaatgatcgaaactgaactcaggcatctaagcacagcagctctaagacagctttctacaccagctgaggcatacctgaggtcaagcaattttgtgacgatgtgggctatggaacttcattgctccaatgggagagttgcagcaaagatacaaactaagagatgtaacattggatgcctatctccaaagtacggagaacttcaaattttatatggccgactttgtgtcagccacaattacttgagttccttttgttacggatgtagcattgtttattaagtttaaacgccgaatccaagatgatccacctgctgttgtgaatcgttttttaactgatcagtgattttgaatctggattgtgtatatgtgtagagcttatcatggcaccagattgttgaataatttctgttatttctattggttctgttttccagtga

SEQ ID NO: 90517 - DNA, 1052 bp, Zea Mays
caggttaacatgtgtatatgcttcttgcaaagtggaagaaaaccatgtttctgctgaggaacttggtaaaggaattcagcaggaccaccagatcattctaaataatgagatgattcttcttaaaactttagattttgatctcattgtttatgctccatatcgatcgattgaaggatttattgatgacctagaggatttctgcagggcaggtaatggtccattccagcgtttgaaggagttgcgccaggctgctatatcccatgttgacaaaatgatgttgactgatgcacctcttctctatacccctgggcagttggcactggcggctcttcacaagtctaatgatcttctcagggtcgtcgattttgaaagatacttggaaattatcttctcaaggcaacattctgattgtccaatcgaacagtttgttcagtcgatcaacgaaatcaattacttagtcgaccagcttaatatacctactgtcaaagacatgagacacgtggaccgcaagctgaaacattgctgggatccaagctcacatgacgagcataacaagaagaaagaaaagaagtcaaagcacaaatcgaaaagaacatctaccgatgcccaactataggaagcatatggtccagcagtggctttgtgtaagagtacaacggcatctaagcacagcagctctaagacagctttctacaccagctgaggcatacctgaggtcaagcaattttgtgacgatgtgggctatggaacttcattgctccaatgggagagttgcagcaaagatacaaactaagagatgtaacattggatgcctatctccaaagtacggagaacttcaaattttatatggccgactttgtgtcagccacaattacttgagttccttttgttacggatgtagcattgtttattaagtttaaacgccgaatccaagatgatccacctgctgttgtgaatcgttttttaactgatcagtgattttgaatctggattgtgtatatgtgtagagcttatcatggcaccagattgttgaataatttctgttatttcta

SEQ ID NO: 90518 - DNA, 810 bp, Zea Mays
ttcagtcagacaaatttccctgtgttcagtcagggtaaaaacgctagaccttttggtagaagtcgacatatagaatggtaaaaagttaacagcacgaatgcccgaaagctcaaaaatgcgcacttgttcagcggagaaaacatggtgcgtgcaagcgccacagctcaactgttcagttgtcttcatttcctcgtcagcgatagcaaggtagaaacgatccctgacggccttgccagcagaatagtagtgtaaaggccggagagagcgtatgtacaaacttcctccacttgttggcaccatgtttacagatctcaatgtgagatcaggagttcaggactgcagtgctggttattttgccacaaacttcagtttggcgttcgactgcttcagcttcactgtgaggtacctatgccgagcaaatatcaccgccactgccgttcgccggatcagcctgctgctgttcagacatcagcaccgcagcttcttggagagctgcgtgtaactcgttgtgcatatttgacttctccaaggtaaaactagcgccgttcatacatggactagatcgtttccttgtcttctcttcaagtatttctttaactgcctgcacccagtcgaaaacttgaactaagaaaaaagatcattgattccataggaacaaaacattaaaagcacaccagataacaagccaacgatgttgaggtatacccctaacaaaatgaaattctatatgcaagtacaatgctcaactgtcgagcagcaaaggatatgaaactatttattctgacaaaaaatcaagatttttacccctgg

SEQ ID NO: 90519 - DNA, 1509 bp, Zea Mays
gttttttatatccaccctcctatatttagcaaatatatagggcatgaagaaaatagataaagggtgatgtgggggtatagaaatacaaaaaacgacaaacatagttggatctagatcgaacgctctggatggtttcattgtacgtttacaccaaatgagtgatgtttacaccaaatgagtgtgattgcataggagtatagtacatgttctcaccactagctagctaaccttggctaatttgagataatttttagtccaactagtacaaatatgtcctcaaattcccaacagcagaatactactccagcataggtcaatcatttggaaattgcctgcactgcagtccgttagagctatgattttgcctctgataagtgacacatttaaaaaaaatgtccaaggacttaattgatcaacatgaacagaatgattctcccccaatccgagtgtacaaggagctgaacaagtcaaatggtgcaaacctgcaacatcttgggatggaaggtgggcacgccgacctgcgatacagcagcggcgccaaagaagttccccagcagcgcggcgtccgtcgccgacaacccccacagcaatccggctgcaaagcccgcgagaaaactgtctccggcgccagtagggtccacctgtacggcggggaacggcgcaacgtgcgcctccccaccgtcccagtacagccggcagccgtccctcccctccgtgacgatcacacagcactgccgcctcgtcgtttccaccccaacgtatggcgcctcctccgacgacgccttaacgaacgccactcggggcagaagccgcgcgtacggggtatcgccaagcgccacgtgaccgacggcgccgtcaccgtcgaacgcccggatcagcgcctgcgcgtccacgagcaccgtgcggcagagcctgatcatctgctcgagcgtctccggtagcacctccccggcgacgccgacagcgaggccgtaggcgaagcggcggtcgggaaggtcggcggggtagatcgggtcgcaggcgcgcacgcgccggagctcccggtcgggggcgtgcgccgaggcggcggtctccgagaactgggcgtggaaggaggtggttggggacgagcagagcagaggcggatgccgcgcggacgccggcgcgcgggcgtagatgaagtcgtgacccaccttggccacaacgacaaagggggatgtctcgttgagcgcggcgccctggggcgaagcggcgtcgagcacgttggacacgaaggccgcagccccgccgagcgtctcccccactatgcgcccgccccggattagcacatcgtggcagtagctccccaccaccagtccctcaagcccgggccctcccttcgtcgtaattagcagctgctgattctccctttcctcatgagcgtcgtcgggctctgccgcgagtggcatcgctgcggcggcggggggaggcgccacagttcgggggcggagagggaagcgtgggggtctcggggcggcgagagagaagagg

SEQ ID NO: 90520 - DNA, 728 bp, Zea Mays
ggttccaacaatcttggtacttatgcttgcacaacttagtgtctacattgaacatacaacagttcctaaagttacagaggagctagcttcttcttttttcggaggtggtgctcgtagctacgaatatggaccaccttttgtacctggagagatatgtcggctatatcgttcatcaggagagaaattcttgcaccattacataaatatgaagactcagaagatctccaaacttcttaataagcgatttacaacaccggtttggattaagcacaaggaaccgagggaagtgaacatgtttgttgatctactacttcttgagatcaatggtgtggtatctgaagtcaagcagatcttacctggtctagttcggcagcatcggcattctgatagcactggtagcacaacttcctccagaagcaatccaatgcgagaagaaatgttgaaccgatcaaacacacatcaagctagaagtcagtttttagaaaaccacctggcaaagttgtttgagcagaaaatggaaatattcaccaaagttgaatacacacaggaatctgttatttcaactgtcctcaagctctgcctgaaaagcctgcaagaatttgtccgtcttcagactttcaacagaagtgggtttcagcagattcagctggatatggaatttctcaagacctctcttaaggaatttgtggatgatgaagcagccattagctttttactcaaagaggtca

SEQ ID NO: 90521 - DNA, 1588 bp, Zea Mays
acgacccagaaacccgtcgaaaccccagccccaggccgccggttgctttcgcttcgccggagaagagctgagcgcgatggcagcggcgcaggaggaagcggcggcggcgccgccgagcacggagagcgatgctaccgagacggaggaggcaccaccaggcggcgcggagagcgatgctacggcgatggaagcggcggcggagtactcgtggctccagctccgcttcgaccgcccccctcgccggctctaccacttcgcccgccagttccgctccgccacttcctctggcagcaatagtagcggcgagaacttcctcaagggcgtaaagtggtcgcccgacgggtcctccttcctcaccagctccgacgataactccctccgcttgttttacttaccggaggaagcgtacattgcggcggagcccgttgccgaggccgctgtcgaaagtgaagattcttatggagctttcattcaggcgaacgagggtgagccagtgtacgatttctgctggtacccgtgtatgtccttgtctgacccagccacttgtgtatttgcaagcaccagtcgtgatcatccgatacacctttgggatgccaccagtggggaactccggtgcacataccgagcatatgatgccatggatgaaataactgctgcactttcgatttctttcaattcttcaggatctaagctatttgctggatacaacaaagctataagagtgtttgatgttcatcggcctggcagagactttgatcagtattctttactcaaggggggtgaaggaccaactggtataatatcttcaatttccttctctccacaaaatgggatgcttgctgttggttcatacagccagacaactgctgtgtatgcagagaataatatggagcctttgtatgtcttacatggccagcttggtggtgttacacaggtgcttttttcgaaagatgggaactatctgtatactggagggcgcaaggatccgtacatattatgttgggatattcgcaatactgtggacattgtttacaagttgtacagatcagctgatactactaatcaaagaatacattttgatattgagccctgcggtagacatctagccactggtgggcaggatggcatggtccatgtatatgaccttcaaggtggtcaatgggtaaccggctaccaagcagcagctgatactgtaaacgggttctcgttccatccataccttccatttgctgtaacatcatccgggcacagaagatttggcatgcaagatgagtttgaagacgagttaaacttggcaggtgatgagaacagctgctctgtctggatgttttcttcctcacaagaagcttgaagcatttagtgaaaatattggatcaggctgaagctaagcgaagcattggatgcacattcaaatctattgtcactttgatgttcgtgtgcagagagcatcgcggcattgaccacttcctgttgtgttggctgtaattggtgtctgcaaaatgcaaatgtattcactgagatctatagaattaatgacttatttttttgacgaaaaacaaatctagcaatagaacatttaaaaaacaaa

SEQ ID NO: 90522 - DNA, 1628 bp, Zea Mays
acccagaaacccgtcgaaaccccagccccaggccgccggttgctttcgcttcgccggagaagagctgagcgcgatggcagcggcgcaggaggaagcggcggcggcgccgccgagcacggagagcgatgctaccgagacggaggaggcaccaccaggcggcgcggagagcgatgctacggcgatggaagcggcggcggagtactcgtggctccagctccgcttcgaccgcccccctcgccggctctaccacttcgcccgccagttccgctccgccacttcctctggcagcaatagtagcggcgagaacttcctcaagggcgtaaagtggtcgcccgacgggtcctccttcctcaccagctccgacgataactccctccgcttgttttacttaccggaggaagcgtacattgcggcggagcccgttgccgaggccgctgtcgaaagtgaagattcttatggagctttcattcaggcgaacgagggtgagccagtgtacgatttctgctggtacccgtgtatgtccttgtctgacccagccacttgtgtatttgcaagcaccagtcgtgatcatccgatacacctttgggatgccaccagtggggaactccggtgcacataccgagcatatgatgccatggatgaaataactgctgcactttcgatttctttcaattcttcaggatctaagctatttgctggatacaacaaagctataagagtgtttgatgttcatcggcctggcagagactttgatcagtattctttactcaaggggggtgaaggaccaactggtataatatcttcaatttccttctctccacaaaatgggatgcttgctgttggttcatacagccagacaactgctgtgtatgcagagaataatatggagcctttgtatgtcttacatggccagcttggtggtgttacacaggtgcttttttcgaaagatgggaactatctgtatactggagggcgcaaggatccgtacatattatgttgggatattcgcaatactgtggacattgtttacaagttgtacagatcagctgatactactaatcaaagaatacattttgatattgagccctgcggtagacatctagccactggtgggcaggatggcatggtccatgtatatgaccttcaaggtggtcaatgggtaaccggctaccaagcagcagctgatactgtaaacgggttctcgttccatccataccttccatttgctgtaacatcatccgggcacagaagatttggcatgcaagatgagtttgaagacgagttaaacttggcaggtgatgagaacagctgctctgtctggatgttttcttcctcacaagaagcttgaagcatttagtgaaaatattggatcaggctgaagctaagcgaagcattggatgcacattcaaatctattgtcactttgatgttcgtgtgcagagagcatcgcggcattgaccacttcctgttgtgttggctgtaattggtgtctgcaaaatgcaaatgtattcactgagatctatagaattaatgacttatttttttgacgaaggggcagagccccctatttcattaggaaataggataagtgacattacagtccgaaatgatgagatacaacccatcacc

SEQ ID NO: 90523 - DNA, 6498 bp, Zea Mays
gagcggaaaatacagccgggtattaagttgcatgcaccaaccaattcaacccaaaaacttaagctgataggaagaggtggacaattcacttatattatattccaacaccgggaggtcccactgtgagctttatttaacaaaaacaaaagaacaacactgtacaaaaggagacgcacaaggaagcatgcccgaggtgggctgcagggctaatctagagcagctatacaagaaataaagacaacacttatcagtactgaatctacgtgcctgcaatctaacttcttcatagaaatagcttttccaagattcaaaggaagggcagcctctatcaaagataaaatcatttctttgcttctaaatttgccaactcgtgatgatgaatgtctccataaagaaagggtcgtccagctattgttccataaaacaatttacatgtagaaaaaagttgtatctagcctttggtatttctatactaacctttcttctgggtctcaatgactatatgacaatatatttctgtcatgtaaagttgtgaactacacttcacgaggacagatgcagatgctaatattggccaaatttctatttaaatgcagatgttttgaggagaatcaatatacttaaagatgaagctgtaagggttgctgcaaattctacactgagttcggcagaaaagaacaagattaatgctgcaaaatattctgctgttatgactccaatagttgtagccttggaacgtcgtctggtgtctacatctcgtgaaccaaaaacaccccatgaaatgtggttccataaagaatacaatgctaagctgaaatctgcagtcacaacccttaagatgccccctggatctccagcagcattaggagagatttggcaaccttttgattcaattgctgcttctttagccacacatcaaagaaggtcacacataatgttaagtgaaattgctccacagctagctgttttgtcaacctctgacattccaatgcctggttttgagaagatacttggttcctcagaatccttttctggaaaccatggcattgtaaccatatcttccttctgtaaagaggtaacaatactttcaacaaagacaaggcctaagaagctcatcttgcaaggatcggatggtcagaggtacacttaccttctcaagggccgggaagatttacgccttgattcacggataatgcaactgttggaggcaataaatagcctgttgtattcgtcttccgacactcgaagtcgaaatatcacactacggttctattccgttacaccggttagtggacgagctggactgatccagtgggtggaaaatgtaagcagcatatacaatgtgtacaaatcatggcaaaagcgttcacagttggcacatgcacatgcagaggcacaagtatcttcagttagcactggtaacattcacaaccctgttgcacctgttccccgtccaagtgacatgttctatggaaagattataccagcactgaaagaaaaagggataaaaagggtagtctcacgaagagattggccattagacgttaaaagaaaagttctattggagcttatgaatgagactccgaaacagattctgtggcaagaaatgtggtgtgcaagcgaagggttcagaaactttaactccaaagtaaatagattctccaggagcgtagcagccatgagcatagttggccatatactgggtcttggagatagacatttggacaacattcttatggatttcagcaatggggatgtggttcatattgattacaacatatgctttgataaagggaagaggttgaagattccagaaattgttccattccgtctcactcaaacaattgaatcagctttaggattgactggcgtggaaggtgtttttagagttacttgtgaggaagttatgggtgtcctcttgaagaacaaagatattatcttgatgttgttggaagtatttatttgggatccattgattgagtggacacgtggaaatatccaagatgaagcaggaattgccggtgaagagaagaaaggaatggaattagcagttagtttgagcttgttctcttctagaattcaagaaattcgtgttcctttgcaggagcacaaggatcttttcttaactaatttgccagctacagtatcgtctctaaagaaattcttggatattttagatcagtatgaggttgcatcggctatattttatcatgctgagaaagagagatcaagtgttttgcagcatgaaatgtcggctaagttggtcctagctgatgctacatcgggtgctgagaaatctcgcacttcatttgaaattcatgctcacgagttagcagaagcaaaagcggcggcagttgatgaagctaacaagcttgcaatatgggtcgaaaaacatgcactggttcttgaggctatacgggagaactctgttgcgtgcattgagtcatgcatgcaattgaattgtaaggacaagacattgagccttatttcagccgtcctagaatcaggggtcccacttacagttgtaccagaaccaacaagagcgcaatgctcggaattggatagggagatttctcaattattatctgagttacagggtggactttcctctgctttagactcacttggtgaatattctttagtcttgaagcaagttcttccggttaactacatcacaaccagtccggttactagttgggcgcaagtcttgcagcgatctgtaaggagtacatcgcaagatatgctttccctggctaaaatacaggctgcagaagtcattgctaaggttcaaggtgaaggcattaatctggtgcaacaaagatatcaggatctcgtaaatcaaatggaaagttatgtttcatgtgtggagaaacttgcgagggagtgttctgaactgatgaattctattgggttgaataacgaagtgcaatcaaaagagcggatactttctgtattcatgaactctgttcagttgccttcacaaaagaaggatggtgatagtactcatttatcgcattcaggaagtcctcagcagggtgagatcaaaactccagccaagggcgatgtacaggagacaacaggtaaggtcctctctattcttgggattgctgtgagtcagctatatggtgatattagagccaaagtgtctgaactctcaattaaagctattggaaaagctaaatttaggacagatgattctggtcttcaagctgatgctggaatgagcttgcaagtatttgaacaacatatagaaaaatgtgcattaatttctggagttgttgatgaagtgcatgaagttattgggagaaccttagcagaaacaagtgctgcttatgcaaagcccagtcctaggcactgggcctctacttttcaggcagctttgcactcaagcatcaacttgattgaacaaatgactgaagcttttcttccagaatttatcagatcagttgttccacataattcagaggtaaaggaaaccgtcaggtcaatttctgaggtacgtggttctgttgataatgctctagagaagctgattgaggttgaacttgagagaacatctcttgctgaattggaacagaactactctgtgaaagttggcagaattactgagcagcaaatagctcttgaagaagctgctgcaagaggtagagaacatctatcatgggaagaagcagaggagctagcttcacaggaggaaatctgtagggctcaattggaacaattacatgaaacatggagacagaaagatatgcgtattttgtcacttatgaaagtagaagacaatatcatgaattcgctgctttcttctaaacagtatgtttcatctttggtggaccatgatcaggaaagtgagtttcattatggacaaattaaggccctcctttcaatcttcgcaaagccctttgctgacctggaatcgctggaccatatgctatcatcatctggcatgtttcctcacatagacaatcccatttccaatattaaagatgctttgtctttgggctcttcattgtctgacgtggtgtggcctttagctggcatattgaaggatcatgctttttttgtttgggaactcaatcttcttgattcggttcttgttttatgcatgcgtgagatttcatcttctcttgagcatggcattaatgccaatcaactttacatgactcttaaaaagaagcttgcgatctatgtggaaaaacaagttttccggtatgttacagaaaggattgctcctgcgctcaccctaaagttagatgaagaaattagcgctttgctgcagctgagtcaaggaataagagcatcagatcagcctaaaagagattctgctgccgttggaagggttgcattaatgcttgaggagtattgtaatgcttatgaaacagctagagctgccgggactgcagtttcgctaatgaaaaggcaattaaatgagctcactgaggctctgcgcaaaattattttggaaatagttcaggttgaatggctacatgatatttcatcgtctcatgcacagaaggtgaaggttttgtcacaaaatattcttagtgatgataagttcatctctttgatgttaaatctgagcagaagcaatttgttagataagatccaatcttctgtctcattaataacaaggtcaattgaagtcctgcaagcttgtgaaagcatttctgtttcggccgaaggacaacttgagagagcaatgggatgggcctgtgctgggccaaatacttccagtgcaggtggttcaacggcaaagggttcaggaatcccccctgaatttcatggtcatctattaaaaagaaggaaattgcttcgggtggttcaaaaagaggcatctgatcttgttaaagtttgcacctctgttttggagtttgaagcatccagagatggactttacttcgttcctgaggataaagcttccgaacaatcttcggacaaaggcagggcctggcatcaaactttcttgaatctcctggcacgtctagatgcggcatttcattcttttacatgtgcagaacaagaatggaaacttggccagctcagtctggaagctgctggaaaaggcctgttttcagctaataaccaggtttcagtagtctctgtgaaagcaaactctgctttagttaatctccaggatgttcttggtgccatgtatggtcatgcttgtgaagcaagtgcattgctatctggattcaaacatgtatcacaagactgcactgctttgacttctgaatgtggttcgttgctcgaggaggttttagctatagcagatgggttgcatgatgtatacactctggggaaggaagctgctgctgctcacagttcccttatgaccaatctttccaaggcaaatacaattttgtttccacttgaggtttgtctatgtgctgatgtaactgttatgtctgaagcgatttcaaacgaaagagagaagaacaatgctagtatgcctcttattcatggaaaggcattataccaatcttataatattaaagttagggaagcttgcaaaactttggaacctctggtgggtccactttctgacaatgcgaaggaactgcattccatggtaatgaagcttggacacctttcaagtcttcatgctgggaatcttcacaaggctctagaagttccaggagaaagggaatctatgagatcccaggatttgctctcaacacatcctgatcttttgcaaagtgattcatcaactgagaaggatagagcctctcttggcatggattctggctctccagatttggaattgaatactgacatttgtttgcaagatagatgttggatttcacctccagagcactcatatactagcagttctggatgtaccacagggttgacccagattaatccctatgacaacttagagaaaatagatgctcttatggatgatggggctgaaatagatggttctggttctactgacctggaaacaaaagacagtaatcaggaagttgaaaccgatttggtggtgggaagaattgaaagtgtggataacaacagtgcagcagccttcagacaagttagaggacaagaatgtgacaacagcgatcctaaatcctatggagactctactactcgagtgaccagaggtaaaaatccttttgccctgtccatcctgaagcaagtggagcataagttacatggacagaatatagatggcaccaggtccttgaatatttctgagcaagttgactatcttcttaaacaagcaacaagcattgacaacttatgcaatatgtacgagggatggacaccttggatatgattcaaagatgtgactttccttcattgtgcatggacaaatagtccaggtaataacttgatattatgcgcaagcttacaatgctacctgaatcttttctatttacctcgctttatgttttttttataaaaaaaaaaccatagttctccttatatgtgtctgctggtaatcgtaacaacatactgaaatctataggttacatctcaacctgtttttttgat

SEQ ID NO: 90524 - DNA, 6948 bp, Zea Mays
gagcggaaaatacagccgggtattaagttgcatgcaccaaccaattcaacccaaaaacttaagctgataggaagaggtggacaattcacttatattatattccaacaccgggaggtcccactgtgagctttatttaacaaaaacaaaagaacaacactgtacaaaaggagacgcacaaggaagcatgcccgaggtgggctgcagggctaatctagagcagctatacaagaaataaagacaacacttatcagtactgaatctacgtgcctgcaatctaacttcttcatagaaatagcttttccaagattcaaaggaagggcagcctctatcaaagataaaatcatttctttgcttctaaatttgccaactcgtgatgatgaatgtctccataaagaaagggtcgtccagctattgttccataaaacaatttacatgtagaaaaaagttgtatctagcctttggtatttctatactaacctttcttctgggtctcaatgactatatgacaatatatttctgtcatgtaaagttgtgaactacacttcacgaggacagatgcagatgctaatattggccaaatttctatttaaatgcagatgttttgaggagaatcaatatacttaaagatgaagctgtaagggttgctgcaaattctacactgagttcggcagaaaagaacaagattaatgctgcaaaatattctgctgttatgactccaatagttgtagccttggaacgtcgtctggtgtctacatctcgtgaaccaaaaacaccccatgaaatgtggttccataaagaatacaatgctaagctgaaatctgcagtcacaacccttaagatgccccctggatctccagcagcattaggagagatttggcaaccttttgattcaattgctgcttctttagccacacatcaaagaaggtcacacataatgttaagtgaaattgctccacagctagctgttttgtcaacctctgacattccaatgcctggttttgagaagatacttggttcctcagaatccttttctggaaaccatggcattgtaaccatatcttccttctgtaaagaggtaacaatactttcaacaaagacaaggcctaagaagctcatcttgcaaggatcggatggtcagaggtacacttaccttctcaagggccgggaagatttacgccttgattcacggataatgcaactgttggaggcaataaatagcctgttgtattcgtcttccgacactcgaagtcgaaatatcacactacggttctattccgttacaccggttagtggacgagctggactgatccagtgggtggaaaatgtaagcagcatatacaatgtgtacaaatcatggcaaaagcgttcacagttggcacatgcacatgcagaggcacaagtatcttcagttagcactggtaacattcacaaccctgttgcacctgttccccgtccaagtgacatgttctatggaaagattataccagcactgaaagaaaaagggataaaaagggtagtctcacgaagagattggccattagacgttaaaagaaaagttctattggagcttatgaatgagactccgaaacagattctgtggcaagaaatgtggtgtgcaagcgaagggttcagaaactttaactccaaagtaaatagattctccaggagcgtagcagccatgagcatagttggccatatactgggtcttggagatagacatttggacaacattcttatggatttcagcaatggggatgtggttcatattgattacaacatatgctttgataaagggaagaggttgaagattccagaaattgttccattccgtctcactcaaacaattgaatcagctttaggattgactggcgtggaaggtgtttttagagttacttgtgaggaagttatgggtgtcctcttgaagaacaaagatattatcttgatgttgttggaagtatttatttgggatccattgattgagtggacacgtggaaatatccaagatgaagcaggaattgccggtgaagagaagaaaggaatggaattagcagttagtttgagcttgttctcttctagaattcaagaaattcgtgttcctttgcaggagcacaaggatcttttcttaactaatttgccagctacagtatcgtctctaaagaaattcttggatattttagatcagtatgaggttgcatcggctatattttatcatgctgagaaagagagatcaagtgttttgcagcatgaaatgtcggctaagttggtcctagctgatgctacatcgggtgctgagaaatctcgcacttcatttgaaattcatgctcacgagttagcagaagcaaaagcggcggcagttgatgaagctaacaagcttgcaatatgggtcgaaaaacatgcactggttcttgaggctatacgggagaactctgttgcgtgcattgagtcatgcatgcaattgaattgtaaggacaagacattgagccttatttcagccgtcctagaatcaggggtcccacttacagttgtaccagaaccaacaagagcgcaatgctcggaattggatagggagatttctcaattattatctgagttacagggtggactttcctctgctttagactcacttggtgaatattctttagtcttgaagcaagttcttccggttaactacatcacaaccagtccggttactagttgggcgcaagtcttgcagcgatctgtaaggagtacatcgcaagatatgctttccctggctaaaatacaggctgcagaagtcattgctaaggttcaaggtgaaggcattaatctggtgcaacaaagatatcaggatctcgtaaatcaaatggaaagttatgtttcatgtgtggagaaacttgcgagggagtgttctgaactgatgaattctattgggttgaataacgaagtgcaatcaaaagagcggatactttctgtattcatgaactctgttcagttgccttcacaaaagaaggatggtgatagtactcatttatcgcattcaggaagtcctcagcagggtgagatcaaaactccagccaagggcgatgtacaggagacaacaggtaaggtcctctctattcttgggattgctgtgagtcagctatatggtgatattagagccaaagtgtctgaactctcaattaaagctattggaaaagctaaatttaggacagatgattctggtcttcaagctgatgctggaatgagcttgcaagtatttgaacaacatatagaaaaatgtgcattaatttctggagttgttgatgaagtgcatgaagttattgggagaaccttagcagaaacaagtgctgcttatgcaaagcccagtcctaggcactgggcctctacttttcaggcagctttgcactcaagcatcaacttgattgaacaaatgactgaagcttttcttccagaatttatcagatcagttgttccacataattcagaggtaaaggaaaccgtcaggtcaatttctgaggtacgtggttctgttgataatgctctagagaagctgattgaggttgaacttgagagaacatctcttgctgaattggaacagaactactctgtgaaagttggcagaattactgagcagcaaatagctcttgaagaagctgctgcaagaggtagagaacatctatcatgggaagaagcagaggagctagcttcacaggaggaaatctgtagggctcaattggaacaattacatgaaacatggagacagaaagatatgcgtattttgtcacttatgaaagtagaagacaatatcatgaattcgctgctttcttctaaacagtatgtttcatctttggtggaccatgatcaggaaagtgagtttcattatggacaaattaaggccctcctttcaatcttcgcaaagccctttgctgacctggaatcgctggaccatatgctatcatcatctggcatgtttcctcacatagacaatcccatttccaatattaaagatgctttgtctttgggctcttcattgtctgacgtggtgtggcctttagctggcatattgaaggatcatgctttttttgtttgggaactcaatcttcttgattcggttcttgttttatgcatgcgtgagatttcatcttctcttgagcatggcattaatgccaatcaactttacatgactcttaaaaagaagcttgcgatctatgtggaaaaacaagttttccggtatgttacagaaaggattgctcctgcgctcaccctaaagttagatgaagaaattagcgctttgctgcagctgagtcaaggaataagagcatcagatcagcctaaaagagattctgctgccgttggaagggttgcattaatgcttgaggagtattgtaatgcttatgaaacagctagagctgccgggactgcagtttcgctaatgaaaaggcaattaaatgagctcactgaggctctgcgcaaaattattttggaaatagttcaggttgaatggctacatgatatttcatcgtctcatgcacagaaggtgaaggttttgtcacaaaatattcttagtgatgataagttcatctctttgatgttaaatctgagcagaagcaatttgttagataagatccaatcttctgtctcattaataacaaggtcaattgaagtcctgcaagcttgtgaaagcatttctgtttcggccgaaggacaacttgagagagcaatgggatgggcctgtgctgggccaaatacttccagtgcaggtggttcaacggcaaagggttcaggaatcccccctgaatttcatggtcatctattaaaaagaaggaaattgcttcgggtggttcaaaaagaggcatctgatcttgttaaagtttgcacctctgttttggagtttgaagcatccagagatggactttacttcgttcctgaggataaagcttccgaacaatcttcggacaaaggcagggcctggcatcaaactttcttgaatctcctggcacgtctagatgcggcatttcattcttttacatgtgcagaacaagaatggaaacttggccagctcagtctggaagctgctggaaaaggcctgttttcagctaataaccaggtttcagtagtctctgtgaaagcaaactctgctttagttaatctccaggatgttcttggtgccatgtatggtcatgcttgtgaagcaagtgcattgctatctggattcaaacatgtatcacaagactgcactgctttgacttctgaatgtggttcgttgctcgaggaggttttagctatagcagatgggttgcatgatgtatacactctggggaaggaagctgctgctgctcacagttcccttatgaccaatctttccaaggcaaatacaattttgtttccacttgaggtttgtctatgtgctgatgtaactgttatgtctgaagcgatttcaaacgaaagagagaagaacaatgctagtatgcctcttattcatggaaaggcattataccaatcttataatattaaagttagggaagcttgcaaaactttggaacctctggtgggtccactttctgacaatgcgaaggaactgcattccatggtaatgaagcttggacacctttcaagtcttcatgctgggaatcttcacaaggctctagaagttccaggagaaagggaatctatgagatcccaggatttgctctcaacacatcctgatcttttgcaaagtgattcatcaactgagaaggatagagcctctcttggcatggattctggctctccagatttggaattgaatactgacatttgtttgcaagatagatgttggatttcacctccagagcactcatatactagcagttctggatgtaccacagggttgacccagattaatccctatgacaacttagagaaaatagatgctcttatggatgatggggctgaaatagatggttctggttctactgacctggaaacaaaagacagtaatcaggaagttgaaaccgatttggtggtgggaagaattgaaagtgtggataacaacagtgcagcagccttcagacaagttagaggacaagaatgtgacaacagcgatcctaaatcctatggagactctactactcgagtgaccagaggtaaaaatccttttgccctgtccatcctgaagcaagtggagcataagttacatggacagaatatagatggcaccaggtccttgaatatttctgagcaagttgactatcttcttaaacaagcaacaagcattgacaacttatgcaatatgtacgagggatggacaccttggatatgattcaaagatgtgactttccttcattgtgcatggacaaatagtccagctgcacaaaaaaacgaaggaaccgtagcacgaccaacacatgatatggctgctatggatgctagtgaaacaggagggtttgaattcgatccagcccctcaaatgctggcaaagaagaggctccatggtacgcatgaatgttgaatggctatggattggtccaagtgaattagccaaataacaatcgagcatacacgtgcagcccatggcctggtcatatacaatatcttttctgccgaaccccatatattccgaatatcaacaatgtggaacgctaagctagtgtactgtttttgtaatcgggcttgcacatggtatgcgtcaaatgtgcaattgaacgacccagcatttgcaatttgatggggacacggtacacggcccctctggattaagagttgaagaccttgtagcgacggttgacctggccaaagaggcagagaacattgaagaaaagatgagaaggcaagttactttaggctgacccttgattgttggtctattttggacccctcttcttaagataatgatgtgcagaaaaaaaaactatcctcttttctccataggaaccttatcaactgatgtagactttatctggttcaaatataatgtacatgctgtaccta

SEQ ID NO: 90525 - DNA, 871 bp, Zea Mays
ggccacaagcacgggactggcatatattatccatgtaaataaaataaagtatataaataaccccataaaaagctaccattccactacctcccaaactcgcgagcgagtcgaggctccaaccccggcacatcacaggaggaggaggacgacgcgcccaccatggccatggcgacggccctccgcaagctctccgccaacgctctgcgccgccagccgctctcccgcatcacgccgctctactacatggcgtcccttccggcgacggaggagagatccggaatcacctggactaagcagttgaacgcgccgctggaagaggtcgaccccgagattgctgacatcatcgagcacgagaaggcccgccaatggaagggtctggagctcatcccgtcggagaatttcacgtcggtgtcagtgatgcaggcagtgggttccgtcatgaccaacaagtacagcgaggggtaccctggcgcaagatactacgggggaaatgagtttattgatatggcagagtccttgtgtcagaaacgtgctttggaggctttccgtttggacccggcgaaatggggagtgaatgtgcaacctctatccggttcgcccgccaacttccatgtatacactgcactcttgaagccacatgaaaggatcatggctttggatcttcctcacggtggacatctttctcatggttaccagactgacactaagaagatatctgcaacttcaatattttttgagacaatgccttacagattggatgaaagcactggattgattgattacgatcaggtcattttcctccccgttctagtttatagatacacatattaagcatggcgagcaataatttgttgttttttgcattttagcc

SEQ ID NO: 90526 - DNA, 2224 bp, Zea Mays
ggccacaagcacgggactggcatatattatccatgtaaataaaataaagtatataaataaccccataaaaagctaccattccactacctcccaaactcgcgagcgagtcgaggctccaaccccggcacatcacaggaggaggaggacgacgcgcccaccatggccatggcgacggccctccgcaagctctccgccaacgctctgcgccgccagccgctctcccgcatcacgccgctctactacatggcgtcccttccggcgacggaggagagatccggaatcacctggactaagcagttgaacgcgccgctggaagaggtcgaccccgagattgctgacatcatcgagcacgagaaggcccgccaatggaagggtctggagctcatcccgtcggagaatttcacgtcggtgtcagtgatgcaggcagtgggttccgtcatgaccaacaagtacagcgaggggtaccctggcgcaagatactacgggggaaatgagtttattgatatggcagagtccttgtgtcagaaacgtgctttggaggctttccgtttggacccggcgaaatggggagtgaatgtgcaacctctatccggttcgcccgccaacttccatgtatacactgcactcttgaagccacatgaaaggatcatggctttggatcttcctcacggtggacatctttctcatggttaccagactgacactaagaagatatctgcaacttcaatattttttgagacaatgccttacagattggatgaaagcactggattgattgattacgatcagttggagaaaagcgctgttctttttaggccaaagttgatcattgctggtgcaagtgcatatgctcggctatatgattatgaccgtatgcggaaggcaaggtttctttccacgatagtattttttctccaagatgcaagggagctgcacattattatattacagagaactatacagaacattgaaccgcgatctttttttttttatcaatcaaataattccataatgttatgtgtcgacagatatgcaacaagcagaaggcaatacttctagcagacatggcacatattagtgggcttgttgcagctggtgttgttccatctccttttgattatgcagatgtagtgactaccactactcacaaatcactccgtgggccacgtggagccatgatcttttacaggaagggagtcaaagaaataaataaacaaggaaaagaggttatgtatgattttgaggacaaaatcaatgctgctgtctttcctggtctgcaaggtgggcctcataaccataccattactggcttggctgttgcgctcaaacaggcaactactccagaatacagagcttaccaagagcaagttatcagtaattgtgctaaatttgcgcagagcctgatttcaaaaggatatgaactcgtctctggtgggactgacaaccatttagttctggtgaatctcaagaataaggggatagatggttcaagggtggagaaggttttagaaagtgtgcatattgcagcaaacaagaacacagttcctggtgatgtttcagctatggtgccaggaggcatcaggatgggaaccccagcccttacgtcgagaggatttgttgaagaagatttcgctaaagttgctgacttcttcgatgcagcagtgaatctggccttgaagattaaggctgcaacgacaggtggaacaaagctgaaggactttgttgccactttgcaatctgatagcatccaagttgagattgcaaagcttcgccatgatgtagaggaatttgcaaaacaattcccaacaattggatttgagaaagagaccatgaaatacaagaactaatatctggatgacaagaagagaatgaggtcactcttcttgcagtaagcattcgaagcaagatgccacgatgattattgggagtttaaccatggtgtaatggcatcttatgttaaagagatgttggcaatttacagcatgtggaactttcgtcaatcatattgtagacacataccgcgagatgctatattgaccggacaattgcatttccatatgtgtacatcctttgcgttcaaaaaaaaaaaaaacgtacatcctgacacacactccacccccatccccactcacaagcacacgtcaccctgcccgcaaggctatctactcatctctataatcaaactatactatgtgaaagttatagtctacggtgcaaaatagtg

SEQ ID NO: 90527 - DNA, 2075 bp, Zea Mays
ggccacaagcacgggactggcatatattatccatgtaaataaaataaagtatataaataaccccataaaaagctaccattccactacctcccaaactcgcgagcgagtcgaggctccaaccccggcacatcacaggaggaggaggacgacgcgcccaccatggccatggcgacggccctccgcaagctctccgccaacgctctgcgccgccagccgctctcccgcatcacgccgctctactacatggcgtcccttccggcgacggaggagagatccggaatcacctggactaagcagttgaacgcgccgctggaagaggtcgaccccgagattgctgacatcatcgagcacgagaaggcccgccaatggaagggtctggagctcatcccgtcggagaatttcacgtcggtgtcagtgatgcaggcagtgggttccgtcatgaccaacaagtacagcgaggggtaccctggcgcaagatactacgggggaaatgagtttattgatatggcagagtccttgtgtcagaaacgtgctttggaggctttccgtttggacccggcgaaatggggagtgaatgtgcaacctctatccggttcgcccgccaacttccatgtatacactgcactcttgaagccacatgaaaggatcatggctttggatcttcctcacggtggacatctttctcatggttaccagactgacactaagaagatatctgcaacttcaatattttttgagacaatgccttacagattggatgaaagcactggattgattgattacgatcagttggagaaaagcgctgttctttttaggccaaagttgatcattgctggtgcaagtgcatatgctcggctatatgattatgaccgtatgcggaagatatgcaacaagcagaaggcaatacttctagcagacatggcacatattagtgggcttgttgcagctggtgttgttccatctccttttgattatgcagatgtagtgactaccactactcacaaatcactccgtgggccacgtggagccatgatcttttacaggaagggagtcaaagaaataaataaacaaggaaaagaggttatgtatgattttgaggacaaaatcaatgctgctgtctttcctggtctgcaaggtgggcctcataaccataccattactggcttggctgttgcgctcaaacaggcaactactccagaatacagagcttaccaagagcaagttatcagtaattgtgctaaatttgcgcagagcctgatttcaaaaggatatgaactcgtctctggtgggactgacaaccatttagttctggtgaatctcaagaataaggggatagatggttcaagggtggagaaggttttagaaagtgtgcatattgcagcaaacaagaacacagttcctggtgatgtttcagctatggtgccaggaggcatcaggatgggaaccccagcccttacgtcgagaggatttgttgaagaagatttcgctaaagttgctgacttcttcgatgcagcagtgaatctggccttgaagattaaggctgcaacgacaggtggaacaaagctgaaggactttgttgccactttgcaatctgatagcatccaagttgagattgcaaagcttcgccatgatgtagaggaatttgcaaaacaattcccaacaattggatttgagaaagagaccatgaaatacaagaactaatatctggatgacaagagaatgaggtcactcttcttgcagtaagcattcgaagcaagatgccacgatgattattgggagtttaaccatggtgtaatggcatcttatgttaaagagatgttggcaatttacagcatgtggaactttcgtcaatcatattgtagacacataccgcgagatgctatattgaccggacaattgcatttccatatgtgtacatcctttgcgttcaaaaaaaaaaaaaacgtacatcctgacacacactccacccccatccccactcacaagcacacgtcaccctgcccgcaaggctatctactcatctctataatcaaactatactatgtgaaagttatagtctacggtgcaaaatagtg

SEQ ID NO: 90528 - DNA, 2078 bp, Zea Mays
ggccacaagcacgggactggcatatattatccatgtaaataaaataaagtatataaataaccccataaaaagctaccattccactacctcccaaactcgcgagcgagtcgaggctccaaccccggcacatcacaggaggaggaggacgacgcgcccaccatggccatggcgacggccctccgcaagctctccgccaacgctctgcgccgccagccgctctcccgcatcacgccgctctactacatggcgtcccttccggcgacggaggagagatccggaatcacctggactaagcagttgaacgcgccgctggaagaggtcgaccccgagattgctgacatcatcgagcacgagaaggcccgccaatggaagggtctggagctcatcccgtcggagaatttcacgtcggtgtcagtgatgcaggcagtgggttccgtcatgaccaacaagtacagcgaggggtaccctggcgcaagatactacgggggaaatgagtttattgatatggcagagtccttgtgtcagaaacgtgctttggaggctttccgtttggacccggcgaaatggggagtgaatgtgcaacctctatccggttcgcccgccaacttccatgtatacactgcactcttgaagccacatgaaaggatcatggctttggatcttcctcacggtggacatctttctcatggttaccagactgacactaagaagatatctgcaacttcaatattttttgagacaatgccttacagattggatgaaagcactggattgattgattacgatcagttggagaaaagcgctgttctttttaggccaaagttgatcattgctggtgcaagtgcatatgctcggctatatgattatgaccgtatgcggaagatatgcaacaagcagaaggcaatacttctagcagacatggcacatattagtgggcttgttgcagctggtgttgttccatctccttttgattatgcagatgtagtgactaccactactcacaaatcactccgtgggccacgtggagccatgatcttttacaggaagggagtcaaagaaataaataaacaaggaaaagaggttatgtatgattttgaggacaaaatcaatgctgctgtctttcctggtctgcaaggtgggcctcataaccataccattactggcttggctgttgcgctcaaacaggcaactactccagaatacagagcttaccaagagcaagttatcagtaattgtgctaaatttgcgcagagcctgatttcaaaaggatatgaactcgtctctggtgggactgacaaccatttagttctggtgaatctcaagaataaggggatagatggttcaagggtggagaaggttttagaaagtgtgcatattgcagcaaacaagaacacagttcctggtgatgtttcagctatggtgccaggaggcatcaggatgggaaccccagcccttacgtcgagaggatttgttgaagaagatttcgctaaagttgctgacttcttcgatgcagcagtgaatctggccttgaagattaaggctgcaacgacaggtggaacaaagctgaaggactttgttgccactttgcaatctgatagcatccaagttgagattgcaaagcttcgccatgatgtagaggaatttgcaaaacaattcccaacaattggatttgagaaagagaccatgaaatacaagaactaatatctggatgacaagaagagaatgaggtcactcttcttgcagtaagcattcgaagcaagatgccacgatgattattgggagtttaaccatggtgtaatggcatcttatgttaaagagatgttggcaatttacagcatgtggaactttcgtcaatcatattgtagacacataccgcgagatgctatattgaccggacaattgcatttccatatgtgtacatcctttgcgttcaaaaaaaaaaaaaacgtacatcctgacacacactccacccccatccccactcacaagcacacgtcaccctgcccgcaaggctatctactcatctctataatcaaactatactatgtgaaagttatagtctacggtgcaaaatagtg

SEQ ID NO: 90529 - DNA, 1812 bp, Zea Mays
cggagctccaccacggcctccggaaagaaacagatgaaagacagcgacggcgagggcaccggcggtggcgtcgcccgctcgcacccctccaatctcccgcttccgactccacagtccgacccgaacctccagttctcgggtgggacggacgatgagtcctcgagccggaatagcagctcctctgccaccggcggcgcgagccccgggtactactcggactacccgtctagcttcagcggcgagtgttcgccgtacaacatgtccccctggaaccagaccatggcgtccccctggtcgcaccacaacgaggcgtccgccgccgggctcggggggccgcccacaatggcgccggggacgagtctcatcagctcgctggtgagggaggagggccatatctactcgctcgccgccaagggcgacacgctctacaccggctcggacagcaagaacatccgcgtctggcgcaagcagaaggactcaggcgggttcaagtcctcgagcggcctcgtgaaggcgatcgtcatctccagcgagcgcatcttcacgggccaccaggacggcaagatcagagtgtggaaggtgtcgcccaagaacggcatgcacaagcgcgtgggcagcctgccgcggctgcgcgacttcctgcgcggctcgttgaacccgtccaactacgtcgaggtgcgcaagaacagatcggcgctgtggatccggcacagcgacgccgtgtcgtgcctgagcccgacggacccggcgcaggggttcctctactccggctcgtgggaccgcaccttcaaggtgtggcgcatcagcgactccaagtgcctcgagtcggtggtggcgcacgacgacaacgttaactccatcgtggcggcgtttgacgggctggtgttcacgggctcggcggacggcacggtgaaggtgtggcggcgcgagcagcaggggaagggcaccaaacacacggccgtgcagacgctgctgaagcaggaacacgcggtgaacgcgctcgccgtgagcgccgtcgcgccggtgctctactgcggctcctccgatgggctggtcaacttctgggagggcgaccgtcacctcgtccacggcggcgtgctgcgcgggcacaagaaggccgtgttctgcctcgccgcggccggcgctctcctgctcagcggctccgccgacaacaccatcttcgtgtggcggcgcgacggcggggtgcactcgtgcctctcggtcctcacgggccacaccgagcccatcaggtgcatcgccgtcgtcgaggacaacggcgaaaacagcagcgaatccaacgccggtggcgccgccgccggaggggggtcgtcgtcggcgtcacggtggatagtgtacacaggcagcctcgacaagtcgatcaaggtgtggcgcgtcaccgacgaggcgccggacccgctattccacggcgacggcttcggggccagcggctcgacgtcgtcgttccgctaagacgatttgtctgaccgatcacatgcagcaaaaattacatataccggtatacgtcgtcgtctcacctcacaagaaaaggtcttggagggactaaattaattacattaacagaaggatctgctgggccgctatacatatactgcgttatatatactgttggaaattaggtcaaatgagacggtatgaaaaatctaacttgtgctgggcacgagccacatgtagtttggccatctttttgtgacagggatggtgaatttagttaggtatacatttgctttttgtaactttgcattggtataagggaaatttccaacatgcttatctgttgtactagttgaaaat

SEQ ID NO: 90530 - DNA, 2423 bp, Zea Mays
acacctaccggcccgccccaacccaatcatacatccatacggctacgagcgacggagcgagcgagggaagttgatgttgtagatgccatccttcctctcctccttccggatcgtagtcgtggcttgactcagcgtagcggccagggcagcggccatgtcgtcgtcggtccggcacggctcgtcgaggggccaggcatggttctgcaccacgggcctgcccagcgacgtcgtcttcgaggtgcacgacatgaccttccacctccacaagttcccgctcatgtccaagagcctcaagatccaccgcatgctcagcgagcaggaggaccagcgtccgacgcggggacggcggcagcggaggagacaggtgaggagcagtgacggagacgatgacggtgctgcggaaacagagatcgaggaggaagaagccgagcctgagcagcagcaggttaggacggagggggagggcgacgggcagccgtactgcattgcgttccccgacttcccgggcgggccgggcacgttcgaggcggccgccaagttctgctacggcgtccgcgtggacctcaccccctggaacgtcgcgccgctgcggtgcgcggccgagtacctggagatgacggaggaccacgccgaggacaacctcgcggcgcgcgcggaggcgtacctggaccaggccgtgctgcggcaccccggcgacgccaccaaggcgctcaagtcctgcgaggagctgctgccgctcgccgaggacctcggcattgtgtcccgctgcgtggaggccatcgccgcgcgctcgtcgtccgcgtcgcggtcctggttcgacgacctggccgtgctcggcctgcgcatgtacaagcgggtgatggcggccatggccgcgcgcggcgacgtcagggcggaggccagggagagctgcctcgtgtcctacgccaggggcaccatcccggggctgtcgaggtccatgcggcgccgcctcgcgtccgcgcccgtgtcctccgaggtggagcagaaggagctcctcgaggcggtggtcgccagcctccccgcggacaagtgctcggggcgcgtcgtcaccgccaagttcctcttcgcgctgctgcggacggcgcacatcttgcgcgcgtcggacgccgcgcgcgcggcgctcgagcggaaggccgccacgcagctgcagcaggccgcgctggaggacgtgctcatcccgagctactccggcaccgcggagacgctctacgacgtggactgcgtccagcggatcgtcaggtatttcctcgcggaggaggagctcggcggggaggcgtcgtcttcggccgcgatcgaggaggaggaagcggtggccgtggcgcggccgtccgccgtggtcatggtgcaggtgggcaagctggtggacaattacctcgccgaggtcgcgtcagacgccaacctcaagcccgccaagttctgcgacctcgcgctttcgttgcccgaccatgcccgtatctacgacgatggcgtctaccgcgccgtcgacatctacctcaaggcgcacccgcggctgacagcggaggagcgggaccgggtggtgggcgtggtggactgccggaagctgacggtggaggcgtgcacgcacgcggcgcagaacgagcggctcccgctgcgggcggtcctgcaggtgctcttcttcgagcagctgcagctccggcgcgccatcgcgggcacgctcctggcgccctccgccggcgccgctccgcgcgaggctgcggcgtggcgaggcgcgacggcgctggcgcaggacagccaggtgctgcggctggacatggacagcatggcgagccgggtgcaggatctggagcgcgagtgctccagcatgcgcagggccatcaagaagatcgacgggcgcggcggcagcggcagcggcagccggtcccccggcggccgcagcgcggacgggtccaggcccgcggcgggcgggtggagggcgcggcacgggtgcaaattcagcacgcaggtgtgcgactcgcacgcgcgcaacgtggtggcgtccagggcgtccaggatggggatgagcccgtagccaccgctcgtgcagtgcggccgtcctctccgtccggcgctctcggtccagacatgggatttctcacgcgatcgcgattcacagtgacacacgaccagagagatcagcacgggaagagaatggctgagaagttccagatcttttaccgctccaagtctcagcaccagcctctcaggtctcgcacgtttttacatctctcgttcgtggacgtgagaggtgtgatggccatttgttcgtttgttgtgcgtgtcgtgtcgccccaaatgggcgtggatccgtgtgagttgtcttgtctgtgccggagggagggcggtctgtaactcgccagcaagccgtttccattcagcttgtttctactactcgattgcgccgt

SEQ ID NO: 90531 - DNA, 981 bp, Zea Mays
atgggagcctgcaactcgtgcgaggccacggcggtggcggcggcgccggggccggcgacggcggaggcgagggtggtgctcgcggacggcgcgctgcggcggttcccgggcggcacgcgggcgtcgcaggccgtgaaggcggccgccggcggggcggccccgacggcctcgtggttcctgtgcagcgcggacgggctggagctcggcggcgccgtggcgcccgtgcggccggaggaggcgctgcagcccgggcagctatacttcgtgctccccgccgcgatgcggcgccgcccgctgcaggccgaggagatggccgcgctcgccatccgcgccagcgccgcgctggccggcgaccacgacggtccgctcgtgttcccggaggccgccgcggccgcggccgccggcgccggggcgcggtgcggcaaggcgtgccggaggtcgaggaggggcggcagccgcggccgggacttcgcgccggacctcggcgccattgccgagtaaccaaccgtccgtggcagccagctaggagaacgggggaacctaattaacagcagtcgcgtcggcagcccgcggcgacatgaaaatgaaaaaaaaaaacacatccatctgtagctacgcgtaaaaactgatctactggacgctttgactaatgctagtgtagtgtaggtgtagtagccgtgtaggaaaagaaatgcagtccatcttgcatctggtgtgtacgtagaatactagtacgcgacaggctgtgcgtgtagattacgcacgcgagcatgcaccgcgatccggacgcccaggaggccaggacccgggtgtgtgtctgactctgactcccggggcccgcattgtgatgagctgagctgtaagccgctgggcctgggattcgtgtatgccaatcagccgatgtggcgagccaatgaacggcaaacgagtcaacgactcggatttgccagcctgaggagcagattttgctatgcaaaaaaa

SEQ ID NO: 90532 - DNA, 333 bp, Zea Mays
atgattttcagctcacctttttcttttaaaatcagtagttggcacaaccagtctatagcacagctcaaagcacagaaacatacgcctaagaaacataacacccgccggtaccagcgcagcgtgttgccggccggtgacacaatgacgcgcaagacattatggtgtcggctaccacctccttggacatcttcaggaacgggtccatgttgtggtggtacccgccattttgcctcactcctatggatgttgctctccaggacaggtgagttcatctttaactcacagcttgctgctcattgttggaccggtagccatcatgtctcgcatggctag

SEQ ID NO: 90533 - DNA, 895 bp, Zea Mays
aaaaataggttgggttcgtaaactctgaatccctcattttttttctttttcatcatgaacatgagattgtttggtctatggctaattggtggctcactgcagcaaagtatatataactggattctaatggctgtggcaatgcatagttcaaggggagctatgcgacaacagttgaatagagacagggaaaaatatttggccatcgtttgaacattgagaccaactatggttatatctgaaagtatataaggatataatgtagggaaaaaaataacaacatataatatggaatccattctgtactatgacttagagcagataaattctctttcttttatttccattttgtcattacaatttgctagagatgcacggtcatcttatgagctgcatattttacctggatttccatagtcagctacatattttacctggattttcatgagctgcacggtcatcttatgaaacaccagcattgtttcgcagtatttatcatacaacaaattgagcaggatgtttgtcgtcgctgatgcccgcctcgagccaagctacaactgcatgtcaggagctacaaccaagcatataagagaacatccatattccatagtaaacataatcgactgacatcgaagaaagaaaggtactccattgtagtcagtgacatcccgtccaagggcaatggggcctacactggcatcaccggcggtgtttgcaccagcagcgtgggtttcccatcttcagggattttcgtcaagaataccggatccgatgggatgatctgcgttggcgtcattggctgaccttgttgtgcccgaggactataggagatgtttgcaatgccgccaacggcgctcctgtcgagcagctccaagtatacagtggcaggcattctgga

SEQ ID NO: 90534 - DNA, 1620 bp, Zea Mays
gtgagttgggtggaggccatggcgggcggcggaggtgggtggagtgcatcgtcggtagcgaacgcggcaggctggatgatgtagccgcgggcgcaggcggctgggcggggaagcatcggccgggggtggagtgcatcgtgggctgcgacagtttcaatgccgagacgggatcgatggaggagacatcaagcggaggcgccatccacgccggtcatccatggatccgggggcgggggctctgcccgcgcatggctggtgctggcgtgcgcgagatctgggggcgagggagcggtgggaatgtgcggagcggaggaacacatgttgatacccggacaggaacatcccgcatgaagtgttcaagtgccaaagaatgtcaaaggaccaagtatgctgcaggaaccaatgtacaagttgctcctattgccatccctgctgaggcacggcagctccaagttagtgtgtctactactctatttgcttcccagagcctccaactccatttccattctcttctgttcttcactcttctcttctgttgtgcgtgtgtccactcccttgccaaacatgctggtaagcagaagcatcagaagagccaactgggaaagctgcacccatcacagcagcaaggtgcgcagtcacaaagtcatcagaagacccaaatgccaaacttgcccagttcatcacagaagcatcagccacaacagtcccaaggcttgttgggatacgcaccaaatactaatgcagcagcagctgctagtaattcacaaaattattcaagtgccaatcagcgccctgtcctgctacctggccttgtgcaccgaaagaagagtgacaaaactggacaagattgtccatctagtgatgacaagccatctcactcccagaagagtgggtatgaacacaattttgttgttccagtccatctaccgaattttgcaatgatgccagtcgctcaacgtgctgtcagtcagagtgagaagaagttaagtgaccatcagcagccacaagtcagccgaggccagggtgtgaggattgatctggcctcttctcagccttttgtgatgccctttggctccattggtcctcctagatctacgccaagtggtcttgacttttcggcattggcgcagaaccatgcagttttccagagccatcaagaagcagcacggcatggttatccctagcttaattttgctgcagctcaatctgtgcaatccacgcagcagaagccccagcaccaaatgactggagaaacaaaaactgttgcgggggattcatcctcgactcccattgctggagacagtgagagaaagaaatcaacttctcacaaaggctgtccttcaccaggacggaaagcaagaattatgtgcctcctttccttactgccaacacaaatgaaacttcgtcccgcaccctgagccttatcggaacagaatcttcaaatgcattcatgggaagcaaacccacaaattccaacacccctgcctctaccgccgctgcagcttcggccagcatttctcagcagcaccttcagatgcaagcgcaacaaaagcaccagcagcatcaccatctgaattggcccagatctgctgcaccaagtacacagaacagtgcaacagc

SEQ ID NO: 90535 - DNA, 2989 bp, Zea Mays
aaagggttcgacagttcgccaacgcccagctttctacgtgctccggccagcgccgcctcgcccagccacctccgcggctccgctcctctgcctcggcctcgcgccctctcccagcagcttcctcctgctcgcccctcgccgtctccgggcgaccgggcctgcaggcgccggcgcctcgccgcggcgccgcccggagcggcagctcctcggccggctcccctcagcggcactttggcacggcacttccgcagggcccaggtcccagcgacagccgacaggctcacaggcaacaccccttcaggcctcaggagctgtctcaagcctacagccgttccgcctcgctcttgtatctgacggtctgaccctaccctatctctgaggaggtcgaatctggcctgcccttctctctctttctcctacgatcctttctctcagtccaacgaaaccctcggaggcacggttcggttcgacgacatgctgtctggcgtgaagctggttccgcgagaccagatccagtctgatcagaagcgtaggggtgaccagggctccgattccgactcctccgacggcaagaggccgtggaagcacagtaaaagagggcgggacaagaaagagaagaagagacgaagcagccggcggcagcggaggcggagcaagaggtactcgtcggaagattctttggggtcagacaccgacgattcaatcggagaggaagaggaggatgatgtcagtcggagcaagcgtcgcgggaaggacaggaggcggcgacgcaacttctctgacgacgatgattccgaatccggcgaatctgaccggggaagagcctctcgcagggggaagcagagacgtgatgacgaggatgaggaggaagagactgaaggtgatgggcttagggcaagtgaggtggtcaggagggagatggggcttgaatggatgctcaagccagcaagcagcagccaaactgagggcaccggtgttcgtaaggttgataatgtcgagaaggatgaatctgcacatgaagagattatgagaccgaacccaaaggaacttaacccataccttaaagataatggaaccggatacccagaagaatcaaccccatcaaatgctggcagtcagttgcttgcatcctctgttgtgggtgatggaggtgccagctggagacttaaagctttgaagcgtgcaaaggagcaagctgctcgcgaaggaagaaaacttgaggaggttgttgaagagagatggagctcattaggcgacttagctgtttcagtatcagcatcaagagctgcccattcacatgctcatttgcatgccattagaggcagaaaatctggtaatgctgacaactcagaagaacgtgttaaaagaaatccagagggtcagctggatggtagcagtggcagacgtgaatatctacgggatgtttcttctcagcaccatgccatgagaaaaccaaaacctgattctgtcccatggaaaaagagaagacagaatatatcttctgaagatcaggcacttatctcatcagcggtagcaagcttaaataagttttctgatgatggaagctttatggaaaagattagcaatgttgagagcaagaacacaaatgtttccactgctagtgctagtgctgatgagcagagggacaatgggcagaaaacccctaaggagagttcaaacaaagtacaattagtgagcactcagaaactaaatgcaaaccagatggctgcaaagattctgcagctccgaatgaaaggcaagcatcaagaagctgaacaactttcgagagaaatggaagctttgctggagaatcaggatactgcccatgagaagcctggtcatggaaaagaaagaagctcaatcaggcctacattgaagcctactgcagctgatcacaggagaagagaagatgatgcggaccttcatttggctaataaaattatgcacaacaagcagtataacatgtccaaaagtatagaagatgaatatgattttggtgatgctcccactaaaaaggacaaaagaaagaataaagaagcacgtgacgagaggaaaagcactgatagacgtatgttgactcagaaggagcgttgtatgtattgctttgagaacccatccaggccaaaacatctggttgttgctattggaaacttcagctacttgatgctgccacagtttgagcctgttgttcctgggcactgtattattctcccattacagcatgaatctggaacgagaacagttgatcagaatgtttggggggagatccgcaacttcaagaagtgtctgctgaagatgtttgcacagcaggacaaggatgtgttgtttatggagactgtcataagcctggccagacaacggagacactgcatgattgagtgcatccctgtcccttgtgaagtgtcaagcaatgccccaatgtacttcaaaaaggctattgatgaagctgaagaagaatggacccaacatgagatgaagaaggttatcccgacaagtgcaagccgcaacttgaggcaagtcatcccggagaactttgcctacttccatgtggagttcgggctggaccgtggctttgttcatgtaatagatgacgagagcaagttcagtgctggatttggattgaatgtcattagagggatgctccagttgccagaggaggacatgcaccgtcgacgaaggcacgagtccatggataaccagaggcaggctgttgctagcttcatgaaagattgggagcccttcgattggacgaagcaacttgattgaatgtgaatacagttttgagaacgctcgaagaaaaattgcacgacttgtactaaaagattttgtaggaaacttgtattgatgttatgctatcactttgttttgtttcccaacatatatgtttatttccccagaaactaacaggcgcatgttctagctgtaaaatgatatcgactgagcaatgactgtcatttaaacttgcataacgatggacctatgtgtgatt

SEQ ID NO: 90536 - DNA, 1261 bp, Zea Mays
ccacaggcctcccgtgcgccccgcagccgtctccaacggccgatccatgcccgtctggcgtcttcctcagtcgcatcccctcgttgaggtcgacagcgacggccatggcggcggcctcttctgcggcgccggcgaggcacagctgcgcaaagctctcggtcccagtggaggaccccaaagcagtgacggcgggcggtggcaccgtcttcgtcaaagccacgtggctgccgtcccgcttctccctcgccgtgaccgatggtgccggcgcctgggtcgccgacgcctctgaccacgaggtgcgcctccgcgccgagcagtgggatcagcccgtcgccgattacatcgcccttgccgagcgctacctcgctttccaacagcctggttccacgtattccttccatgacgccggcaaaggccaacgcaggctcgcttggacatttgaaagacaaggtaccaagttggaatggcggtggaagctgcagccttcaccaaacacgcagcagactatatctgagatcctggattttcttatggatgcaaatatacgcttaagtgaagaggttgtgaggaaaacacaatcctttgacaagttgaaacaagaagctgagaagtgcttgcaacaaagtgaaagatttaacaatgagaaagctgagttcgaacaagccgccttttcaaagtttgtggccgtgttgaattcgaagaaggccaagctcagacaactcagagataaagttgtggagctcgaacccgctgtcaagcctccaaaggaggaggcaggtcaggagcaggaggaggaggaggagaactcaacggaccggacagagctcttcgagggagagaatgacaaagaagcaagcgccaaggatgaacactccggcgagacaggcagcggcaacgttcctagttctcctggggaatcggcagctacctccagaggaagaggacgagggagaggtcgtaagaaggcaagaagataggctgcctagactgacaatagcaggtcctactcggaaattcgctaatcgtcgtggtgcgtctttagccggctagtctcatttccaagagcacgtgtctttcatgtacctttgtgttcgcgtgctgttggcaggcagagtattgcctgtgaaactgattgtccgtctgcttcgtctcatcagtggaaaatattttccatttcatcacatgtgtcagtcatgtgacatgcttttcacctgcgcgtggaaaaaaaacgaatgaaaaaaggggggaggaatgtttgacc

SEQ ID NO: 90537 - DNA, 686 bp, Zea Mays
cctgctccccccctccccccaccccccagccttcgcggcaccggcagacggggaggaagcaccgccgcccgcctccgcgggagagcaagcgggagaagacgaaccggatctggaagcgaacctaagctgcgcggtttgtcattgaaaacagtgcgaagagtgagatgggtgaagctctgctaagagattcttcaggtttcttcttggggatggaatcattgccgtgtccatcttggtcagttgagttggagatgggtgcaaccctgaacaaggaattgagaactcgagattgttcgtggggctggaatgttgggcccatctgttccagttcttgtgggggtgcgagcggcaaatacagcgccggctcttggtttccaagtggccccctacgtggaaccttctgagacggctatcctacgtgtacgctagcctccaaacttcaaagcgcgtctctgcagggctcgcacgtgctctttttccctcctcaccccgaattaacaatcgcgaaatcccaggtttgacctttcccccagccttgttgttccagtggggcccactacacccatgtccccttcttcctcgcacacgcgggacactgcacctgagcctctcaagccctcaacacgccaatttgaccacgtgaccgtaatcttgatccacggcctccttgcacttgcaccgcaccg

SEQ ID NO: 90538 - DNA, 1672 bp, Zea Mays
aacgcaaccaaaccgctctcgctctcggctctcggctctccaccagtctccgctctctggacgccggaaatgcagatggactcctacaactacaactacgccagtttcttccacgacgaggctccgtccttctacccgcacgttgcggtgccgccctccccggagctgcccatcggcctcattgcctcgccaggggagccggagccgcccttcgcgccgccgatgccggcctcgttccaggactacacgggcgccgtgggcgtgggcgtaggggtgagagcgccgttcgggggtgccagcgtgcacgggcaggcgatcgacgcgctgggcgggggcgacgggcagcgcgagcagagcatggcaatggcggaggacggggaagagccggcgccccggcggcggcagccggcgggaggccccgccgccgccgccgtcgagagcagccgcgggttccggcacatgatgcgggagcggcagcggcgcgagaagctgagccagagctacgccgacctgcacgcgctggtggcggcccggtccaggggcgacaagaactccatcgtgcaggccgccgccgtgtacatccacgagctcaggggcgcgcgggaccagctgcagcgccggaacgaggagctcaaggcccgcatcctgggccacgacgccgggcagcagtgcgtcaaggtgcagttcgaggtggacgagccggcgtccgccatcgactccatgatcggggcgctcaggcgcctcaagggcatggacgtcagggccaggggcatccgctccagcctgtccgggcgcaggctgtggacggagatgaatgtggagaccacggtgagcagcactctcgccatcctcgttgaatcgtccttgtgctttgctgacaatgactgatccacttcaaaattaaccgcaacatgtcagcgccctcgaaagaatcattgtcaatggacaatggggtgtgccacttgttagttgttagttactcgatcgacgcaacactggagctaaaccacgcggttcctcttgtcgtcctgggtttgcagatggcggccgacgaggtggaaaggggcgtggaggaggctctgctgcaggaagtggagaggaagcagcagcagcagcttggagctgggagcgccgcccctggttttccaggcccgtcatcgcacgtgcaaaacgtgttttgacacgcgatcctcccccacaacaagaagcgaaaaagaaacatgaaccccgagcctcatttcttgattcttttttctttaagaaccggatgcgcaaaacgagcatccgcgtccctggctctattgatttatttttaagtagaaatcggtgctgtttgtgtacaagtgttgtcgcagcctccaagtgggattttgagcacgtgtataaagttatagggctcgtgttcttacaacacacacacacaaaaaaaaaaagagacgtgcggacagtgaggactgaggacatgtgggcagggatcaagtgggccggaggaagcgggcgagaaatggggtcgagggacaggcacgttccggtcgtgccgtgtggagattcctagccgcggcggcaaccggtcaccagtgtgctctcgttgtccttggtctctactactcctgctacaaatggtgacgcctttattttatcgtgtggagtggatgtaaatggacgccaccac

SEQ ID NO: 90539 - DNA, 1532 bp, Zea Mays
aacgcaaccaaaccgctctcgctctcggctctcggctctccaccagtctccgctctctggacgccggaaatgcagatggactcctacaactacaactacgccagtttcttccacgacgaggctccgtccttctacccgcacgttgcggtgccgccctccccggagctgcccatcggcctcattgcctcgccaggggagccggagccgcccttcgcgccgccgatgccggcctcgttccaggactacacgggcgccgtgggcgtgggcgtaggggtgagagcgccgttcgggggtgccagcgtgcacgggcaggcgatcgacgcgctgggcgggggcgacgggcagcgcgagcagagcatggcaatggcggaggacggggaagagccggcgccccggcggcggcagccggcgggaggccccgccgccgccgccgtcgagagcagccgcgggttccggcacatgatgcgggagcggcagcggcgcgagaagctgagccagagctacgccgacctgcacgcgctggtggcggcccggtccaggggcgacaagaactccatcgtgcaggccgccgccgtgtacatccacgagctcaggggcgcgcgggaccagctgcagcgccggaacgaggagctcaaggcccgcatcctgggccacgacgccgggcagcagtgcgtcaaggtgcagttcgaggtggacgagccggcgtccgccatcgactccatgatcggggcgctcaggcgcctcaagggcatggacgtcagggccaggggcatccgctccagcctgtccgggcgcaggctgtggacggagatgaatgtggagaccacgatggcggccgacgaggtggaaaggggcgtggaggaggctctgctgcaggaagtggagaggaagcagcagcagcagcttggagctgggagcgccgcccctggttttccaggcccgtcatcgcacgtgcaaaacgtgttttgacacgcgatcctcccccacaacaagaagcgaaaaagaaacatgaaccccgagcctcatttcttgattcttttttctttaagaaccggatgcgcaaaacgagcatccgcgtccctggctctattgatttatttttaagtagaaatcggtgctgtttgtgtacaagtgttgtcgcagcctccaagtgggattttgagcacgtgtataaagttatagggctcgtgttcttacaacacacacacacaaaaaaaaaaagagacgtgcggacagtgaggactgaggacatgtgggcagggatcaagtgggccggaggaagcgggcgagaaatggggtcgagggacaggcacgttccggtcgtgccgtgtggagattcctagccgcggcggcaaccggtcaccagtgtgctctcgttgtccttggtctctactactcctgctacaaatggtgacgcctttattttatcgtgtggagtggatgtaaatggacgccaccacaataaattagagtactaaattaattttagtttaaaaataaataaataaaaatagagtatgattctaatccta

SEQ ID NO: 90540 - DNA, 1900 bp, Zea Mays
ctcgcctgcccctgtctccgcgaatctcgcctcccccgcccccacaaatctcgccgtcgccattatctcaagttctcaacccgtccacagcctcctctccaacagcaagcgccgccgccgcctcgcctcggcaaacccggctccagggcgacagctcccgccggcgggacaacatacttcagcgccgtgaagccgtccgtgatccagctgcgggggcccaccaaggtcagcgtcttcatcgccagcaacgacgccgagcaggcctgccgcctgcgacttcaggatcaccggaagctaccacgacagcgcctgtgccgtctccctcggtgactccgacaccgtcatcaccaaggacatggacatcggccaccatgtgaatggcctgcgtaagcacccatccaacgaggtctggcaactggtgaagctgctcgttaggaaatggaaggaaatagtggatgattgggtgaggctgcacaactcaggtggtgatggtagtggctccatcatatgcgatggtgactcacctgacaaagtccaatccaagtaccatcaaaatactcatggagtcaaattcagaacctgaggagtgctactcagatcacctaaccaactcagttaaatctttttttatgaaagatttgacaggtgtgtagctcaatttcccttaatgttgtcattctacataaaagcaccgccctcccgtggttgctgattccctgtaccaggcacttggtattcctcccacgttctttgcgatagggacttggtattcctctgagcacgacttcaacggcggcaactgcgaccaggcacgcaggcaccgggtggtggtcgaatcgagggaggccatgcccctgtccttcgacaactccaccaccgaggattcagcggctgccgtgaagcctaagcccaaggtcagggtcaggaagaaccccatgaagcagtcatgcttcgacttcaccaaggtggacgccgtgcttctccccatcgtcttcctcctcgtccgccccaatgttggcaagtcagccctcttcaacagattctagatgatggtacgacaaattattttaggagtgctttgccataatttaaagcttggaagggagctttctatgatttatttttctgactgtttcgtcacatgttctttccctagatgaaagtcttgatttatttttggttctgcaggatcattgcgtctctgcgagctaatcagctctgtgagcgtctccctagccccaatggcgagtcaactattgattgccatcagatctcaaagatgccaaatcttgcattcaccatagcaaataagactttcaccttaacaccagagcagtacatagtgaagctagagcaagcaggacaaactatctgcatcagtgggtttatggcatttgacgtaccgcctcctcgtggtcctctctggatacttggtgatgtttttatgggtgtctaccacactgtttttgacttcggcgagaacatgattgggtttgccaaatctgcatgaggactggagttctgcgctttagtagcatgtccagtttgttatcccggtattgtacatatatatgttgccaactggtgtaatccgcagtgtttaatagtatatattcatgcagaaatctagaagattgtggcatgatatgtgtttgcaaatggagctatgttatgtatggagctccaggacctagagttttatgtaaagggagacgatgaggattagggcttttaacctattctcatcacgttattgtcctgattactatgtgtaagtatggttgctgagcttgtttgggagcaagacaattggaggggatgagtggactaaaattcccttcctatcaaaattgaatataaagagtattttagctctctcaatcttcttcaattctcttgc

SEQ ID NO: 90541 - DNA, 2208 bp, Zea Mays
gacgacagggggagcgagcacaaagcggaataaagaaaaggccgggaaaagcgagggcactgcgcctccgctgcggcctgcggcgccagcgccagccaacccctccctcctaccagtaccagtatttgtttgtttatttatatgtatatataaaaccgtcgctcactccaccactgaccactctaccgagccgagcgccgggcggcctttggagtttggactcgtaccactccgtctgcgcaggcggaacggaacacgggcgagggcgcgagagcgtctccacctccaccctcccgagctcgtcgtcaccgcaccaccggggccgggcttcgctcggcgaggcaggcccgtccatggaggggatggaggaggccaacaggacggcagtggagagctgccaccgggtgctggcgctcctctccaacccgcacggccagctcgtccccagcaaggagctcgtggccgccaccggggaggccgtcgccaagttcggctcactgacggccaagctctccaactccaacggcgatggcctactgcagggccacgctagggtcaggaaggtcaagaagcccctgcacatcttcgacagcaacctcttcctcgagagctctgcggtggccgccgccgctgctccggccaagacgcccagcccgagcccgatccttggcctccagctgttcccgaggtaccaccagtttgagggctcgtcgtctaaggatcctgtcaggatccctacccagttccccaagaggttgctgctagagaagccgactgccggtatggaggggtcgacgtcgcagtcccctccgatcgtccagatggtccagccggtgtccgttgcgccccccgcagggacgcccaccccggcattgccccccgctcaccttcatttcatccagcagcagcaaagctaccagaggtttcagctcatgcagcagatgaagatccagagcgagatgatgaagaggagcaatcttggtgatcagggtggtagcttaagtggcggcggcggcggcggtcgtaagggtgtgaatctcaagtttgacagctctaattgcacggcgtcatcgtctcgctcgttcctttcgtctctgagcatggaagggagtcttgcgagtttggatggaagccggaccagcaggccgttccagctacttagtggctctcagacagctagcacgccggagctgggcctggtgcaaaggagaaggtgcgctggcagggaggatgggactggtcggtgtgcaaccgggagccggtgccattgttcaaagaaaaggaagctaaggataaggaggtccatcaaagtccctgcaataagcaacaaggttgcagacatcccagctgatgaattctcatggaggaagtatgggcagaagccaattaagggatccccacatcctaggggttattacaagtgtagcagtgtgagaggctgccccgcgaggaagcatgtcgagaggtgcgtggacgacccctcgatgctgattgttacctatgaaggtgaccacaaccacaaccgagttctagcccagccagcctgatctttcaggctatcaattcaagatcgcttctacagtcaccctccctccctccctagagaagggatgacaacgacgacagtagcaataacaagagcctagtgcctgtacatatgttctgcttctaacagttggaggagagagtcagttagctagctctttcagaaaaatcaatggtgacaggggggaaacttgtcatgtcgatggagaaagggggaggagggttcctcatcaaatactctagttttgtagttttggtttctcttttgtgttcgtcctgtgctagggcccatcttgtggttgcagtgtgacattgagccgcagttgtatgtctggtaatggtgttaggggattggatcgagaagaagagcacaaggcaggaaaagtgcctgtaaaagtggctacacctaggaacagaatgtacaatcgtcttcagtccagtggtacaatcttgttgacgcagtggtttgggtctgtggcgtgttgtttgttagcgccagtgatgctgcgaggcatgggggttgccggctccggctctcagcgtgccgcatccgtgcagtggcatttgtactggggcgtctgccgtttgagaggccggtttgctgcggtctgcgtgtcgccactgtctgaactctgacgctgcttttgacagtttggcatcttc

SEQ ID NO: 90542 - DNA, 1842 bp, Zea Mays
ccactgaccactctaccgagccgagcgccgggcggcctttggagtttggactcgtaccactccgtctgcgcaggcggaacggaacacgggcgagggcgcgagagcgtctccacctccaccctcccgagctcgtcgtcaccgcaccaccggggccgggcttcgctcggcgaggcccgtccatggaggggatggaggaggccaacaggacggcagtggagagctgccaccgggtgctggcgctcctctccaacccgcacggccagctcgtccccagcaaggagctcgtggccgccaccggggaggccgtcgccaagttcggctcactgacggccaagctctccaactccaacggcgatggcctactgcagggccacgctagggtcaggaaggtcaagaagcccctgcacatcttcgacagcaacctcttcctcgagagctctgcggtggccgccgccgctgctccggccaagacgcccagcccgagcccgatccttggcctccagctgttcccgaggtaccaccagtttgagggctcgtcgtctaaggatcctgtcaggatccctacccagttccccaagaggttgctgctagagaagccgactgccggtatggaggggtcgacgtcgcagtcccctccgatcgtccagatggtccagccggtgtccgttgcgccccccgcagggacgcccaccccggcattgccccccgctcaccttcatttcatccagcagcagcaaagctaccagaggtttcagctcatgcagcagatgaagatccagagcgagatgatgaagaggagcaatcttggtgatcagggtggtagcttaagtggcggcggcggcggcggtcgtaagggtgtgaatctcaagtttgacagctctaattgcacggcgtcatcgtctcgctcgttcctttcgtctctgagcatggaagggagtcttgcgagtttggatggaagccggaccagcaggccgttccagctacttagtggctctcagacagctagcacgccggagctgggcctggtgcaaaggagaaggtgcgctggcagggaggatgggactggtcggtgtgcaaccgggagccggtgccattgttcaaagaaaaggaagctaaggataaggaggtccatcaaagtccctgcaataagcaacaaggttgcagacatcccagctgatgaattctcatggaggaagtatgggcagaagccaattaagggatccccacatcctaggggttattacaagtgtagcagtgtgagaggctgccccgcgaggaagcatgtcgagaggtgcgtggacgacccctcgatgctgattgttacctatgaaggtgaccacaaccacaaccgagttctagcccagccagcctgatctttcaggctatcaattcaagatcgcttctacagtcaccctccctccctccctagagaagggatgacaacgacgacagtagcaataacaagagcctagtgcctgtacatatgttctgcttctaacagttggaggagagagtcagttagctagctctttcagaaaaatcaatggtgacaggggggaaacttgtcatgtcgatggagaaagggggaggagggttcctcatcaaatactctagttttgtagttttggtttctcttttgtgttcgtcctgtgctagggcccatcttgtggttgcagtgtgacattgagccgcagttgtatgtctggtaatggtgttaggggattggatcgagaagaagagcacaaggcaggaaaagtgcctgtaaaagtggctacacctaggaacagaatgtacaatcgtcttcagtccagtggtacaatcttgttgacgcagtggtttggg

SEQ ID NO: 90543 - DNA, 1373 bp, Zea Mays
cgccgcgcaaccattctcatttctctcgggttcgtcgtgagtaaaaaggaaaaagaaaccaaggactctctgtaccagcgaagcgtgcgtgggccgtgggcgcgtcctgttcttcttcctacctttccctaacctctcctccctcctgcaaatccgatctccccgagaccatgcgcaactccgccgccgcccagccctcttctcccgccgccacgtacgtctcaggcgccgcctacgtcgcgcccgcctcctccgccgccatgtacggctcaggcgcctcctacgtcgcgcccgccgcttccgcccccggcggcggcgggtacatctatcctgcgcccgcctcctccggcggcagcgccggctactccaagatcccaacctacccggcggtcccgtcggcgtatcccaaccccagccgtctcccgccgcgagtctccacccacgccccggtcgaggaccccacagcgctgccctcgccgctggccaaggcgggcgagctcgtgacgcggctccgcgagcaggggcaggtgctcatcgcggcgcgccggccgtggggcgaggtcttccgcgcgccggccttctccaagccgccgtcgctcggggaggcgatcgcccggatgcgccgcaacaccgcctacttccgcgccaactacgcgctggccgtgctcgccgtcgtggcggcctcgctgctctggcaccccggcacgctcttcgtgcttctcttcctctgcgccgcctggttcttcctctacttcgcgcggcccgcgcagggcgggcagccgctcagggtcctggggatggagttcgacgacggctccgtgctcgccgcgctctgcggggtcaccgtcatcgccatgctcttcaccagcgtcggctggaacgtggtgggctccgtcatgatcgggggcgcgctggtcagcgcccacgccgcgctcaggaccaccgacgacctcttcctcacggagcaggaggccgctggggacggcctgttggcagctggcatgagcgccgccgggcccatcttgcccacctatgtccgcattggttgattcgctcagctgggcgtggtgtgttcatcatggtttgcatacagccttcatgcagttcagcgatcttgatgctattgcttgcagatattagcaatcttccttgtaattaccatcacgatgtctaatattggttgtcggcgtgtgaaatgtcaagcttttttctgtatttctggtgaaactggattcaattgctgtttcgaatggtggtgttcgatcttcgttaactacatctcagaatgacagctgcgattttgcctgcacattctggttcccgatgcttcaggctcaattctcaatgtgatgaagttagctaaattttaataa

SEQ ID NO: 90544 - DNA, 1554 bp, Zea Mays
actatacaatctgatttgatgccttagtatcacaaacaacttgctgttcttaaagaaaattttaaaaaagttcagttttcgtttgctttaacttcagatatttggactttatcacatcaaaagactagttacatttctgttgttgcacactatttggataattcatattgtcttcataagcgtgttataggttttagagtgatgtatgattcacatactggtactgcaattgctaatcatattcttgaggtggttaatgattttaatataaggaataagattctatctattactcttgataatgcttcctcaaatacaaatgcgatagactctcttgcccctcatctgaagtcatacatagatggttatgttgtccaccaaaggtgtgtgtgccacattattaatctggttgttcatgatggcataacaattgttagtaagtatttggataatgttcgtgctgttgttcgtttcataactagtactcctcaaatgattaataaatttggtgagtattgcaaggcaaataatatgaaatcaaggaaatttggccttgatatgaagataagatggaattcgacctaccttatgcttaagaaactagaaggttatgaaaagattataactgtctttgtgaatgctaatgctcttgatattgatttggttctaactaaagttgattggtatatggtcaaacattttagagagttcttgatgcccttttatgtagccacaaatgttttatcaggtgtttactatcctacatcctgcttagtcattgattacatttggttaattgctgagtcatttgctaagcacagatctgattcccttctttgcattgttgttgctccaatggaattaaaatttctaaaatactttgataacatatcccatatatattgctttgcaactattttggatcctagaaaaaaacttgatgggttacaatctgctttagaaggaactggtgacttgctagatatggactattcagatgcttttaatcatgtgaaagatgaattatttcgtgtttttggcttttactatgattactatgacaaatatggtgaaagtgatgttacaggaacaatggatgaaactgacatagaacaatcagatagttctttgacagcccacttatggaagagatcgaagggaaaagaatttgctaactcaacagtaaatcaaaggtggaaccctaatgctgaattgaatcattatctgtctactaactttgcagccactgatcgcaccttgaagggtgataaggtaaaattacttgaatggtggagggaacacaagtacagtttcccagtattatctcattttgctagagatattcttcttgttcctgtttcaactgtttcttctgaggccacattcaacacagtgggtagaattattgaagaaaggagatcctctcttgcacctgagacagtggaggccatcacctgccttaaggattggaaaagagcagaagatagaaagcagcatcaacttgaagatcctgagattgaacaagcttatgctgatttcagccatgattagtgt

SEQ ID NO: 90545 - DNA, 621 bp, Zea Mays
atggctggcgcggcggcggagcgcaaggtgatcagggtcctcctcgtcgaggacgaggagatccacagggttctggcgagggcgctgctgaggtcggcctgcggcggcgtggagctgcacgaggcggggacgggcgccgaggcggtgcggcgcgtgcgggatggcggcgccgccgccgcctacgacctcatcatcaccgactggaagatgcccgtcatggacggccacgaggtgcggcatgccgcgacgcggcagattagggcgatgggcgtgacaacgccgatcgtcgggctgtccagcgacaccctcccgccagacgtcgacgcgttcatcaaggccggggccgacgacttcacccccaagcctctgtccaaggagaagctcgtccgtatccttaccaagttccatctcgcttagctctctatttgctgtccaaggagaagttcatccgggtttttttttttggttgccaaattggcaaatacaatctccactttgctctctgtttgggtgcaaatctcaatgagtggataaataaagggtctcgaagaatcgggtgggctttcttccactatggaccttgggccttatatcagctcgtgttatccttctcgcatataa

SEQ ID NO: 90546 - DNA, 464 bp, Zea Mays
gccatttaactgctgcgccgagaactgactctctcgctctgcccgcccgccggcgtcggcgggcgtgcgtgcttgcgtgcgcgcaggcgacgcggcagattagggcgatgggcgtgacaacgccgatcgtcgggctgtccagcgacaccctcccgccagacgtcgacgcgttcatcaaggccggggccgacgacttcacccccaagcctctgtccaaggagaagctcgtccgtatccttaccaagttccatctcgcttagctctctatttgctgtccaaggagaagttcatccgggtttttttttttggttgccaaattggcaaatacaatctccactttgctctctgtttgggtgcaaatctcaatgagtggataaataaagggtctcgaagaatcgggtgggctttcttccactatggaccttgggccttatatcagctcgtgttatccttctcgcatataa

SEQ ID NO: 90547 - DNA, 950 bp, Zea Mays
aggaagaaaggaacccaccaaagcttcaaaaaaagaaaaagagctgcacactggtcactggaaaacgaaggcaaaccctaatcgctactccaccgcagcgcccactacaccgatcgggctccgatggacttcgcggagctggaggccgtggagggcctccggtggccatggcactcgtggccgccgactacccccgccgccgcgtccctcgtcgtgcccacctccgtcctctgctcgccgctgcagcaccccacggcgccggacctcctcccgctgctaccctacgcgccgctccgctgcgcctccccgggttgtggcgccgcgctcaacccgttctcgcgcgtgcaccacggctccgcgcgctggtcctgcgccttctgtggcgccgccgccaacccgttcccccgcctactggcccccgacgcgctccccgccgaactcttccccacccactccagcgtcgagtacttgctgcccccggaccccgctgagcccgggggaccggggccacctgcgctcgtgttcgtgatcgatgcggccacggcggccgaggagctcaccgtgctcaaggacgaggtgcgcaggctcatgcaggggctgcctgaggggatcagggtggcgctcgtcactttcgctgcgtctgtgtgggtgcacgatcttggatttgagggttgcgctcgggtggttgtgcttaatggcgagcgtgagctcgagtctgacaaggtttgtgaatttgtaatataatccttaggacaccgaatttgtaatttggttctgcgccaatctatgtgacatgatcagcattctagtttcacgagtatccacaatctgttcctgccgcagtcagccttgaaatttgaatgtaagtatcttgttataatgctagttcaggggcatgtattaactttttgccattattagcatgactcatctaatccctctcacgctca

SEQ ID NO: 90548 - DNA, 2714 bp, Zea Mays
ggaacccaccaaagcttcaaaaaaagaaaaagagctgcacactggtcactggaaaacgaaggcaaaccctaatcgctactccaccgcagcgcccactacaccgatcgggctccgatggacttcgcggagctggaggccgtggagggcctccggtggccatggcactcgtggccgccgactacccccgccgccgcgtccctcgtcgtgcccacctccgtcctctgctcgccgctgcagcaccccacggcgccggacctcctcccgctgctaccctacgcgccgctccgctgcgcctccccgggttgtggcgccgcgctcaacccgttctcgcgcgtgcaccacggctccgcgcgctggtcctgcgccttctgtggcgccgccgccaacccgttcccccgcctactggcccccgacgcgctccccgccgaactcttccccacccactccagcgtcgagtacttgctgcccccggaccccgctgagcccgggggaccggggccacctgcgctcgtgttcgtgatcgatgcggccacggcggccgaggagctcaccgtgctcaaggacgaggtgcgcaggctcatgcaggggctgcctgaggggatcagggtggcgctcgtcactttcgctgcgtctgtgtgggtgcacgatcttggatttgagggttgcgctcgggtggttgtgcttaatggcgagcgtgagctcgagtctgacaagatacagaaacttttaggtattcaccgttcacagtacaagaacttggctatgccaaggtccactgaagtgcagcggtttttgctgcctgtttctgaatgtgaatttaacatcacatctgcaatagaggacctgagctccatgcctgcgtgtccacgtgggcatcgccctttaagagcaactggcgcagcgatttctactgctattgctcttctagagggttgctgctcacccagtaccggtggtcggattatgatctttacatctggtcctgcaacagttggtccagggtgtgtggtggaaactgatcttgggaaaacaattcgttctcatcgtgacatattcaatagcaacgcaccgctgactgacaaagcacgtgatttctataagaaagttgcaaagaggttgacagaccatgcattagttcttgatctattcgcctgctctcttgatcaggttggggctgcagagctgaggaatccaattgaagtgacagggggtttaatggtgcatacagagtcatttgagtatgagcagttcaaaagctgttttaggcatatgttccgtcgtgaaggcaccaattaccttaatatgaactttaatgcgacgattgaaatagtgacatcaaaggaggtgaagatttgtggtgcccttggtccctgcatttccctccgcaggaaaaataactcagttagtgataaggaaattggtgaaggtgggtcaaattattggaaaactagttcactgagcagcaaaaccagcattgctttccttttccgagttgattgcaatcataaagctgatccgccgactgtcttctttattcagtttatgacaaggtaccgacatggtgatggtagttatcgcctgagggtgacgactgttgcaagaaggtgggctgctcctcgatctcctgaaattgctgcagggtttgatcaggaagctgctgcagctgtaatggccaggcttgctgtttacagggcagagacataccatgttagagatgttatacggtggcttgacaagatgcttattcgctttactgctaagttcggaaactatgttcctgaagatccatctacatttcggctgtcaacaaacttctccttgtatccgcagttcatgtactacttgcggagatcacagttcattgatgttttcaacagctctcctgatgaaactgctttcttcaggttgatgctgaatagggaaggggttgtggggtctctaatcatgatccagcctactctattccagtactcatttgatgggccacctattcctgtactgttagatgtcagctccatctctcctgatgtcattttactatttgattcatacttctatattgtgattcattatggctcaaagattgctcaatggaggaagcttggctatcataaggacccaaaccatgaaaatttacggaagctccttgaagcaccagaagtagatgcagaggcactattggtagaccgtttccctgtgccaaaactcataaagtgtgatcatcatggtagtcaggccaggttcctgctcgctcgattgaatccatctgtgacacagaaaacacagttttcaaagggatctgaagtcattttcaccgacgatgttagtctgcaagtgtttattgaacacttgcaggagttggctgttcagggctagaaagtcatgaagcttgaccttgtctgctattccactttggtccattagatactgaagatatggctttgagagggaccagacttcatattcacagatgaagcttgcaagttttttattgaacacttgcagtaattggtgtgcaggattaactagttcatgtggaattatttaaatgcaattttctgctcacttgcaaatactggggagctctactgcctggagtgagatctccctgagttgtacattgctcaagctccagtttgatgtaagacaattacattttacccgttttgtatagcatgtggtattatccactggggacgcttgatttcttcaga

SEQ ID NO: 90549 - DNA, 2170 bp, Zea Mays
ggaacccaccaaagcttcaaaaaaagaaaaagagctgcacactggtcactggaaaacgaaggcaaaccctaatcgctactccaccgcagcgcccactacaccgatcgggctccgatggacttcgcggagctggaggccgtggagggcctccggtggccatggcactcgtggccgccgactacccccgccgccgcgtccctcgtcgtgcccacctccgtcctctgctcgccgctgcagcaccccacggcgccggacctcctcccgctgctaccctacgcgccgctccgctgcgcctccccgggttgtggcgccgcgctcaacccgttctcgcgcgtgcaccacggctccgcgcgctggtcctgcgccttctgtggcgccgccgccaacccgttcccccgcctactggcccccgacgcgctccccgccgaactcttccccacccactccagcgtcgagtacttgctgcccccggaccccgctgagcccgggggaccggggccacctgcgctcgtgttcgtgatcgatgcggccacggcggccgaggagctcaccgtgctcaaggacgaggtgcgcaggctcatgcaggggctgcctgaggggatcagggtggcgctcgtcactttcgctgcgtctgtgtgggtgcacgatcttggatttgagggttgcgctcgggtggttgtgcttaatggcgagcgtgagctcgagtctgacaaggttggggctgcagagctgaggaatccaattgaagtgacagggggtttaatggtgcatacagagtcatttgagtatgagcagttcaaaagctgttttaggcatatgttccgtcgtgaaggcaccaattaccttaatatgaactttaatgcgacgattgaaatagtgacatcaaaggaggtgaagatttgtggtgcccttggtccctgcatttccctccgcaggaaaaataactcagttagtgataaggaaattggtgaagtttatgacaaggtaccgacatggtgatggtagttatcgcctgagggtgacgactgttgcaagaaggtgggctgctcctcgatctcctgaaattgctgcagggtttgatcaggaagctgctgcagctgtaatggccaggcttgctgtttacagggcagagacataccatgttagagatgttatacggtggcttgacaagatgcttattcgctttactgctaagttcggaaactatgttcctgaagatccatctacatttcggctgtcaacaaacttctccttgtatccgcagttcatgtactacttgcggagatcacagttcattgatgttttcaacagctctcctgatgaaactgctttcttcaggttgatgctgaatagggaaggggttgtggggtctctaatcatgatccagcctactctattccagtactcatttgatgggccacctattcctgtactgttagatgtcagctccatctctcctgatgtcattttactatttgattcatacttctatattgtgattcattatggctcaaagattgctcaatggaggaagcttggctatcataaggacccaaaccatgaaaatttacggaagctccttgaagcaccagaagtagatgcagaggcactattggtagaccgtttccctgtgccaaaactcataaagtgtgatcatcatggtagtcaggccaggttcctgctcgctcgattgaatccatctgtgacacagaaaacacagttttcaaagggatctgaagtcattttcaccgacgatgttagtctgcaagtgtttattgaacacttgcaggagttggctgttcagggctagaaagtcatgaagcttgaccttgtctgctattccactttggtccattagatactgaagatatggctttgagagggaccagacttcatattcacagatgaagcttgcaagttttttattgaacacttgcagtaattggtgtgcaggattaactagttcatgtggaattatttaaatgcaattttctgctcacttgcaaatactggggagctctactgcctggagtgagatctccctgagttgtacattgctcaagctccagtttgatgtaagacaattacattttacccgttttgtatagcatgtggtattatccactggggacgcttgatttcttcagaaatgatttttgtcattccacca

SEQ ID NO: 90550 - DNA, 2090 bp, Zea Mays
cccatgacaggttgggtgctgcagcctgctacacgatgccgtcgtcgtcggagccgacgccgcctcagactcggccgccgcggcagcgccggctctcccggtgccggtactggtaccgggccgaaatttgacccccctctctctgctgagcacacggccacacgccccaactctcgcgatggcggcctctgccgccgcggggcgctcgtgggacccagccgtctcgctgcggctgggccaccctgcgctggtgctcctcgagcggtgccgcggggcgcggccgttccgggccatccttgcccacctgctccgccttggcctcgccatggagacgttccctatgagccggctcctccattacgccatcgtcgtgtcctccccgcgcctcacgcgcgaggctgagctcctcttccagcatttcacgccccgccccaatctctacatctataatctcatgctctccgcggcggcggcgcgcgactcctcctcgtcgacccaggcggcggctctctaccggtccatgctcgcgtcgtccgtcctccccgaccagcagaccttcctcgctctgcttaggtcggtggaacgcctgtccgccgggaggcaggtgcacgcccatgtcgttgtgagtggtttgcactcgcgcgtgtacctgcggaactctctgatcaagatgtacatcgacgccggggatgtggagaccgccgagctgatgttccgttctgcactggtgttggataccgtgtcttgcaacatcatgctatctgggtatgtgaatgaagggtgcaccctgaaggcgctgtggtttttccgtgatatggcaagccgggggattgttgttgatcagtatacggctgttgctctgctcacttgctgtgggcgcctgaagaacgagcttattgggaggtctgtccatggtgtcatcgtgcggagaatggatgcaggagatcatgggttgattctggtaaatgctcttttggacatgtatgcaaaatgtgggagaatgaacgcagcaaagacaatctttggtgaaactggtgagaaggatgccatttcatggaacaccatggtttcaggttttgtaaatgctggcatgttggaccttgctagcagatttttttctgaggcaccttccagggatctaatatcctggaacgcgcttctagctggatatgctagatacaaaagtttcaatgaagtgatgaagctattccatgatatggttgccagttgtgtaaatctggacaaggtgactgctgttaccttgatttctgcggccacaggtaagggatcactgaatcatgcaaagagtgtccacggttgggtagtgaaagaatttgaccatcaggatgcttttttggcgtcggctcttgtagacatgtattgcaaatgtggaaatgttaaaacagcttactatgtgttcgagaaagccttggacaaagatgttaccttgtggacagctatgatctctggccttgcattcaatggccatggaactgaagcattggaactattttgcaagatgcaaactgaggtcgtagcacctaatggtgtcacattgcttgctgttctcagtgcatgcagtcattctggtctgctggatgaaggatgtaagatttttgatgctatgaagcaaagatacagtattgaaccagggatagaacattttgggtgtatggttgatctccttgcacggtcaggtaggctgattgatgctttagctttggctaggaggatgccgatgaggccaagtcggtctatatggggttccattttaaatgcaagtttggctggtcaaaatattgaagttgcagaaattgcttcaaaagaactccttcgtcttgacccagcagaagaaggtggatacgtcttgctttccaacttgcatgcggctggaggtcactggaaccacagtgacaaagtgaggcagatcatggaaagaaaaggattgagaaaattagcaggtgctagtaattttggatcttgatgttgttgcttcacaagttcagatgccaggcaagactaccattttttttgaaatgcaagcttgtttcttctaatgaacggattaaatcttgtacatttcatggaaa

SEQ ID NO: 90551 - DNA, 798 bp, Zea Mays
agccgcacaagcacagcgactcgagcactgagcaaagcactctaaacctagcagtagcgacggcggtggcggctgctgctcatctccggccgacggtggtggcggctgctgctcatctccggccattcgtcggcctggtcgtcggcctgaagcccgcctggagcttgtctgcctacccgaccagagtacccggtgctgctgccgatccagcgcccttactgcaataaaggaaaaaggtgaagtagattaataacaccatggttccaagaaacataaggtcatcaagaaacaagcagaggtcaacggcatctataaatgaaaaagaactaggtgaagatgacaacaccaatgtgaatgcaagtgagaacgtagaggctaataaagaagcaagtggtgcagctaatgatgtgactggatctcataccccaataggagaaacttcatccaccaaactcgggcgtacaaagaagagaacttcaggagtttaggatcactacaatgatatagttgttgaagaaaaggtgggtgacatggttgtcaagaagccaatggcagcatgcaagtactgtacagatgttctttgcgctgcaagcaagcaagctgtaccatgtgatttgcacaaaggattggataagggccgaaagaaaagatccatataatgtaacttcacttcttgatgatttatctaatattattgacaccgtgagtgatgataatgttgatcatgatggagatgcttccgatgttgttgaccacaacgtcgatgataatgacattgttcaagtggaggaagattag

SEQ ID NO: 90552 - DNA, 1386 bp, Zea Mays
agccgcacaagcacagcgactcgagcactgagcaaagcactctaaacctagcagtagcgacggcggtggcggctgctgctcatctccggccgacggtggtggcggctgctgctcatctccggccattcgtcggcctggtcgtcggcctgaagcccgcctggagcttgtctgcctacccgaccagagtacccggtgctgctgccgatccagcgcccttactgcaataaaggaaaaaggtgaagtagattaataacaccatggttccaagaaacataaggtcatcaagaaacaagcagaggtcaacggcatctataaatgaaaaagaactaggtgaagatgacaacaccaatgtgaatgcaagtgagaacgtagaggctaataaagaagcaagtggtgcagctaatgatgtgactggatctcataccccaataggagaaacttcatccaccaaactcgggcgtacaaagaagagaacttcaggagtttaggatcactacaatgatatagttgttgaagaaaaggtgggtgacatggttgtcaagaagccaatggcagcatgcaagtactgtacagatgttctttgcgctgcaagcaagcaaggtaccacacgcctttggaaccactattattcatatcatgatgaaaacaaggtgaaacctagcataaggagactgagttcagatgatttgatttataatgaggaggctagtgttagaaaatattatcttgcaattattatgcatgagtatccaatcaacttttgtgagcatgagtatacaaatgacttcattagatctttgcgtccaaattatccattaatgggtcgcaagggcagtaggaccaagatcatggatatcttttacaatgagaagaaaagtatttttgactacttttgcactcttgactgtcgatttagctgtaccatgtgatttgcacaaaggattggataagggccgaaagaaaaggtaattgtcacttctcagtattgtaaattatatttctaattggtatattagattattagtcacttattttccccatgtgatttttaattactatttcagatccatataatgtaacttcacttcttgatgatttatctaatattattgacaccgtgagtgatgataatgttgatcatgatggagatgcttccgatgttgttgaccacaacgtcgatgataatgacattgttcaagtggaggaagattaggattatcttttttttatagacaagctgagctgcttcagtcaatcattattggtgcttgttattcagcaatatgcactttatgttgttctgcacttttgtcaatttatgttgaatgtatcatgtatgggtgtgctagtgaacttaacggtgaactgaatgtatggcctgggtgt

SEQ ID NO: 90553 - DNA, 1320 bp, Zea Mays
agccgcacaagcacagcgactcgagcactgagcaaagcactctaaacctagcagtagcgacggcggtggcggctgctgctcatctccggccgacggtggtggcggctgctgctcatctccggccattcgtcggcctggtcgtcggcctgaagcccgcctggagcttgtctgcctacccgaccagagtacccggtgctgctgccgatccagcgcccttactgcaataaaggaaaaaggtgaagtagattaataacaccatggttccaagaaacataaggtcatcaagaaacaagcagaggtcaacggcatctataaatgaaaaagaactaggtgaagatgacaacaccaatgtgaatgcaagtgagaacgtagaggctaataaagaagcaagtggtgcagctaatgatgtgactggatctcataccccaataggagaaacttcatccaccaaactcgggcgtacaaagaagagaacttcaggagtttaggatcactacaatgatatagttgttgaagaaaaggtgggtgacatggttgtcaagaagccaatggcagcatgcaagtactgtacagatgttctttgcgctgcaagcaagcaaggtaccacacgcctttggaaccactattattcatatcatgatgaaaacaaggtgaaacctagcataaggagactgagttcagatgatttgatttataatgaggaggctagtgttagaaaatattatcttgcaattattatgcatgagtatccaatcaacttttgtgagcatgagtatacaaatgacttcattagatctttgcgtccaaattatccattaatgggtcgcaagggcagtaggaccaagatcatggatatcttttacaatgagaagaaaagtatttttgactacttttgcactcttgactgtcgatttagctgtaccatgtgatttgcacaaaggattggataagggccgaaagaaaagatccatataatgtaacttcacttcttgatgatttatctaatattattgacaccgtgagtgatgataatgttgatcatgatggagatgcttccgatgttgttgaccacaacgtcgatgataatgacattgttcaagtggaggaagattaggattatcttttttttatagacaagctgagctgcttcagtcaatcattattggtgcttgttattcagcaatatgcactttatgttgttctgcacttttgtcaatttatgttgaatgtatcatgtatgggtgtgctagtgaacttaacggtgaactgaatgtatggcctgggtgtgctggtgaaatcaatggaccaatttatgtcata

SEQ ID NO: 90554 - DNA, 827 bp, Zea Mays
aggtcggccgcacccaccccacgcacaggcgaaaaaaaaaactgtttgttagcgtgacgtgcgtgaggagtctggagtcggacggaatcgaaaaggcgaaaactcagtgtctcgagtttcctcggagcggaggcgatggctgggaagggagggaaaggcttgctcgccgcgaagactacggcggccaagtccgccgagaaggacaaggggaagaaggccccaatctcacgctcctcccgcgccggcctccagttccctgttgggcgtatccaccgtcagctgaagcaaaggactcaggcaaatggtcgcgttggtgccaccgcagccgtctactccgctgccatcctggagtacttgactgccgaggttctggagctggctgggaatgctagcaaggatctgaaggtgaagcgtatcacccctcgccatttgcagctagccattcgtggagacgaggagctggacaccctcatcaagggcaccatcgcaggcggaggtgtcatcccgcacattcacaagtccctgatcaacaagtcctccaaggagtgaagactaggggatgtgcatctttagtttaaactagacttctgtgcgctcctcggcgagtccttgtcatcctgtaggttttagttgagctgtcaggttggagctcctctgtgtaacgcttgcctggtactgcttcatcagttatttggttattgtgtttgtgttgagttgttaacttcaggggtgcaaacctggatgcttatttagttatgtgactactgctattcggtttatgttgtggtttgtttttatttttacaattttttctagctgcaattaca

SEQ ID NO: 90555 - DNA, 822 bp, Zea Mays
gccgtttgatttcccgaattggcggcgagatccgaccgattcgcccctcaatcttcgctgatttggcccgcgcgccgtcggattctgttttttctgcggcagtgtctcgagtttcctcggagcggaggcgatggctgggaagggagggaaaggcttgctcgccgcgaagactacggcggccaagtccgccgagaaggacaaggggaagaaggccccaatctcacgctcctcccgcgccggcctccagttccctgttgggcgtatccaccgtcagctgaagcaaaggactcaggcaaatggtcgcgttggtgccaccgcagccgtctactccgctgccatcctggagtacttgactgccgaggttctggagctggctgggaatgctagcaaggatctgaaggtgaagcgtatcacccctcgccatttgcagctagccattcgtggagacgaggagctggacaccctcatcaagggcaccatcgcaggcggaggtgtcatcccgcacattcacaagtccctgatcaacaagtcctccaaggagtgaagactaggggatgtgcatctttagtttaaactagacttctgtgcgctcctcggcgagtccttgtcatcctgtaggttttagttgagctgtcaggttggagctcctctgtgtaacgcttgcctggtactgcttcatcagttatttggttattgtgtttgtgttgagttgttaacttcaggggtgcaaacctggatgcttatttagttatgtgactactgctattcggtttatgttgtggtttgtttttatttttacaattttttctagctgcaattaca

SEQ ID NO: 90556 - DNA, 910 bp, Zea Mays
ctttattcactcgccctaggtttccaatcacaggatgcttccgccccgcttccctcccctactcccccacctctcccaccctttttatatcagctcgctcctcagcaccagcatacatacctactagtctactaccccttcacctaccttcacctggcaactggcattggtcccgtatagtgccttgctgtcagttgcatggacgggctgacggacgagcagaggctcgcgttccaggaggccttctcgctcttcgacaagaacggcgacggatgcatcaccatggaagagctggccgcagtcacccgttccctcggtctcgacccgagcgatcaggagctcaatgatatgatgagcgaggtcgatacggacggcaatgggatcatcgatttccaggagttcttaagcctcattgcccggaagatgaaggatggcgacggcgacgaagagctcaaggaagcctttgaggtcctggacaaagaccagaacggcttcatctccccggttgagctgaggacggtgatgaccagtctcggggagaagatgaccgacgaggaggttgaacagatgatcagggaagcagacaccgacggtgacggtcaggtgaactacgatgagttcgttctcatgatgaagaacgctgagcggaaaatatctgggtgaagggcgcgatgtggtgtggaactagtagtcgtcttggttggattcttctgtcagaaatctactactgtaaattgcaattgtatgcttagtactatgatcgtgttattcgaagtgttggaggttggaaaagtgatctcacgctcattaacgggtggccaacggccttatgtatacgatgaatatttagataggtggcttttattttgttacgataaatagcaggaggaagatccattgacgacctcta

SEQ ID NO: 90557 - DNA, 1122 bp, Zea Mays
cactgccgtcccactcccaccttcttggagacaccgccaggcgccatcttccggccgctgcccgcctgccccctcccccccccccccccccgggaggtcgaactgccttctagagccctctcctgttttcaggcgaatgtgcaggtagcttgacgtctgatgaacgctcagccatgctgctgatgctacacgaaactcttcctttcgtgaggccgacgagttcttgccgggacccaaaactctccgagaagagtgcctctgctttccacggtaaattgggatgcagtgcggtctgcagttcagcggaaggctatcgtgtacagaagccgcacattgttcacagctacaaagttagcttcactaggaccagccatcatctgtgtaaaagcttaaacgagagaactacaagcatcggttccatgttaatgcttcgcccgatgacgacgacttccgctcatcgcgtaacatagcgatcagtttgttcaagcggtacaagaatgtcattgaccgaggaggtggagaaaacctaaatgagtttgtcagtgctggagtgaccgcttacgcactagggtgtacagatgaggggcttagaaaggaacttatggatattgaagattctggtctggagattgaaggcttagggtccttggggggcaccagcctcaagttcaaagtccactcctttgagatccgtgagtgcatcctgtggctcagtatagtgttcgtcacaatactgtgcacaccacaactaacagttatcaggtggtctccgaacccaccggtgtcagccgacgtcttgcatcagtggaaaggattctgtgctctaatcgcgaacgcttactatgtcaaaggaatggcatggtaagagcagagcagcttctgccagcgcccagcagcgttgctcttcttctatctcagaatctcatacatgttcctaaaactgacgctgcaggttgccagtgaaaaccttgcagctggaacagatggctgtcacaggaagttcagagaaaccatcagtagttgctagtcgcatgcagttagttttcagcacattagaggtttatagcggcaccgtcaatatgtacgcgctaaataagaaagatgatatgctcgttagtgatt

SEQ ID NO: 90558 - DNA, 1053 bp, Zea Mays
cactgccgtcccactcccaccttcttggagacaccgccaggcgccatcttccggccgctgcccgcctgccccctcccccccccccccccccgggaggtcgaactgccttctagagccctctcctgttttcaggcgaatgtgcaggtagcttgacgtctgatgaacgctcagccatgctgctgatgctacacgaaactcttcctttcgtgaggccgacgagttcttgccgggacccaaaactctccgagaagagtgcctctgctttccacggtaaattgggatgcagtgcggtctgcagttcagcggaaggctatcgtgtacagaagccgcacattgttcacagctacaaagttagcttcactaggaccagccatcatctgtgtaaaagcttaaacgagagaactacaaggcactgcctgcatcggttccatgttaatgcttcgcccgatgacgacgacttccgctcatcgcgtaacatagcgatcagtttgttcaagcggtacaagaatgtcattgaccgaggaggtggagaaaacctaaatgagtttgtcagtgctggagtgaccgcttacgcactagggtgtacagatgaggggcttagaaaggaacttatggatattgaagattctggtctggagattgaaggcttagggtccttggggggcaccagcctcaagttcaaagtccactcctttgagatccgtgagtgcatcctgtggctcagtatagtgttcgtcacaatactgtgcacaccacaactaacagttatcaggtggtctccgaacccaccggtgtcagccgacgtcttgcatcagtggaaaggattctgtgctctaatcgcgaacgcttactatgtcaaaggaatggcatggttgccagtgaaaaccttgcagctggaacagatggctgtcacaggaagttcagagaaaccatcagtagttgctagtcgcatgcagttagttttcagcacattagaggtttatagcggcaccgtcaatatgtacgcgctaaataagaaagatgatatgctcgttagtgattattttgtttgtt

SEQ ID NO: 90559 - DNA, 1288 bp, Zea Mays
cactgccgtcccactcccaccttcttggagacaccgccaggcgccatcttccggccgctgcccgcctgccccctcccccccccccccccccgggaggtcgaactgccttctagagccctctcctgttttcaggcgaatgtgcaggtagcttgacgtctgatgaacgctcagccatgctgctgatgctacacgaaactcttcctttcgtgaggccgacgagttcttgccgggacccaaaactctccgagaagagtgcctctgctttccacggtaaattgggatgcagtgcggtctgcagttcagcggaaggctatcgtgtacagaagccgcacattgttcacagctacaaagttagcttcactaggaccagccatcatctgtgtaaaagcttaaacgagagaactacaaggcactgcctgcatcggttccatgttaatgcttcgcccgatgacgacgacttccgctcatcgcgtaacatagcgatcagtttgttcaagcggtacaagaatgtcattgaccgaggaggtggagaaaacctaaatgagtttgtcagtgctggagtgaccgcttacgcactagggtgtacagatgaggggcttagaaaggaacttatggatattgaagattctggtctggagattgaaggcttagggtccttggggggcaccagcctcaagttcaaagtccactcctttgagatccgtgagtgcatcctgtggctcagtatagtgttcgtcacaatactgtgcacaccacaactaacagttatcaggtggtctccgaacccaccggtgtcagccgacgtcttgcatcagtggaaaggattctgtgctctaatcgcgaacgcttactatgtcaaaggaatggcatggttgccagtgaaaaccttgcagctggaacagatggctgtcacaggaagttcagagaaaccatcagtagttgctagtcgcatgcagttagttttcagcacattagaggtagtcagcccacagtggccaagagtgtgattagatgaaagcaataccatcaaacaaaggtctgcagttttattctgaccaaaagatatgcatgtccaagttggcaagttcaaacctctgtcatggcgcaaacagatgatactatgtccatttgaactcaaatgtcaaataaaaatgctaatgtacttgttgtgaattatttgatttgatgtacatatactgcttctatcttgcatcaggagttctggcaagtgaacaagtatcccctactgctccaatagagataaagtggaaattgtgggtcactaatt

SEQ ID NO: 90560 - DNA, 1266 bp, Zea Mays
cactgccgtcccactcccaccttcttggagacaccgccaggcgccatcttccggccgctgcccgcctgccccctcccccccccccccccccgggaggtcgaactgccttctagagccctctcctgttttcaggcgaatgtgcaggtagcttgacgtctgatgaacgctcagccatgctgctgatgctacacgaaactcttcctttcgtgaggccgacgagttcttgccgggacccaaaactctccgagaagagtgcctctgctttccacggtaaattgggatgcagtgcggtctgcagttcagcggaaggctatcgtgtacagaagccgcacattgttcacagctacaaagttagcttcactaggaccagccatcatctgtgtaaaagcttaaacgagagaactacaaggcactgcctgcatcggttccatgttaatgcttcgcccgatgacgacgacttccgctcatcgcgtaacatagcgatcagtttgttcaagcggtacaagaatgtcattgaccgaggaggtggagaaaacctaaatgagtttgtcagtgctggagtgaccgcttacgcactagggtgtacagatgaggggcttagaaaggaacttatggatattgaagattctggtctggagattgaaggcttagggtccttggggggcaccagcctcaagttcaaagtccactcctttgagatccgtgagtgcatcctgtggctcagtatagtgttcgtcacaatactgtgcacaccacaactaacagttatcaggtggtctccgaacccaccggtgtcagccgacgtcttgcatcagtggaaaggattctgtgctctaatcgcgaacgcttactatgtcaaaggaatggcatggttgccagtgaaaaccttgcagctggaacagatggctgtcacaggaagttcagagaaaccatcagtagttgctagtcgcatgcagtagtcagcccacagtggccaagagtgtgattagatgaaagcaataccatcaaacaaaggtctgcagttttattctgaccaaaagatatgcatgtccaagttggcaagttcaaacctctgtcatggcgcaaacagatgatactatgtccatttgaactcaaatgtcaaataaaaatgctaatgtacttgttgtgaattatttgatttgatgtacatatactgcttctatcttgcatcaggagttctggcaagtgaacaagtatcccctactgctccaatagagataaagtggaaattgtgggtcactaatt

SEQ ID NO: 90561 - DNA, 1182 bp, Zea Mays
cactgccgtcccactcccaccttcttggagacaccgccaggcgccatcttccggccgctgcccgcctgccccctcccccccccccccccccgggaggtcgaactgccttctagagccctctcctgttttcaggcgaatgtgcaggtagcttgacgtctgatgaacgctcagccatgctgctgatgctacacgaaactcttcctttcgtgaggccgacgagttcttgccgggacccaaaactctccgagaagagtgcctctgctttccacggtaaattgggatgcagtgcggtctgcagttcagcggaaggctatcgtgtacagaagccgcacattgttcacagctacaaagttagcttcactaggaccagccatcatctgtgtaaaagcttaaacgagagaactacaaggcactgcctgcatcggttccatgttaatgcttcgcccgatgacgacgacttccgctcatcgcgtaacatagcgatcagtttgttcaagcggtacaagaatgtcattgaccgaggaggtggagaaaacctaaatgagtttgtcagtgctggagtgaccgcttacgcactagggtgtacagatgaggggcttagaaaggaacttatggatattgaagattctggtctggagattgaaggcttagggtccttggggggcaccagcctcaagttcaaagtccactcctttgagatccgtgagtgcatcctgtggctcagtatagtgttcgtcacaatactgtgcacaccacaactaacagttatcaggtggtctccgaacccaccggtgtcagccgacgtcttgcatcagtggaaaggattctgtgctctaatcgcgaacgcttactatgtcaaaggaatggcatggtagtcagcccacagtggccaagagtgtgattagatgaaagcaataccatcaaacaaaggtctgcagttttattctgaccaaaagatatgcatgtccaagttggcaagttcaaacctctgtcatggcgcaaacagatgatactatgtccatttgaactcaaatgtcaaataaaaatgctaatgtacttgttgtgaattatttgatttgatgtacatatactgcttctatcttgcatcaggagttctggcaagtgaacaagtatcccctactgctccaatagagataaagtggaaattgtgggtcactaatt

SEQ ID NO: 90562 - DNA, 1357 bp, Zea Mays
actcatttcgctcggttttaatcttcggacgcatccctcatatgttgccaccaaacccgggagatcagcagaatgcttgttgtaaccgagcataatttaagcatgcaagatctgcggcgctcctagttcttcttcgcgaataattagaccatgctctgttcgcaggtcgaactgccttctagagccctctcctgttttcaggcgaatgtgcaggtagcttgacgtctgatgaacgctcagccatgctgctgatgctacacgaaactcttcctttcgtgaggccgacgagttcttgccgggacccaaaactctccgagaagagtgcctctgctttccacggtaaattgggatgcagtgcggtctgcagttcagcggaaggctatcgtgtacagaagccgcacattgttcacagctacaaagttagcttcactaggaccagccatcatctgtgtaaaagcttaaacgagagaactacaaggcactgcctgcatcggttccatgttaatgcttcgcccgatgacgacgacttccgctcatcgcgtaacatagcgatcagtttgttcaagcggtacaagaatgtcattgaccgaggaggtggagaaaacctaaatgagtttgtcagtgctggagtgaccgcttacgcactagggtgtacagatgaggggcttagaaaggaacttatggatattgaagattctggtctggagattgaaggcttagggtccttggggggcaccagcctcaagttcaaagtccactcctttgagatccgtgagtgcatcctgtggctcagtatagtgttcgtcacaatactgtgcacaccacaactaacagttatcaggtggtctccgaacccaccggtgtcagccgacgtcttgcatcagtggaaaggattctgtgctctaatcgcgaacgcttactatgtcaaaggaatggcatggttgccagtgaaaaccttgcagctggaacagatggctgtcacaggaagttcagagaaaccatcagtagttgctagtcgcatgcagttagttttcagcacattagaggtagtcagcccacagtggccaagagtgtgattagatgaaagcaataccatcaaacaaaggtctgcagttttattctgaccaaaagatatgcatgtccaagttggcaagttcaaacctctgtcatggcgcaaacagatgatactatgtccatttgaactcaaatgtcaaataaaaatgctaatgtacttgttgtgaattatttgatttgatgtacatatactgcttctatcttgcatcaggagttctggcaagtgaacaagtatcccctactgctccaatagagataaagtggaaattgtgggtcactaatt

SEQ ID NO: 90563 - DNA, 819 bp, Zea Mays
atgtggaacgttctggaactttcacttgccaccggggctacccgggttcgggttcaagtggtagatgctctgcaccagcacatccacgtcgtcgtccacgtcgttgtccacgtcagctccgttcccctcctcgccatcgcatctgccctccctgtgcttctcctccaggccgaggttgagcaacttcgcccagaagctctccgtgtcctcgccgccgccgccgccgccccttctctcccaccgtctctcgtcgtcgtccgcctccgccacgccgttgacgccgaccggaagtccggaaatgtagtcgctcaccgccgactccgtggcagtgccgcttctctcgccgtcgcgcgggaggtactcgatggggcggcggcgctttctggagagcgcgtcctcgagctccctgcggcagccgccaaggccctcccggtcgaccagcatccggatgaagctcgggttcttcatggcacgcgcgaggaacaccgtcatctgctgctgcttctgctccgccgtggtgatgcgcttctccatggcctgcatctgcgcgcgcgtcgcctgctgctcctgccgcagcttcaccacctccgcgagcaggatccccctgtcgcgctgcagccggtgcacctcgccgtcgagcccgaactgccccacctccaggcaggccgacggcgcctgcccctgctgcgccgacgggctcgacggcgggcgccggcgcttgatcgtcctgaggagctccctctggccacgctggaacccctcgttcgcgaactcccacctgtccgggtcaaccttcctgaacccctgcaacgaacgagt

SEQ ID NO: 90564 - DNA, 1055 bp, Zea Mays
agcgcaacaaccaccagcgcacaagcacaacgacagcgaccaagaacaagaagccgtgaccgtgagaggtccgagtgccagccgcgtttcctatacacgggcagagggcggtgaccgaggaacagaggaggcggaggaagaggagaattagaaggatgtacttccgtccgccgccgaagggcccggagtggtacgccggcgatgcggagacggggcaggcagcgcggccgctgtacccgatgatgctggaggacccgcgcctgcgctgggccttcatccggaaggtctacagcatcctctccatccagatgctgctcaccgtcgccgtcgccgccgtcgtcgtgtacgtccgccccgtcgcgctcttcttcgtctccacggccgcgggcttcgggctctacatcttcctcatcatcctcccgttcatagtgctgtgccccctgtactactactaccagcgccacccggtgaacctgctgctgctcggcctcttcacggtcgccatcagcttcgccgtcggcctcacctgcgccttcaccaaaggcgaggtgatcctcgagtcggcggtcctcacggcggtggtggtgctgagcctcacggcgtacaccttctgggcggcgaagcgcggccacgacttcaacttcctgggcccgttcctgttcgccgccgtcatgatcctcatgttgttcgcgctcatccagctcttcttcccgctcggccgcatctcgctcatgatctacggggggctggcggcgctcgtcttctgcggctacatcatctacgacaccgacaacctcatcaagcgctactcctacgacgagtacgtctgggccgccgtcgcgctctacctcgacgtcatcaacctcttcctctccctcgtcacgctcttccgggcggcggattcgtgagcacggctacgaggtacctgacagctgcctatggcgcagccagagggtgttggaatgtgccttgccctacctcacttgatatctgctggaatattactctcccgtaaagtgaaataattgttttggccatgaccgtcgctttgcttg

SEQ ID NO: 90565 - DNA, 1662 bp, Zea Mays
cttttctttgcggcgacacgtcagggagagcggcgccgcccgtggctaggtctttgtcggggcgcttcgccggcgacgagcatccgccaggtgcccagccatgtcgtccaatgccggggcctccgtcgctcccatcggcggcggcgctgctcgtgcccgcagtcgcagcttcgggagcagcagcagcaacggccgggccgccgacggcaatggcgctggggtgttcgtgagggcgggggccgacaacgagatgtacgtgcgggcggacaagatcgacctcaagaacctggacgtgcagctggagaagtcgcggtcccaggtgtggctggagcaccagcggtcgcagcggacggcgtcgccgcggccggagacgccgctgctcgagtgggagatcgacctcgccaagctcgacatccagaaccagatcgcgcatggcaccttcggcgtcgtctaccgcggcacctacgacggccacgacgtcgcagtgaaagttctggactgggggcatgatgggcagaacacggcggcgaagcaccgcgaggccttccaaaaggaggtcgctgtctggcagaagcttgaccaccccaacgtcactaagttcgtgggcgcttcgatggggacgtcccagctgaagatccccaagaaggggtcgacgacgtcctcctcctcctcctctcgcggcggtcgcgccgcgcccaacgagtgctgcgtcgtcgtggtcgagttccagcacggcggcacgctgaagacgctgctgtacaaccaccgcgacaagaagctttcgtacaggaaggtcgtccggctcgcgctcgacctcgccagagggctgagctacctgcactcgaagaaggtgatgcaccgcgacgtgaaggcggagaacatgctgctggaccggaagcggacgctgaagatcgccgacttcggcgtggcgcgcgtggaggcgcagagctgcgaggtgacggggcagacgggcacgctgggctacatggcgccggaggtgctgcaggggaagccgtacgaccacaagtgcgacgtgtacagcttcggcatcctgctctgggagacctactgctgcgccatggcctaccccaactacagcctcgccgacatctcctaccacgtcgtcaagctgggcatccggccggacatcccgaggtgctgcccgcgggcgctggtggagatcatgacgcggtgttgggacggcaacccggacaaccggccggagatgtcggaggtggtggcgctgctggagaagatcgacaccagcagcggcaagggcggcatgacgcccgtcgacgacgtcgcgcaggggtgctcctgcttcggcttcaaccaccgcagcgtcgcctaggctagctcccgtcagctgacaccgcagttattaagttattattaataataattaagctacatacacacgtacttaagtatggccggccatgcccatgcccctcatctcgtcggtccgccggcgagcatcgatcgatctttttctttgcatgctgtcggtcgtccccatcattgtgcggatgtgtttaaagcgccgtggacttgcgtgtaacctgtaactcgtcttgtgttctgtggtctgacgtataatctgtgtcggcatcccattctgataatctccaagaccgcaacgagagggcgaccttggcaatt

SEQ ID NO: 90566 - DNA, 2137 bp, Zea Mays
caccagtacaccctgcacgcgctgcgggcgtttccgccggctttgtgcctcctctgccctccccggccgctcgccctccgtccacgctcaagctcgccccgtcccggcgcctcgaactcgtcgtcctcgcttccgctgtcgccaccgcgaagcatgaggaggcgtcctgggatcactggcttgcagaatgtggcggctactctcaaccagttgggactggtcggggagaatatggccaaggtcgggaccgatgtcatgaagaagcagcgacttgggatggtccgatcacagctcgagaaatttgcttgcaagcataagaaaacatccttctctaccgtggggttcgacctgcccgactggttcaggaacccaaaggatggttatccttgttccaggttggatggcaatggcgatgatgactttgtgctcccggccaaatcagacttctcagaacaacaaggttgctctgccaccggtggaggatccagtccactgtcgatccttgccagctgccctgcatcccatgaagatgccgaatttgaggccgacatggatgaggtcagcaggattttgagatcccggtttgcttctccagaggctattgtgatcaccatggactgctgccctgtcagggtgtcagcacgccttgtcagcaaggtcctgagcaggttcagcaatgattgggtggccgcatttgggttcttcatgtgggccggaactcaggaaggctactgtcattgtgctgattcatatgacatgatggtagacatattgggcaagttcaagcagtttgatttgatgtgcggtctgatcggccagatgcatgagattggggggttggtgtcgctagcgaccatgacgaaggtgatgaggaggctatgtggagccaaccgatggagtgacgccattgatgctttccataaaatggaccgctttggggtggcgaaggacacaaaggccatgaatgtgctcttggacacattgtgcaaggagaggagtgtgaagcgtgcaagaggtgccttccaagctttgaaggggacaattcctcctgatgaaagtagcttcaacacattggttcatggctggtgcaaagcaaggatgctgaaggaggctcgcgaaacaatgaaggagatggagcggcatggtttcagtccttcagtaacgacttacacctgcctgatagaagcgtactgcatggagaaagattttcagacggttgatggtatcttggatgagatgcacacaaaaggatgcactccaaatattatcacatacacaattgtgatgcatgcgctagggaaggctgggaggacacaagaagctttggatacttttgacaaggtgaagcaagatggctgtgccctagatgcttctttctacaactgtcttatatacatactatgcagagctgggaggttgcaagatgcaaattttgtggtcgaagaaatgcaccgaactggaatatccccaaacttgactacctttaacaccctgatttctgctgcctgtgatcactctctggctgagaacgcacttaaattgttggttcagatggaggaacagtcatgcaacccagatatcaagacgtacacccccttgctgaagctctgctgcagaaggaaatgggtgaagacgcttctgttcctgatatgtcatatgttccggaaggacatcacccctgatttcagcacatacacattgctggtgtgctggctatgccggaacgggaggctcacccagtcctgcttattcttggaggagatggtgctgaagggctttactccacagcaggcgacctttgatcttgtgctggagaagcttaagaacatgcacatgctttcagcagtgagaaagattcagcttctcaggatgcacacagaaggtactaggtgtaggagcggtgttccatcttatttgagagaggatggtcacgatagacactgttatgctgtattgtcaaacactagtgaagctgaatcttcaatagatggaaaagaggtacctagagctgtgcatatactgtaaaaactactgttgatctctagccttttacacttgaatattgtacttctcattgtatgctgctcgtatttttctctttttaataagaatttatgtatatgcacatatcaaccaa

SEQ ID NO: 90567 - DNA, 1518 bp, Zea Mays
accttatagtcaactttcaacaactgaatttccatggagttatagccacatttgtctattaaaacggagcaccaagagagagttatatgccgttttttacttatagaacaggcttgaaacatttacgcattgtctttccacttctccagcattttaaccttttatcatccttttcttagctgctctgaaacatccatttttctctgtgccatcaatggatgcttagcacagatcgcttccacatatcacatgatcaatcagtactgggcgtatagcatattgttcagaaggtttttataccattggacagtcatatgaacttatagattggaaccggatcaattgacaaagttagtttactaatataaagatggatacagaatggttttactggtttgatacctttgctccttcctatctaccatttcattttcatatgaagtagtacatgcatatgttcacattttttccttagactgatctagaggcagggcttgatcactaatgatttcatttttatatttaaaaccatctgtatagattcctgtaacaggctaagagcatctcctcaagagattagccaaatttactgatttagctactttgtaaaatagatttcacaaaaaaagagttgggtactcacagactctaaaattcagagtctccatattcaaaagcgccacctaaataggattttttcagattagagaggctttcagcagcatggacgacttttactccttcaggtctggctttttggcgccgccaggccagacattttgttgcaggtcgatgctgttgctggtcgccgaacaaagcatgcaggggtagccatgtccaccggcccgaaagcacgcaggcccagccgtggatacatccaatgaggcaacgcgcttgagaggctttccagtttggtcgtgcatgtaattggcagtgtctgatgcctcaaccaccgtgagcagacgtctggataattggaggctagcacccggtctcctgctgctcagtggggtacatggtgcctaggggctgagctgcaagacgtgaagacgacggtgggaaaacgcgaggaaaagaaaaatcttgggcctcctgccggcgtgggcttgtggtggcggagaggaaggcacatgtcaagatgcactagcatgactgtcttcgatgaactttaactgctttgagcctttgacaagcaacgaggcaatttcccgttctctatttaagacacttgtgtgttcgacacccttgtgcctcgccaagctaatattctggtttggttggttagatgatttggctacaacggcatctgcaactatctcttgtcagggtttttagggacgtaagtgctagcgctcgagtgtgaatcattattgttgccatttatgttatagttcgtaaaccaaacagttctctaattgtaaacgtggataccgcttcttttggctggtagcccacgacttattgtttgccccttctggacaaataccttagcaatacaatgctgaaacgaatcaatgc

SEQ ID NO: 90568 - DNA, 655 bp, Zea Mays
tgatgcaacactgtgctgtccattccatacatgtcatacatacaccataattaggaccacaatttcttgttcctagtattataaatttctccagagctatggtatattcatcaaaagagaaaagaaaacaacaatcacaacccagcaggaaaagtatcgccttttccaactgctcatttatgcaatcagatatgaaacacaacatagttatgctactgataacctgcgaatagagactataccaccactgttcggtaatgtctgcagtaggcgcgcttggttttggcattctaccgaacacatggcacccgaccccaaccaaaagaacaaacaaaccaaccagctatcatacgcaacgcccaaggatccaaccgctcaaggcagtacgaaccatttcggcatgagaccgcgtggggcgacgagagcgccctctgccgcaacaggacggcaaccgccattatatctgatcttccttttcccctatctctatgtcactcacttccctccgcgacgcagcacggttcagactcgacgacagcgaggcgcccgggcaaacgacagggttcggccgttcggggagacggaaacagccgaacaatgcgcctgtggggtaggtgtggaggacgcagcggccgatactttcgccggaaagcga

SEQ ID NO: 90569 - DNA, 2025 bp, Zea Mays
gctctcgtcttcctctttcttctagtttcgtctagtcttcaaggaagaccggaaccgaggcgccctggccgagaactggagccaccggacgcacggctgctgccgaaatccacgggagaatgtttggaatccttcaactcggcagctaacgcagtttatttcttctttgctgtttgcctgacacgaggggtcgctttgctgttgttgccgggtgtgtgcaggacgatggtcgaggccgaggctggtagggcggcgatccggcgcgccctgcggtcgctgaaacggaggcatctcgccgaggaaggggcgcacagcccggccatcgaggcgctaacccgtcccttcgccgcccacgctttggagtggaaggagaaggctgagaagcatgagttagagctgcagcaatgctacaaggcgcaatcccggctctctgagcagcttgtgactgagatagaagaaggtaaagtatcaaaagcactgctcaaagagaaggaagcgatggttacaagtttgcaggctgaacttgagaagacaagcgaagagaatgtacaactaaagcagtcgcttgacgaaaaaataaaagccttagatcttctcattcaagagcatcagacagtgaaatccgagcttgaacaagcattgacgaaactaaaagctgcagaggatgagaaccaaaatctggttgatcgatggatgctagagaagatgaaggatgccgagaggctcaatgaggccaatgcgatgtatgaggagatggttctaaagctaaagacagctggagttggtggtatacaacttaatgcacagcaagaaactgatggcatcatacggcgttctgaagctggttacatagaaacgccaatcccatcaacatgcacaataactatccgtgctcatgatggtgggtgtggagctttgatgtttgagcataactcagacaagctaattagtgggggtcaggatcaaactgttaagatatggggtgcatctactggcgctttgaccgccaccctacatggttgcttggggtctgttaatgatcttgccgtgaccaacgataacaagtttgtgatcgctgcctgtagctccaacaagctgtttgtgtgggaagtcagtgggggacgtcctcgccacacgctgactggtcacacgaaaaatgtttcttctgttgatgcaagctgggtgaagagctttgttgttgctagttcatccagtgaccgtactatcaaggtttgggatctacagacaggtttctgcaagagcaccataatgtccgcgagcaaccccaactcgctagctttcatcgatggtgacaccatctgttcgggtcacagggatgggaatcttcggctgtgggatatccgcagtgggaaatgcaccacacagatagctgctcatctggatgtcacctcggtctgcgtgtcacggagcaggaatttcgttcttacaagtgggagagataacgtgcacaacctttttgatgttagaacgctggagatttgtggaacattcagggccatgggcaacagagtggtgagcagctggggcaaaccttctattagccccgacgaaaactgcatcgctgctggttcttctgatggatctgtttacatatggtcgaggctgaagaatggaacgccgaccatcctagagggtcattcttcacccgtcctggcaagtgcatggtgcggactaggagctcttgctacctccgacaggaaccatatctatatctggtcttgagagatgtacaatttcatcaaggcgtggaaactggagagtttcgcatcatcagtatgctaatatgtgttctcttcatttcttgatgacactagttttcatgtgattatgtgaacggattaactggttctgatttctgaacgttgtaaatatcagaagtgattgttcatcgtagtgatgactacttcagttcgccatatgtgtgatggtttgcaaggttttgatggctgaaatttcttggtattgacggctcaggtttgctgttattttaagggtaaacttttg

SEQ ID NO: 90570 - DNA, 1925 bp, Zea Mays
gctctcgtcttcctctttcttctagtttcgtctagtcttcaaggaagaccggaaccgaggcgccctggccgagaactggagccaccggacgcacggctgctgccgaaatccacgggagaatgacgatggtcgaggccgaggctggtagggcggcgatccggcgcgccctgcggtcgctgaaacggaggcatctcgccgaggaaggggcgcacagcccggccatcgaggcgctaacccgtcccttcgccgcccacgctttggagtggaaggagaaggctgagaagcatgagttagagctgcagcaatgctacaaggcgcaatcccggctctctgagcagcttgtgactgagatagaagaaggtaaagtatcaaaagcactgctcaaagagaaggaagcgatggttacaagtttgcaggctgaacttgagaagacaagcgaagagaatgtacaactaaagcagtcgcttgacgaaaaaataaaagccttagatcttctcattcaagagcatcagacagtgaaatccgagcttgaacaagcattgacgaaactaaaagctgcagaggatgagaaccaaaatctggttgatcgatggatgctagagaagatgaaggatgccgagaggctcaatgaggccaatgcgatgtatgaggagatggttctaaagctaaagacagctggagttggtggtatacaacttaatgcacagcaagaaactgatggcatcatacggcgttctgaagctggttacatagaaacgccaatcccatcaacatgcacaataactatccgtgctcatgatggtgggtgtggagctttgatgtttgagcataactcagacaagctaattagtgggggtcaggatcaaactgttaagatatggggtgcatctactggcgctttgaccgccaccctacatggttgcttggggtctgttaatgatcttgccgtgaccaacgataacaagtttgtgatcgctgcctgtagctccaacaagctgtttgtgtgggaagtcagtgggggacgtcctcgccacacgctgactggtcacacgaaaaatgtttcttctgttgatgcaagctgggtgaagagctttgttgttgctagttcatccagtgaccgtactatcaaggtttgggatctacagacaggtttctgcaagagcaccataatgtccgcgagcaaccccaactcgctagctttcatcgatggtgacaccatctgttcgggtcacagggatgggaatcttcggctgtgggatatccgcagtgggaaatgcaccacacagatagctgctcatctggatgtcacctcggtctgcgtgtcacggagcaggaatttcgttcttacaagtgggagagataacgtgcacaacctttttgatgttagaacgctggagatttgtggaacattcagggccatgggcaacagagtggtgagcagctggggcaaaccttctattagccccgacgaaaactgcatcgctgctggttcttctgatggatctgtttacatatggtcgaggctgaagaatggaacgccgaccatcctagagggtcattcttcacccgtcctggcaagtgcatggtgcggactaggagctcttgctacctccgacaggaaccatatctatatctggtcttgagagatgtacaatttcatcaaggcgtggaaactggagagtttcgcatcatcagtatgctaatatgtgttctcttcatttcttgatgacactagttttcatgtgattatgtgaacggattaactggttctgatttctgaacgttgtaaatatcagaagtgattgttcatcgtagtgatgactacttcagttcgccatatgtgtgatggtttgcaaggttttgatggctgaaatttcttggtattgacggctcaggtttgctgttattttaagggtaaacttttg

SEQ ID NO: 90571 - DNA, 484 bp, Zea Mays
atggaaacggagcaaccgatacaataccgcaacatgaaggctgaacttaatactagcactcagcaaactcggtttctttacctactaggcatcagtctacgcgcacgctcgtggatggatgtggatgggatcattcacaggctgaagaagccccggtcgccgcgcgccggcagattgatctgccgcggcgagctgtcctccctctccgccgcggcgtcggcgccggcgccggcgccgccctccacgacgcggtcgccgaagatgtgcaccgtcctcgggttaggcccgcgggagatgacgcacgtgtagtcctccgacgacggctctatctcccacgggtcggccggcgccggcgccgtggcctcgcggccgcggaggggcagccacgagctcctgttcttgacgccgaactcgacgcggcggtccagggagcacgatctggccagcgagcacgacgacggcgtcgccgcgaggacgatccgct

SEQ ID NO: 90572 - DNA, 261 bp, Zea Mays
atggactggtcgacgatctcgcggactgaccggggacgtggctcctctgcgcgccggcgctgctgttcatcgacctcgatctccgccgcaggatcatctcctggatcttcgatctcaagaacacgcctacagcaccggaccaagaatccaagaccctacacgacgctctttcggttaggtggagtagatcgaagcagcagctatcaggagacaccgagtgccatgagagatgcaacgccgtggacggggcggagagcttaa

SEQ ID NO: 90573 - DNA, 411 bp, Zea Mays
atggaggtggagccggaggcggtcagctgcgagtgctgcggcctggaggaggagtgcacgggcgactacatcgtcggcgtgcgggcctacttcgggggcaggtggctgtgcggcctgtgctcggaggccgccaagtacgaggccggcaaggagtgcgcccgccgcggagccggagcctcagccgcggcggcgccgcccgacgtggaggaggccgtgcgcgcgcacatggccatctgccgcacgctcaagggcggcggcgggcccgcgggccgcgtcgccgagggcatgcgccagatgctgcgcaccgcgtcctggaagaaggccgcgtcgtcgtctgccgcgtcgccgaggggacccgcggccggtcaccaccgacggcaccggctggccgaaatccggtgacccctcgtt

SEQ ID NO: 90574 - DNA, 1546 bp, Zea Mays
accagccagccagccaaccagccgacagccgacgagcacgagcccatggacgagacgagggagatggatccgggtgcgggggtgcccaggagggcggccaccgccagcgggacgcccaccgcgtcgcgcggctccagcacggcctcctcgtgctcctccaactccaacccgtccgcccgcgcctccgcgtccacgtccacggggacgccgccgtccgccgtcgtgctaccgtgggcggcgcgcgcggccgcgggggacagctgctactaccctgggtgccgcaaggacgccaactgctcgtgcgagatgtgcctcgcgagcatcgacgccacgcgggacctggtgcgcgcgcccgaggcgcgcaggttcttcgggggcgccagggaccggaggctcttcttccgtgaccgcgccgcgggggcggggtcggggtcgggtgaggggtccgacgccaccgagccgccgtggacgccgccgatgcggtccacggccaagtccaggcgggcgccagggcgggaggcggccgggggccccgaggcgagggccggcgttcggtcgcacgactggctgctgtacgccgccactgttattgggttcctgctcctcatgtgggtcgacacggggctcgtcccggaggccgcggccagggggtttgggcccaagctatcgccggaagccgtggcgcgggtgggggccgatgcgcgcctcgcgcctggcggcctggaacataagctgcacgtcatggagcgcagggtccgccagcttgttggcggtgaggggatcgccaattgcagctcgcgagactccgtctggcgattccaccagaatgatcagcaggtgttccactggcgctgcacggtgtacaaatccgtggcggaggaggtcagcgtctgggggagcccactccgcacctccggtctcctcccaagagcactctcggcgcggcacctcaccctcctctccggcgagatcaccgagtggtccgacggaaaggtgtggccgacggtgcgggcgagcaacgggagctcctgggcccaccggaggcagagcgcggcggcggtgcggctggaaccggagacgtgggtagtcgagtaccagaggagcgcgcttttcgagggcacacggctgctaccggccgccgcggagctgatcgcgtccaggtgctcgacgatggcgcggcgagcgcggcgcaggatgcagggtaggcggcgacttttcggtggtgcacaggcgaatccaacctgaatcgggctcgccggaggtcaaattgctctcttgccgaagaacaaaatgctctctaggatggcttatatctagctctagtagtagtagattcatctcatttcgtgtgagattcatcatgacttctgtgttcttttgcatggtctataagtgtaggccgacgctggaaccattttaatcttgttattatgatcacaaacaaaatcttgcgactatcatatgttcttctgccacaaacaaaatcttgcacctatcatctgcgctgaaccagtgcctatcgtctgtcagagcgaatacccttccc

SEQ ID NO: 90575 - DNA, 1099 bp, Zea Mays
tttttttttgcattatgtaccattatgtttacatttcatatttaaaattatagagacaataatagtgacgaatataacgtgcagaatgaataaaaagtgagaaaagattacccacaaatctgacatcaaaacgcaacagtctgtgcttggacacgtcgtggcaagttactaacaccaatggcgtgccgccacgttgacaggtagcccgcgtggacaagccacggtagcaccaccgtatcacctttcggctttggcgcaccacaccaggcaccaccatcgtacatcaacggcttggataagccaacgtggcaacacaataaaacaacaaaagagttctcgtgattagagaagctcagagaacaaaagaacagctcgccgcggctccgaatggcaacttccccgaaccccgcgacgattcaccgagccggcgcccagtgacccttccagaagcttccagaaggtcaccgccatggccgcgcccttcttttccactcctttccagccctacgtctaccagagccagcaaggatctgtgacggcgtttcagatatccggtggagatgtgcaggtcctgcaggtgatgctgaagtctcaggagaagctgactgcaaaaccaggtgcaatgtgctacatgtctgggaatatgcagatggacaacaattacttgcctgaaaatgatggaggcgtgtggcagtggatttttgggaaacgtgtaagcagcaccattttctttaattctggatctgatgatggatatgtcgggattgctgcaccatttcctgggaggatactgccggttagtattttgcttctcttctacgttttaatttttctcttagcatcgtcttttcttgtgcaatgtggaataaatcactgttgtcgctactcctcttatgctaacaaattcaagatttgttagctacttagctgtttatttttggattgctctacatctttgaaattgtgatctgctatatgtcaggtgagggtttgttaatccttttgttgaactttaaccatccacttgaatacattttttttcattagattagacaccaacctaacctaactgtatgatcgtatacatatcattacaaag

SEQ ID NO: 90576 - DNA, 1494 bp, Zea Mays
cttggacacgtcgtggcaagttactaacaccaatggcgtgccgccacgttgacaggtagcccgcgtggacaagccacggtagcaccaccgtatcacctttcggctttggcgcaccacaccaggcaccaccatcgtacatcaacggcttggataagccaacgtggcaacacaataaaacaacaaaagagttctcgtgattagagaagctcagagaacaaaagaacagctcgccgcggctccgaatggcaacttccccgaaccccgcgacgattcaccgagccggcgcccagtgacccttccagaagcttccagaaggtcaccgccatggccgcgcccttcttttccactcctttccagccctacgtctaccagagccagcaaggatctgtgacggcgtttcagatatccggtggagatgtgcaggtcctgcaggtgcaatgtgctacatgtctgggaatatgcagatggacaacaattacttgcctgaaaatgatggaggcgtgtggcagtggatttttgggaaacgtgtaagcagcaccattttctttaattctggatctgatgatggatatgtcgggattgctgcaccatttcctgggaggatactgccggtagatctaacaaactttagtggagaacttctttgccaggcagatgcttttctatgttcggtcaatgatgtctccgtctctagtacagttgagccaaggccacggaatattgagattggtgcagagatgatccttaaacaaaaacttaggggccaggggatggcttttcttgttggtggtggatcagtcatgcagaaaatccttgctcctagagaggtgataactgttgatgctgcttgtattgtggctatgtcggccaccattaacttccagttgaagagccctaaccagcttagaagagcagtttttgggggtgataaccagctaacagcatctctcacgggaccaggtgttgttttcattcaaagtctgccattccatcgactctcacagagaatcgccagcagtagatcagtggcaggcccaagcttgagggacaacccaaagttcttcatccagattgtcatgttcttcttcctggcctatgttatgattgtatcatccataattctgacagatgtttaggcgattcagtgagcttttggtgtattcctagacaagttatcgaagagttaaagctacctccccaatgttaatgtagatgtaagagaacgaatttcacaagctgttgttagaaaccttagcagaaggttcttcatttttttttctctaacagtttggagggggcggggcgggtttcttggttagcgtgtaaagaggaagacagcaaaatcaagttgcacagcgtatggtgaatatacagtaattttcctcctaaactggtgcgatgcattttgaataattgaatcagtgatttggcttgagcagttgtgtgctcttttcatcagtcatgtactcatgttgtgtgacgtatcatctcgag

SEQ ID NO: 90577 - DNA, 1570 bp, Zea Mays
cttggacacgtcgtggcaagttactaacaccaatggcgtgccgccacgttgacaggtagcccgcgtggacaagccacggtagcaccaccgtatcacctttcggctttggcgcaccacaccaggcaccaccatcgtacatcaacggcttggataagccaacgtggcaacacaataaaacaacaaaagagttctcgtgattagagaagctcagagaacaaaagaacagctcgccgcggctccgaatggcaacttccccgaaccccgcgacgattcaccgagccggcgcccagtgacccttccagaagcttccagaaggtcaccgccatggccgcgcccttcttttccactcctttccagccctacgtctaccagagccagcaaggatctgtgacggcgtttcagatatccggtggagatgtgcaggtcctgcaggtgatgctgaagtctcaggagaagctgactgcaaaaccaggtgcaatgtgctacatgtctgggaatatgcagatggacaacaattacttgcctgaaaatgatggaggcgtgtggcagtggatttttgggaaacgtgtaagcagcaccattttctttaattctggatctgatgatggatatgtcgggattgctgcaccatttcctgggaggatactgccggtagatctaacaaactttagtggagaacttctttgccaggcagatgcttttctatgttcggtcaatgatgtctccgtctctagtacagttgagccaaggccacggaatattgagattggtgcagagatgatccttaaacaaaaacttaggggccaggggatggcttttcttgttggtggtggatcagtcatgcagaaaatccttgctcctagagaggtgataactgttgatgctgcttgtattgtggctatgtcggccaccattaacttccagttgaagagccctaaccagcttagaagagcagtttttgggggtgataaccagctaacagcatctctcacgggaccaggtgttgttttcattcaaagtctgccattccatcgactctcacagagaatcgccagcagtagatcagtggcaggcccaagcttgagggacaacccaaagttcttcatccagattgtcatgttcttcttcctggcctatgttatgattgtatcatccataattctgacagatgtttaggcgattcagtgagcttttggtgtattcctagacaagttatcgaagagttaaagctacctccccaatgttaatgtagatgtaagagaacgaatttcacaagctgttgttagaaaccttagcagaaggttcttcatttttttttctctaacagtttggagggggcggggcgggtttcttggttagcgtgtaaagaggaagacagcaaaatcaagttgcacagcgtatggtgaatatacagtaattttcctcctaaactggtgcgatgcattttgaataattgaatcagtgatttggcttgagcagttgtgtgctcttttcatcagtcatgtactcatgttgtgtgacgtatcatctcgagatttgccattcgccaatgcaggctatatgcttgcct

SEQ ID NO: 90578 - DNA, 1567 bp, Zea Mays
cttggacacgtcgtggcaagttactaacaccaatggcgtgccgccacgttgacaggtagcccgcgtggacaagccacggtagcaccaccgtatcacctttcggctttggcgcaccacaccaggcaccaccatcgtacatcaacggcttggataagccaacgtggcaacacaataaaacaacaaaagagttctcgtgattagagaagctcagagaacaaaagaacagctcgccgcggctccgaatggcaacttccccgaaccccgcgacgattcaccgagccggcgcccagtgacccttccagaagcttccagaaggtcaccgccatggccgcgcccttcttttccactcctttccagccctacgtctaccagagccagcaaggatctgtgacggcgtttcagatatccggtggagatgtgcaggtcctgcaggtgatgctgaagtctcaggagaagctgactgcaaaaccaggtgcaatgtgctacatgtctgggaatatgcagatggacaacaattacttgcctgaaaatgatggaggcgtgtggcagtggatttttgggaaacgtgtaagcagcaccattttctttaattctggatctgatgatggatatgtcgggattgctgcaccatttcctgggaggatactgccggtagatctaacaaactttagtggagaacttctttgccaggcagatgcttttctatgttcggtcaatgatgtctccgtctctagtacagttgagccaaggccacggaatattgagattggtgcagagatgatccttaaacaaaaacttaggggccaggggatggcttttcttgttggtggtggatcagtcatgcagaaaatccttgctcctagagaggtgataactgttgatgctgcttgtattgtggctatgtcggccaccattaacttccagttgaagagccctaaccagcttagaagagcagtttttgggggtgataaccagctaacagcatctctcacgggaccaggtgttgttttcattcaaagtctgccattccatcgactctcacagagaatcgccagtagatcagtggcaggcccaagcttgagggacaacccaaagttcttcatccagattgtcatgttcttcttcctggcctatgttatgattgtatcatccataattctgacagatgtttaggcgattcagtgagcttttggtgtattcctagacaagttatcgaagagttaaagctacctccccaatgttaatgtagatgtaagagaacgaatttcacaagctgttgttagaaaccttagcagaaggttcttcatttttttttctctaacagtttggagggggcggggcgggtttcttggttagcgtgtaaagaggaagacagcaaaatcaagttgcacagcgtatggtgaatatacagtaattttcctcctaaactggtgcgatgcattttgaataattgaatcagtgatttggcttgagcagttgtgtgctcttttcatcagtcatgtactcatgttgtgtgacgtatcatctcgagatttgccattcgccaatgcaggctatatgcttgcct

SEQ ID NO: 90579 - DNA, 1293 bp, Zea Mays
aaaagagttctcgtgattagagaagctcagagaacaaaagaacagctcgccgcggctccgaatggcaacttccccgaaccccgcgacgattcaccgagccggcgcccagtgacccttccagaagcttccagaagagccagcaaggatctgtgacggcgtttcagatatccggtggagatgtgcaggtcctgcaggtgatgctgaagtctcaggagaagctgactgcaaaaccaggtgcaatgtgctacatgtctgggaatatgcagatggacaacaattacttgcctgaaaatgatggaggcgtgtggcagtggatttttgggaaacgtgtaagcagcaccattttctttaattctggatctgatgatggatatgtcgggattgctgcaccatttcctgggaggatactgccggtagatctaacaaactttagtggagaacttctttgccaggcagatgcttttctatgttcggtcaatgatgtctccgtctctagtacagttgagccaaggccacggaatattgagattggtgcagagatgatccttaaacaaaaacttaggggccaggggatggcttttcttgttggtggtggatcagtcatgcagaaaatccttgctcctagagaggtgataactgttgatgctgcttgtattgtggctatgtcggccaccattaacttccagttgaagagccctaaccagcttagaagagcagtttttgggggtgataaccagctaacagcatctctcacgggaccaggtgttgttttcattcaaagtctgccattccatcgactctcacagagaatcgccagtagatcagtggcaggcccaagcttgagggacaacccaaagttcttcatccagattgtcatgttcttcttcctggcctatgttatgattgtatcatccataattctgacagatgtttaggcgattcagtgagcttttggtgtattcctagacaagttatcgaagagttaaagctacctccccaatgttaatgtagatgtaagagaacgaatttcacaagctgttgttagaaaccttagcagaaggttcttcatttttttttctctaacagtttggagggggcggggcgggtttcttggttagcgtgtaaagaggaagacagcaaaatcaagttgcacagcgtatggtgaatatacagtaattttcctcctaaactggtgcgatgcattttgaataattgaatcagtgatttggcttgagcagttgtgtgctcttttcatcagtcatgtactcatgttgtgtgacgtatcatctcgag

SEQ ID NO: 90580 - DNA, 108 bp, Zea Mays
ctttgtttgtctccccgtatctttttcctccaagctacacgcagcgcgggccgcggcgactcaacgagcagagctgaaaattggaggggaaatgtcagtccacacgag

SEQ ID NO: 90581 - DNA, 4536 bp, Zea Mays
atgcccgacgccactgggcttgaaatgggccttaaaggctctaagggagctccagtaccaggaatggaagggggtgtggcaaaggctcctgcttccttggaggaaaacaagtcctctgctgatgaggatcttggcagagggcctgccttgactgggaagaaaaggagggactgcaggggttctgcggatgaggacagaaacgtgacaaaaagggtgttgagatccgacgcaatgaagctgcgggctgaggctgaggcagcttgtgtggtagctgtggaggttagtaaaactgacagtttggagaggaaacgctgtgaggctattgtggaggctgagccttgtaatagcaggctgctgatggaagttacttgcaatggtgaggaagccaacgaattggttaacttggactccagtgacgtctcggaagagtcagctaggtgttctgagaataatatgggaatgcctagtgttcctgcaacagattcttctcaagataacggtttaggcacgcaaagtagccttgcagaatcagatattaagacaatgaagtcagatgagaagatgtctactgcaactctttcagagtgcaatgactccagagctggaatgaacagtttgagtgttgatgaggctcaagatgacaaagtgagacatgggccttgtcagggtgaggtcatagactcagcaatggctaatgatgctggcacaagtacaaatttaatcaaaatcagccctaccagcggatcagaatctgttaagcaggagaataatgtggttggtaccgaggaagtgatactccacagtagcgatacgaaagttgagaagcattctcacattgacgatgtttgtacagaaactgagatttctttgactgataatggaatatgcgcagtagataaccacaccgatctaactgggtgcactaagcaggaggagaggggcagccccatgaatgaagccaatgatgtttcatcacatgacattgtatttacaaggagaggtagaaaatcatgtgaggcaaagcagaggacatgtgaagaggaggcacggtttgagaagcgaatcacaaggtcagctacagttaggcagagagaagtttctgcgagctcacacaaaacttccacaaatgaggctgcactagaaggcagagggaggaagggagatattgttgctcactatacaaggaaagtaagcagtgcagtatctccaaaaggtcaccatgctgagctgggagactgtaataccagtatgccgaaacaaacagtgaaagaaacggtggttgatcgaagagactcaggtgtccctgagaatgataatcatgcgaatgtcacagagaataaggagtcagaaaatggaaaggagatcaatttgaagacccaaccacctgtgggaattgttaagaaaacatccggaggaggtgtttctgcggtggatcagaatgtctctggttcagccatcactgagagaaatgatacggagcatactgattctgatggagttaaatcggaaaataaaactcctgtgcagaaaccactactgtctgttggtgcgaagattgttgccagcaagaagaggatattggaagcagagcttgataaatccactgggagatcaccaattgctttgccatccatgaaaaagacaagaaatatgtcttctggtcctgagataaaccaacctgataagtctactggagataaacttattgagaataattgtgattcgggcaataagcgtgttctgagggaacggcagcatcgcaatcaaacaaatttgtcaaccagatattctaatcactctaatcaaaatgatatggagcagacacaggatcaatctgatgatgatgagatcagcagcgatacttcctacaggagaactcgtagcagacgtcgttgtggtgctgcccgtcttgctgtgccaaaacaagaggactctagtgattctgaagattttattgctgtgaaaaagaatcggcggaaacggaagaaatctgtgcataaacaaagggctggatctaagttgaagcatacttctggtccttccaaagcaggtcgtttgggtagacctcctctgatcaaatctgaatctagttccttatctctgcagccaggaaaaggggaaaggaaggtgcctgaaggtacaggaactcttcgcgaagaaaagcaaaaaataagtgatcagataaaggccatgcttctagatgctggttggacgattgatttaagacccaggaatggtagaaactacatggattctgtgtatatacctcctagtggcaaagggtcttactggtcagtcacaaaagcatattatgcgtttcgtgctggtatggaatctgagcagcaggaaagtcctaaagaccagtctttgtcaacaaaatctgttggtagccccgacaaaaggcaggtctctagttcttcaggttatactttaacagaggatatccttagcaaattaaaaagagttgttgtaaacaaacgaacaaccaaattagagattcaaaggttgagacagaaaaggttcaaaaaggaaaagaagaagaagaacgtttcaaattcaagaagcctgcatctaggcaatgaaaggaaaaagagaggtggctgtgctctactcgctcgtggatcgaacaaggagtctggcagcagcactgatggttttgttccatatgaatggaaacgtacgatcttttcctggctgattgatctggatgttctatcagtcaacactaagctgaaatgtatggatggaagccactcaaaggttttactagagggttttgccactagggatgggattaactgcagctgctgtaacgaggtctattcagtgcttgaatttgtgactcatgctggttctgaagtaaataagccatacagaaacatacttgtggatgggctagacattgaccttttgcactgtctcattaatgcatggaatatgcagtctgatgttgaaaggcaagatttctttccagttagcattgagggcgatgaccccaatgatgacacatgtggtatttgcggcgatggaggcaatttgatctgctgtgatggatgcccctcgacatttcacatgagttgtctaggactggaggtacttccctctgattattggtgttgtgcaaactgctcatgtaaattttgccacgaacattctagtgatggtgctgaagacactgctgatgttgattattcattgcatacttgttcccagtgcgaagagcagtatcatgaagcctgctctcctgagactgattccataactaacctttccagtcagacaggcaatttattctgccaacaaagctgcagactgctgttcgaggaattgcagaatcttcttgcagtcaagaaggatcttgaaccagaatattcatgcagagttgttcaacgcatccatgaagatgtaccagaagaagtccttgctttggacaaaagagttgagtgtaactccaggattgccgttgcactttcattaatggatgagtgcttccttccgattattgaccagagaactggcatcaacttgatacgaaatgttgtgtatagctgtggatcaaattttgcccggttggatttccgtggattctatatatttattttagaacgtggagatgaaataatagctgcagcatctgtccgaatacatggaaccaagttagctgagatgccgttcattggtacccggaatatgtataggcgacaagggatgtgccgccgacttgtagatggaatcgaaatgatcctcagctctctcaatgttgagaagttgatcattcctgctatcacagaacttgtggacacctggacatcgaaatttggatttagtccacttgaagattctgagaagcaagaagtgaaatctatcagcatgttagtttttcctggtacaggtctcctccaaaagccattgctaaaggccttgcctaatgaagaacaatgttcccaaggagacaaaactgagaaagcatctgatgtagtcaatgaagattctccttgctctgatgcaagtgctgatcccctaggtttgggggtcaaagagcatgaggacagcagcaaagacgctgatggcacttgtaacggtgacgtttcacaggaatgtccccattcttgatgggaagatttggttgcagttttctaggccccaagctttacatggactaagcctccatttgtttttgcacctcgagtttttgatccagcagttagcatgacatccatccgttggtgagaaagaggcttgccgggtttttttttggcatattatattagttgatggggcaccccttttagttttactcagaaattgatgattgacgcgtcggcctgggaaaagaatcaacccgtgcagttctgaaaagcgtttactccatccagccagctaacttaatgtgcagctgaaaaatcggcatgtagaagaatgtggaggataacgtcccttcttttgtttctcgtcgttaacttgagactccgagggcgaatgcagccattgaatcgtcgtaaatgttacagcagttgttgttttgttaataggttt

SEQ ID NO: 90582 - DNA, 4728 bp, Zea Mays
atgcccgacgccactgggcttgaaatgggccttaaaggctctaagggagctccagtaccaggaatggaagggggtgtggcaaaggctcctgcttccttggaggaaaacaagtcctctgctgatgaggatcttggcagagggcctgccttgactgggaagaaaaggagggactgcaggggttctgcggatgaggacagaaacgtgacaaaaagggtgttgagatccgacgcaatgaagctgcgggctgaggctgaggcagcttgtgtggtagctgtggaggttagtaaaactgacagtttggagaggaaacgctgtgaggctattgtggaggctgagccttgtaatagcaggctgctgatggaagttacttgcaatggtgaggaagccaacgaattggttaacttggactccagtgacgtctcggaagagtcagctaggtgttctgagaataatatgggaatgcctagtgttcctgcaacagattcttctcaagataacggtttaggcacgcaaagtagccttgcagaatcagatattaagacaatgaagtcagatgagaagatgtctactgcaactctttcagagtgcaatgactccagagctggaatgaacagtttgagtgttgatgaggctcaagatgacaaagtgagacatgggccttgtcagggtgaggtcatagactcagcaatggctaatgatgctggcacaagtacaaatttaatcaaaatcagccctaccagcggatcagaatctgttaagcaggagaataatgtggttggtaccgaggaagtgatactccacagtagcgatacgaaagttgagaagcattctcacattgacgatgtttgtacagaaactgagatttctttgactgataatggaatatgcgcagtagataaccacaccgatctaactgggtgcactaagcaggaggagaggggcagccccatgaatgaagccaatgatgtttcatcacatgacattgtatttacaaggagaggtagaaaatcatgtgaggcaaagcagaggacatgtgaagaggaggcacggtttgagaagcgaatcacaaggtcagctacagttaggcagagagaagtttctgcgagctcacacaaaacttccacaaatgaggctgcactagaaggcagagggaggaagggagatattgttgctcactatacaaggaaagtaagcagtgcagtatctccaaaaggtcaccatgctgagctgggagactgtaataccagtatgccgaaacaaacagtgaaagaaacggtggttgatcgaagagactcaggtgtccctgagaatgataatcatgcgaatgtcacagagaataaggagtcagaaaatggaaaggagatcaatttgaagacccaaccacctgtgggaattgttaagaaaacatccggaggaggtgtttctgcggtggatcagaatgtctctggttcagccatcactgagagaaatgatacggagcatactgattctgatggagttaaatcggaaaataaaactcctgtgcagaaaccactactgtctgttggtgcgaagattgttgccagcaagaagaggatattggaagcagagcttgataaatccactgggagatcaccaattgctttgccatccatgaaaaagacaagaaatatgtcttctggtcctgagataaaccaacctgataagtctactggagataaacttattgagaataattgtgattcgggcaataagcgtgttctgagggaacggcagcatcgcaatcaaacaaatttgtcaaccagatattctaatcactctaatcaaaatgatatggagcagacacaggatcaatctgatgatgatgagatcagcagcgatacttcctacaggagaactcgtagcagacgtcgttgtggtgctgcccgtcttgctgtgccaaaacaagaggactctagtgattctgaagattttattgctgtgaaaaagaatcggcggaaacggaagaaatctgtgcataaacaaagggctggatctaagttgaagcatacttctggtccttccaaagcaggtcgtttgggtagacctcctctgatcaaatctgaatctagttccttatctctgcagccaggaaaaggggaaaggaaggtgcctgaaggtacaggaactcttcgcgaagaaaagcaaaaaataagtgatcagataaaggccatgcttctagatgctggttggacgattgatttaagacccaggaatggtagaaactacatggattctgtgtatatacctcctagtggcaaagggtcttactggtcagtcacaaaagcatattatgcgtttcgtgctggtatggaatctgagcagcaggaaagtcctaaagaccagtctttgtcaacaaaatctgttggtagccccgacaaaaggcaggtctctagttcttcaggttatactttaacagaggatatccttagcaaattaaaaagagttgttgtaaacaaacgaacaaccaaattagagattcaaaggttgagacagaaaaggttcaaaaaggaaaagaagaagaagaacgtttcaaattcaagaagcctgcatctaggcaatgaaaggaaaaagagaggtggctgtgctctactcgctcgtggatcgaacaaggagtctggcagcagcactgatggttttgttccatatgaatggaaacgtacgatcttttcctggctgattgatctggatgttctatcagtcaacactaagctgaaatgtatggatggaagccactcaaaggttttactagagggttttgccactagggatgggattaactgcagctgctgtaacgaggtctattcagtgcttgaatttgtgactcatgctggttctgaagtaaataagccatacagaaacatacttgtggatgggctagacattgaccttttgcactgtctcattaatgcatggaatatgcagtctgatgttgaaaggcaagatttctttccagttagcattgagggcgatgaccccaatgatgacacatgtggtatttgcggcgatggaggcaatttgatctgctgtgatggatgcccctcgacatttcacatgagttgtctaggactggaggtacttccctctgattattggtgttgtgcaaactgctcatgtaaattttgccacgaacattctagtgatggtgctgaagacactgctgatgttgattattcattgcatacttgttcccagtgcgaagagcagtgtatgtgatccttgtttatactttttctgtagttctttcaaattttgaagtctgatactttttattccccattttcattattatctcacagtgtattattttgatgcccaatcatatctttgagtattgcatacgatgatgtctgcagatcatgaagcctgctctcctgagactgattccataactaacctttccagtcagacaggcaatttattctgccaacaaagctgcagactgctgttcgaggaattgcagaatcttcttgcagtcaagaaggatcttgaaccagaatattcatgcagagttgttcaacgcatccatgaagatgtaccagaagaagtccttgctttggacaaaagagttgagtgtaactccaggattgccgttgcactttcattaatggatgagtgcttccttccgattattgaccagagaactggcatcaacttgatacgaaatgttgtgtatagctgtggatcaaattttgcccggttggatttccgtggattctatatatttattttagaacgtggagatgaaataatagctgcagcatctgtccgaatacatggaaccaagttagctgagatgccgttcattggtacccggaatatgtataggcgacaagggatgtgccgccgacttgtagatggaatcgaaatgatcctcagctctctcaatgttgagaagttgatcattcctgctatcacagaacttgtggacacctggacatcgaaatttggatttagtccacttgaagattctgagaagcaagaagtgaaatctatcagcatgttagtttttcctggtacaggtctcctccaaaagccattgctaaaggccttgcctaatgaagaacaatgttcccaaggagacaaaactgagaaagcatctgatgtagtcaatgaagattctccttgctctgatgcaagtgctgatcccctaggtttgggggtcaaagagcatgaggacagcagcaaagacgctgatggcacttgtaacggtgacgtttcacaggaatgtccccattcttgatgggaagatttggttgcagttttctaggccccaagctttacatggactaagcctccatttgtttttgcacctcgagtttttgatccagcagttagcatgacatccatccgttgttttactcagaaattgatgattgacgcgtcggcctgggaaaagaatcaacccgtgcagttctgaaaagcgtttactccatccagccagctaacttaatgtgcagctgaaaaatcggcatgtagaagaatgtggaggataacgtcccttcttttgtttctcgtcgttaacttgagactccgagggcgaatgcagccattgaatcgtcgtaaatgttacagcagttgttgttttgttaataggtttttttatgtcttcgctagcgcattcctggaatctaatctcattcctgtaagataattcacatgtctgtaagatcagctaatgtatgcgcaaagctagaaatcatccgcctc

SEQ ID NO: 90583 - DNA, 2979 bp, Zea Mays
ccctctacctcttcgctggggggctcctttccctcccctcgcgtggcgtctgtggcggctatcctcgcctcgtctcccctcccccctccctagggtttatcctccaccaccacctacccaccgcctctccccaccacagataagaattatcttatcgattttttacaccggccttgaatccgatccaggagcagtcgtttggtgttggtagctgcggcagacgtctgtcctagatcgaattgactcgcgagaagaagccatgtcgacagttgctcctgcccctagcgctgctgaccagaccaccaatcttctgcagaagctgtctctggagggcaaggatggctccgacactgccaagaagccttctgggatgccatatggaggatctacccacgctggagatgcacagagcgctgcttcacaggtggacaggtcgataacacctctactacaggaggccatggatcctaatttcttctaccagcccagtgcatatgcctctccagcctattacttccctagtggttatgatggctcagccaatgaatgggactcaaggtatgctggtcatgaaggaatggagatgccccctcagaccgtgtatggagacatgtaccttggatatggctatgctccatacggcccatatccttcgggttctccagtaccaactgttgggcatgatggccagtcatatggttctcagcaatatcaatacccgtctcaatattatcagcaaccaacaccaacaaacgcaaaacatggtctaaatggtgccagttctcaacctgaaccgccctctgttgccagtcagcaggcacgagttttggtagatgcaacaaaagcaactccaaacgtgagggctaatggtatgacaattgctcacaacagttcgctgccacgtaagcaaacccacctgaatgtatcggtagcaaacagtggtttatatggaagaggacctatgcaaggcagtggaccttctgcaagcaattatggtcacaatggtgttcgttctccagctcaatggtacgatggtccagtttactcgaatgggcatcagataccaactgctagttccacatcttaccgttccaattcgtcttctatgagaagtcagagccagcatccaacaacaaacctcatgggtatacatgcacagatgccttcgtctggaatgggtctgacctcacctagatatccttctaggatgtacccagacaacagattatatgggcagtatggtcagtatgggaacacactgaagggtggccttggttttggatcaaacatgtatagctcgagaaacaatgggaggtggggagttgtggataccaaatacaagcccagagggcgtgcaccttttggttttagtggtgagaaccaagatggctttaccgagctgaacagaggaccaaggtctggtggtttcaagcaccaaaaacaattcggtcctactgtaactattgctgtgaagggccaagccctcccttcagtggggaaacagaacagtactcttccagacaaaggccaatttaaccaggaagggtttcctttaacctacaaggatgcaaagttctttgttatcaaatcatatagtgaggatgatgtgcacaagagtataaaatacaatgtgtgggctagcactcctaatggaaataagaagctggatgctgggtaccgagaggctcaggagaaatccagtgactgcccggtgttcttgtttttctctgtgaacacaagtggtcagtttgttggtgttgctgaaatggttggtcctgtcgactttgataagactgtggagtattggcaacaagacaagtggaatggttgttttccactcaagtggcacatagtcaaggatgtgcccaacaacactttgaagcatattacactggataacaatgataataagcctgtgacaaacagccgtgacacacaagaggttaagctggaacaaggtcttgaaatgttgaagattttcaaagaacatgttactaaaacgtcaattttggatgattttggtttttacgagaatcgccaaaagttgatgcaggaaaagagggcgaatcagcaactgcttcaaggccagggggccgatgtttctcaagagaaagacaaggatgcgactaatggcaaaccagggtcacagaaacaggcaacgagcaaggaaggcactcctgctgaggtggcggcggatgcctccaaaccagtagctgaaagtggaatatcaaatgacaactaagcatcatgcatactggtcggcaccataccggtgcaaatgctgcaggttttgcggtatctgcaaatcaaaacctattgattctgcctgaattctggacttctttcggtactggagttcgtgagatggggctcatcatgggagtgaatcagattttacttattgtcgctttgctagttgtgtgactggtttttggtgtcttggaacccgtgttaggcttcttacatacccctgtgacgacaccgagtttgttgtaacccttgtttttttttgcctttttgttttagttctatcattgttaacgaagcagcctatttcctatactttgaacaacattaaggtagttttttttgcatgttgcggtactgtggagagtaataagacaaaaagactctaggtttaaaccattttatccccgtattctgtattgattatatcttgttttttatccattttgtgttcatcagcggcctcagtttctgtgcttgtaggagaatgtcttaaaattggcgcgtaactatcttttaatggagtactaggtgtgtacctgtgcgttgcaacggaaacatataataccattgataacttatgtacgttggggataataagcatcgacacatctgaccggatgttttcttccttggggatctggagaaaagcctgctcgaaagccaaacaaaagtctgctcggaagtcaaacatgttaagacctgatcaggtgcttcccttatgtctctgat

SEQ ID NO: 90584 - DNA, 168 bp, Zea Mays
cgaaaaggttgttacactcacaactttagaagtgttcgtatgttgttgtattcagcaggatggagcttccactgaagttgttattatcagcctgactataagtacacacatacatagatatgagaaatatttgtcatagataacaaaaaagtctaatctatacagaat

SEQ ID NO: 90585 - DNA, 1625 bp, Zea Mays
agaatattatccttgcacataacattgtttatcgcgacctcggcgggtagattcgccgccgcccacagcccacccggtcgctggggcctccccgtcgtcgccggtcgctcgacattccccgtgccggtccgcgcttccgatccccagcgcttccccgagtcgctgcgtgctcgcgtttccccgagccaagggtcgaaggtcgattcagcgccgtcctcaccggagcttgtccacgcccccttgtcccttcgcgcccgctccttcgccggagaccaccacgctgtccttgagcccgtcttctcgggaaacggcgcttcacgccctgcaagcgggacgaccccgtcccgcatctacggtgaatattcgcctgtgggacgagcccatcccacttctcctcacatccaaccaaacgccagcgagaagaggaccgtcccgtcccgttacggttcgtctctccacccctagttccccaaaccggggcatcgattcatcgaaccctgcccggagacgcgagcaatcatagacaggcatggcgatcgctcggaccggcgtgtacgtcgacgactacctcgagtactcgagcaccctggccggcgacctgcaaaggattctctccaccatgcgcgagctcgatgacagggcacatggcattatgggtcagaccaaagaacagataaagtatattctaggagtatcatcccatgggtatgacaggtcaaacatggatgatgatgagtcggagaggatgaagaaggacattgaagctagccaggacaatgctctgaatctttgcaccgagaaagtcttactggcacgccaagcttatgacctgatagagagccatataaaacgccttgatgaagacttgggccagtttgcagaagatttaaagcatgaagggaagatacctccagatgaacctacagtccttcctccagttccggtggttagcagggatgagaaaaggaggtttggttttagtacacctcaagcatcaaaaaaatttagagagagggaatgggacagggaaaggggtatggactttgatttaatgccccctccaggtagcagcaagaaagcaggtacatctatggatgtggatcaaacaattgatccaaatgaaccgacatactgtatatgccaccagatttcatatggtgacatgattgcttgtgacaatgagaattgtggaggaggtgaatggtttcattacacgtgtgtgggtcttacaccagaaacgagattcaaggggaaatggttttgcccaacgtgcaggaatcttcagtgagaggttctccaagtagaaccaaggccattggcgagaatggaacctgctggaatgatatacaaggggtaatcgttttgctcgacatgcatgatcttcatccggaggttgttctgtgtgaagaacttgtcgcaatttggtcgctcggagttgttgcttaaagcgagtttaacattagagactcgcccttcatctcttggctgtctgtctatacttggcactgattttccttgcttggaataacttatggtcagattcacaaacgtttgtagttgtgatatgaaacgctgtgtgttcttttcgacatcgagcaatttagcattatcacgtttggaacatc

SEQ ID NO: 90586 - DNA, 1621 bp, Zea Mays
agaatattatccttgcacataacattgtttatcgcgacctcggcgggtagattcgccgccgcccacagcccacccggtcgctggggcctccccgtcgtcgccggtcgctcgacattccccgtgccggtccgcgcttccgatccccagcgcttccccgagtcgctgcgtgctcgcgtttccccgagccaagggtcgaaggtcgattcagcgccgtcctcaccggagcttgtccacgcccccttgtcccttcgcgcccgctccttcgccggagaccaccacgctgtccttgagcccgtcttctcgggaaacggcgcttcacgccctgcaagcgggacgaccccgtcccgcatctacggtgaatattcgcctgtgggacgagcccatcccacttctcctcacatccaaccaaacgccagcgagaagaggaccgtcccgtcccgttacggttcgtctctccacccctagttccccaaaccggggcatcgattcatcgaaccctgcccggagacgcgagcaatcatagacaggcatggcgatcgctcggaccggcgtgtacgtcgacgactacctcgagtactcgagcaccctggccggcgacctgcaaaggattctctccaccatgcgcgagctcgatgacagggcacatggcattatgggtcagaccaaagaacagataaagtatattctaggagtatcatcccatgggtatgacaggtcaaacatggatgatgatgagtcggagaggatgaagaaggacattgaagctagccaggacaatgctctgaatctttgcaccgagaaagtcttactggcacgccaagcttatgacctgatagagagccatataaaacgccttgatgaagacttgggccagtttgcagaagatttaaagcatgaagggaagatacctccagatgaacctacagtccttcctccagttccggtggttagcagggatgagaaaaggaggtttggttttagtacacctcaagcatcaaaaaaatttagagagagggaatgggacagggaaaggggtatggactttgatttaatgccccctccaggtagcagcaagaaagcaggtacatctatggatgtggatcaaacaattgatccaaatgaaccgacatactgtatatgccaccagatttcatatggtgacatgattgcttgtgacaatgagaattgtggaggaggtgaatggtttcattacacgtgtgtgggtcttacaccagaaacgagattcaaggggaaatggttttgcccaacgtgcaggaatcttcagtgagaggttctccaaaaccaaggccattggcgagaatggaacctgctggaatgatatacaaggggtaatcgttttgctcgacatgcatgatcttcatccggaggttgttctgtgtgaagaacttgtcgcaatttggtcgctcggagttgttgcttaaagcgagtttaacattagagactcgcccttcatctcttggctgtctgtctatacttggcactgattttccttgcttggaataacttatggtcagattcacaaacgtttgtagttgtgatatgaaacgctgtgtgttcttttcgacatcgagcaatttagcattatcacgtttggaacatc

SEQ ID NO: 90587 - DNA, 614 bp, Zea Mays
gaacctacagtccttcctccagttccggtggttagcagggatgagaaaaggaggtagcagcaagaaagcaggtacatctatggatgtggatcaaacaattgatccaaatgaaccgacatactgtatatgccaccagatttcatatggtgacatgattgcttgtgacaatgagaattgtggaggaggtgaatggtttcattacacgtgtgtgggtcttacaccagaaacgagattcaaggggaaatggttttgcccaacgtgcaggaatcttcagtgagaggttctccaagtagaaccaaggccattggcgagaatggaacctgctggaatgatatacaaggggtaatcgttttgctcgacatgcatgatcttcatccggaggttgttctgtgtgaagaacttgtcgcaatttggtcgctcggagttgttgcttaaagcgagtttaacattagagactcgcccttcatctcttggctgtctgtctatacttggcactgattttccttgcttggaataacttatggtcagattcacaaacgtttgtagttgtgatatgaaacgctgtgtgttcttttcgacatcgagcaatttagcattatcacgtttggaacatc

SEQ ID NO: 90588 - DNA, 219 bp, Zea Mays
atgatgaattccaaactgttcaatgatctatctaagatgaaggctgctacaaagcattatttgcaagattatgaggagaggaaggcacgtgtggtcgtggaagaggtttgtgatgaattagcgaaggagatcacagaatacaaagctaaggtggaggctctgagaagtgaatcgatgaagatcaaagatgaattggaggaagaaatgatgatgctttag

SEQ ID NO: 90589 - DNA, 2606 bp, Zea Mays
tttgagtttgtgacttattttagaaacttgagctcacaaactttctcttatttggtctatgtatggtggaattatgtcattttataatctctgttcgttcagtcaatcgttgtgaactctcttttaatcgctcacttcattggtcgtgttgtaccaaaacatattggatgaagtaaataataacatcagttagccaaatcaaaaaaaaatattatacagagagcggagataatcaataaaaaatattgaatttttttatgaatagtttatatgtgtattgttgtaagccttcgcaacgcatgagcaaaccactagtatatatttatagagcaatagagatatatcgattaattataattaatattgaaatataacacttcttacgacaccaactaaactttaatcagaccagccgtgcacggagcaccaccccactagaaaaagcagcccaaaaccctagctcccgcgcgccaccgtggagatccggggctcccgcgcgatggcggaggcggcagcggcgggatcgttgtcgaggcggcggatgcaggacgaggagggggcagcggcgggatcgttgtcgaggcggcggatgcaggacgaggagggggcagcggcgattgaggctgatgcggggcacaggaggaggagcgaagcggaggaggcggaggatgatgtcgagagctccgactacatgtcggaggacgagggcaccgaggactaccgccgtggcggataccacgccgtccgcgtcggagactccttcaagcagggcacctacgtcgtgcagtctaagctcggatggggccacttctccaccgtctggcttgcctgggacgaagcccattccagatatgtggcgctgaaggtgcagaagagcgcccaacactacacagaagcagccatggatgagatcaagatcttgaaggaaattgctgatggtgatcctgacgactcaaaatgtgttgttaagcttcttgaccacttcaagcactcgggtcctaatggtaaccatgtgtgcatggtttttgaatttctcggcgataacctgttgaccctgataaagtacacagactaccgtggaattcccctttcaatggttaaggagatatgtcgccatgtgctcattggccttgactacctccaccgcacactttctattattcacactgacctcaagccagagaatatattgcttgtgtctaccattgaccccttgaaggaccctcggagatcaggagtacccctgcttctgccttcagagagcacagacgagccacctccaaaggtgcctgcacaatcaggaaatggtggcctcaccaagaatcagaagaagaagatccggaggaaagccaaacgtgcagctgctgcaacttcagatggaactagtgctgtggcatctgctgacacagatgggtcagatgaccaaggagatatgggtacaacaaatgagggtagttctggaactatgaagcgggcaacacgagatagacggggtagcaaaggggccaagaagatggcaatggaggctgatctaaaatgcaagctggtggactttgggaatgcatgttggacatacaagcagttcacaaatgacattcaaacaaggcagtacagatgtcctgaggttatacttggttccaagtattctacatctgctgacatgtggtcctttgcatgcatttgctttgagcttaccactggggatgtgctatttgatccacacagtggcgataattttgacagagatgaggatcaccttgcgctgatgatggaactgctaggaatgatgcctcgaaagatcgcgttgggtggtcggtactcacgtgatttcttcaatcggtacggggatttgaggcacatccgacggttgcggttctggcctctcaacaaggtgctgatggagaagtatgagttcactgaaataaatgctcatgggatggcggattttcttgttccaatacttgattttgttcctgagaagcgccctacagctgctcagttgcttcagcatccatggcttgatgttggtcccctccgacagcaacctaaaacactgcctgactcagcacagaattcagatgacggtgtttcagagaagcagaagaaagagagtgaagaaagagaggcaatggctctagagttggggaacattgccatagatggtgctggtggcaaatgaccctcaagcaaaaaagcgcaactaaaacaactgctacctcttctaagtgaggtgcatttggtttcacgagttaagctgtaaaagttgttttcagtcgagaattgtcgcacgagtgggtaacagatgtttttttaggtttaaaatatgttaggatagctgccgagggaaaagtagagtaggccaattatttgctttatggggttggatggacaagactagattcgtttgggttgcagtaaccctagttttttttcctttgagaacatattcttttgtacaattagaatctggaaaaaaattaaggttagcagtgaacaactgggaacccgaaatgtgttgcgttaaggcctgcctaaaattttctgctggaatcatctggaaacatgatgtgccaccttttatcactgtaaagtttttactgtacatt

SEQ ID NO: 90590 - DNA, 2142 bp, Zea Mays
gcacggagcaccaccccactagaaaaagcagcccaaaaccctagctcccgcgcgccaccgtggagatccggggctcccgcgcgatggcggaggcggcagcggcgggatcgttgtcgaggcggcggatgcaggacgaggagggggcagcggcgattgaggctgatgcggggcacaggaggaggagcgaagcggaggaggcggaggatgatgtcgagagctccgactacatgtcggaggacgagggcaccgaggactaccgccgtggcggataccacgccgtccgcgtcggagactccttcaagcagggcacctacgtcgtgcagtctaagctcggatggggccacttctccaccgtctggcttgcctgggacgaagcccattccagatatgtggcgctgaaggtgcagaagagcgcccaacactacacagaagcagccatggatgagatcaagatcttgaaggaaattgctgatggtgatcctgacgactcaaaatgtgttgttaagcttcttgaccacttcaagcactcgggtcctaatggtaaccatgtgtgcatggtttttgaatttctcggcgataacctgttgaccctgataaagtacacagactaccgtggaattcccctttcaatggttaaggagatatgtcgccatgtgctcattggccttgactacctccaccgcacactttctattattcacactgacctcaagccagagaatatattgcttgtgtctaccattgaccccttgaaggaccctcggagatcaggagtacccctgcttctgccttcagagagcacagacgagccacctccaaaggtgcctgcacaatcaggaaatggtggcctcaccaagaatcagaagaagaagatccggaggaaagccaaacgtgcagctgctgcaacttcagatggaactagtgctgtggcatctgctgacacagatgggtcagatgaccaaggagatatgggtacaacaaatgagggtagttctggaactatgaagcgggcaacacgagatagacggggtagcaaaggggccaagaagatggcaatggaggctgatctaaaatgcaagctggtggactttgggaatgcatgttggacatacaagcagttcacaaatgacattcaaacaaggcagtacagatgtcctgaggttatacttggttccaagtattctacatctgctgacatgtggtcctttgcatgcatttgctttgagcttaccactggggatgtgctatttgatccacacagtggcgataattttgacagagatgaggatcaccttgcgctgatgatggaactgctaggaatgatgcctcgaaagatcgcgttgggtggtcggtactcacgtgatttcttcaatcggtacggggatttgaggcacatccgacggttgcggttctggcctctcaacaaggtgctgatggagaagtatgagttcactgaaataaatgctcatgggatggcggattttcttgttccaatacttgattttgttcctgagaagcgccctacagctgctcagttgcttcagcatccatggcttgatgttggtcccctccgacagcaacctaaaacactgcctgactcagcacagaattcagatgacggtgtttcagagaagcagaagaaagagagtgaagaaagagaggcaatggctctagagttggggaacattgccatagatggtgctggtggcaaatgaccctcaagcaaaaaagcgcaactaaaacaactgctacctcttctaagtgaggtgcatttggtttcacgagttaagctgtaaaagttgttttcagtcgagaattgtcgcacgagtgggtaacagatgtttttttaggtttaaaatatgttaggatagctgccgagggaaaagtagagtaggccaattatttgctttatggggttggatggacaagactagattcgtttgggttgcagtaaccctagttttttttcctttgagaacatattcttttgtacaattagaatctggaaaaaaattaaggttagcagtgaacaactgggaacccgaaatgtgttgcgttaaggcctgcctaaaattttctgctggaatcatctggaaacatgatgtgccaccttttatcactgtaaagtttttactgtacatt

SEQ ID NO: 90591 - DNA, 800 bp, Zea Mays
acaccacccaaaagggaagtcaagtcaaccaaaggccgcacggggtacagccctacccctcccgtcacaaatcccagcggcgccaagcccaagtcagcgcgcgcggcgatggagcggcgggggcaacagcctggcgacgcgcagcagccaggcaaggacggcgccggcgactcccctcctccaccgccaccgttcctggaggtgagctgcaggagctccggcaaggttcggcggttcgcggcggggacgacggcccgctacgcgctgcacgccatcaaccgcaagctcggccccggggccccgccggcgctgcacgtcgaggccgtcagggacggcgaggagcccgtcagcttcggccccagcgcggccctcgccgactacggccgcggctggaggctgcagaccgtcaccgcgcacgacgcgcccgggatccatcacgcgccgcacgcggacacggcgaaacagggcgacaggcagccgtccaaagaagatgccgatggtacggagacagtcaggggcacttgcatctacgtcgccaagatcgtgctcgcgtttgcgtttctcttcctgctaggtggatcgctcacgtacctgctggaggtgatccctgacatgctgcagactgcatcggcgcttgagttaactgattttttctacgacccgctgactgaaaatgtatgacgcatgtatcatttcattagcattaattatatggcattgtgtggggctttgtaacttggtcaattttaattcgtgtcgctgcagctcatgataattcatcgtctttgttattaggtcta

SEQ ID NO: 90592 - DNA, 378 bp, Zea Mays
gccttcacgccggaggtctgcgtcagccaccccagcgcctcgatggcggcgtcccgctccgcgagctgcttgttccgcttcggcttccccacgaactgcatccccttgaactccaccacggccctgaactcgttcgtcttgaggtgcttcgtcttgtacctgggcggggtgtggccggcccgcatcagcagcgtctgcagcaggctcttggggttcatcccgtcctttatgaggttgctcttgccgtcgtcctcggggctccggagccgggcccggctcgtctcgcggccgaacacgaacctcccttcgcacaggtcgccggcggcgagctcttgtacggcgaataggatgtacttgccttccttgtggatgtcgaag

SEQ ID NO: 90593 - DNA, 2676 bp, Zea Mays
agccttccttgcccccggtgagctgccactgccagcttccccgtgcgcgagctgtgctgctgctcggcggcgcgcccactccccggccgctccctcgtcactccgcctgccggtaatcggtctctatatatataggtggttcgaggtgatcggcagaaccacacaggcaaagatggcgagcgtgcacaaggccaccacccttgttctcatgttctgcctgctagcgctggggagagcggagtacctcaagtacaaggacccaaagcagcccgtcgctgttcgcatcaaggacctgctgggtcggatgactctcgccgaaaagatcggccagatgacgcagatcgagagggaaaacgccacggccgacgcgctggccaaatacttcataggtagcgtgctgagcggcggaggcagcgtgcctgctcctcaggcgtctgctcaggcttgggccgccatggtgaccgagatgcagaagggcgctctttctacgcgtctgggtataccgatcatctacggtatcgatgcagtgcatgggcacaacaacgtctacaaagctactattttccctcacaacgtcgggcttggagctaccagggaccctgacctcgttaagagaattggagaagcaactgctcttgaagttagagctactggaattccttacgcctttgctccctgtatagcggtctgtagagatccaagatggggacgttgctatgagagctacagtgaggatccaaaggttgtccagtcactgacttcactcatctctggcctgcaaggtgacgctcctgcggattccgcgggaaggccgtatgttgggggaagtaagaaggttgctgcatgcgcgaagcactatgtcggtgatggtggaacgcataacggaatcaacgagaacaacacgatcatcgacacacacgggctgctgagcatccatatgcctccttactacaactctatcatccgaggtgtctccacggtcatggtctcctactccagctggaacggagtgaagatgcacgcgaaccatttcctggtcacggattttctcaagaacaagctcaagtttaggggttttgtgatttccgactgggagggcattgatcggatcactactcctcctcacgccaactactcttactcaattgaggctggtgttggtgctggaattgacatgatcatggttccattcagatacacagaattcatcgacgatctgacgacacaagttcagaacaaggtcatccccatgagcagaatcgacgacgccgtctacaggatccttcgtgtcaagttcaccatgggtctgttcgagaacccttaccccgactctagcctcgccggcgagctcgggaagcaagaacaccgggaactggcgcgcgaagccgtcaggaaatcccttgttctcctgaagaacggcaagtcctcctacgctccgttgctgcccctcccgaagaaggccggcaagatcctggtcgccggcagccacgccaacgacctgggcaaccagtgcggggggtggacgatcacgtggcaaggaagcagcggcaacaccactgccggcacgacgatcctctccgggatcgaggccaccgtggaccccagcacgcaggtggtgtactcggagagcccggacagcggcgtgctggccgacaagtacgactacgcgatcgtggtggtcggtgagccgccatacgcggagacgttcggcgacaacctgaacctgacgatcccggcgcccgggccgagcgtgatccagtcggtgtgcggggccgccaagtgcgtagtggtcctcatctccggcaggccgctggtggtggagccgtacctgggcgacatggacgcgctggtggcggcgtggctgccggggtcggaggggcagggcgtggcggacgtgctgttcggcgactacgggttcacggggaagctgccgcggacgtggttcaagtcggtggaccagctgcccatgaacgtgggcgacgcgcactacgacccgctcttcccgttcggcttcggactcaccaccaagggcacgaagtgagtgagtgtgaggcgctctgatgggatgtggcctgtgagtgagctgtgtattcgtgggcgggcgtgaggctctttggctttcgaattggttgggggtgacgggcggcgagtcgtgtacgccgcacacattgcgcagcgtacgttgggttgggatgtttgcgtctgggtaataacagtgatgcattcttgagatggttgctgttagtgtgggttgtttggaatgaacaataagatcaggcgcgttacattggcacgctactacctctcctgctgagaccagagatggcgatgtgcatttacccatcggcccgtgctattccataccctatttagccgtgtactgataaaagaatttgtcaaaccgtgtacgggtaaaatcatgtatccatgtactgctcactataccgtatacgccagctacttctactaccaatattactcgtatctagtgtaaaaatgattagggtgctaatattagggcctgtttggcatggctccagagcaaaactccaaggaggagctggccagagcatgccaaacaccctaactccagagttgtaaactctatgaagtttttggagctgcagtacaattttttggagtacctcttttgctgctctgaaaactccaaaaaag

SEQ ID NO: 90594 - DNA, 2669 bp, Zea Mays
agccttccttgcccccggtgagctgccactgccagcttccccgtgcgcgagctgtgctgctgctcggcggcgcgcccactccccggccgctccctcgtcactccgcctgccggtctctatatatataggtggttcgaggtgatcggcagaaccacacaggcaaagatggcgagcgtgcacaaggccaccacccttgttctcatgttctgcctgctagcgctggggagagcggagtacctcaagtacaaggacccaaagcagcccgtcgctgttcgcatcaaggacctgctgggtcggatgactctcgccgaaaagatcggccagatgacgcagatcgagagggaaaacgccacggccgacgcgctggccaaatacttcataggtagcgtgctgagcggcggaggcagcgtgcctgctcctcaggcgtctgctcaggcttgggccgccatggtgaccgagatgcagaagggcgctctttctacgcgtctgggtataccgatcatctacggtatcgatgcagtgcatgggcacaacaacgtctacaaagctactattttccctcacaacgtcgggcttggagctaccagggaccctgacctcgttaagagaattggagaagcaactgctcttgaagttagagctactggaattccttacgcctttgctccctgtatagcggtctgtagagatccaagatggggacgttgctatgagagctacagtgaggatccaaaggttgtccagtcactgacttcactcatctctggcctgcaaggtgacgctcctgcggattccgcgggaaggccgtatgttgggggaagtaagaaggttgctgcatgcgcgaagcactatgtcggtgatggtggaacgcataacggaatcaacgagaacaacacgatcatcgacacacacgggctgctgagcatccatatgcctccttactacaactctatcatccgaggtgtctccacggtcatggtctcctactccagctggaacggagtgaagatgcacgcgaaccatttcctggtcacggattttctcaagaacaagctcaagtttaggggttttgtgatttccgactgggagggcattgatcggatcactactcctcctcacgccaactactcttactcaattgaggctggtgttggtgctggaattgacatgatcatggttccattcagatacacagaattcatcgacgatctgacgacacaagttcagaacaaggtcatccccatgagcagaatcgacgacgccgtctacaggatccttcgtgtcaagttcaccatgggtctgttcgagaacccttaccccgactctagcctcgccggcgagctcgggaagcaagaacaccgggaactggcgcgcgaagccgtcaggaaatcccttgttctcctgaagaacggcaagtcctcctacgctccgttgctgcccctcccgaagaaggccggcaagatcctggtcgccggcagccacgccaacgacctgggcaaccagtgcggggggtggacgatcacgtggcaaggaagcagcggcaacaccactgccggcacgacgatcctctccgggatcgaggccaccgtggaccccagcacgcaggtggtgtactcggagagcccggacagcggcgtgctggccgacaagtacgactacgcgatcgtggtggtcggtgagccgccatacgcggagacgttcggcgacaacctgaacctgacgatcccggcgcccgggccgagcgtgatccagtcggtgtgcggggccgccaagtgcgtagtggtcctcatctccggcaggccgctggtggtggagccgtacctgggcgacatggacgcgctggtggcggcgtggctgccggggtcggaggggcagggcgtggcggacgtgctgttcggcgactacgggttcacggggaagctgccgcggacgtggttcaagtcggtggaccagctgcccatgaacgtgggcgacgcgcactacgacccgctcttcccgttcggcttcggactcaccaccaagggcacgaagtgagtgagtgtgaggcgctctgatgggatgtggcctgtgagtgagctgtgtattcgtgggcgggcgtgaggctctttggctttcgaattggttgggggtgacgggcggcgagtcgtgtacgccgcacacattgcgcagcgtacgttgggttgggatgtttgcgtctgggtaataacagtgatgcattcttgagatggttgctgttagtgtgggttgtttggaatgaacaataagatcaggcgcgttacattggcacgctactacctctcctgctgagaccagagatggcgatgtgcatttacccatcggcccgtgctattccataccctatttagccgtgtactgataaaagaatttgtcaaaccgtgtacgggtaaaatcatgtatccatgtactgctcactataccgtatacgccagctacttctactaccaatattactcgtatctagtgtaaaaatgattagggtgctaatattagggcctgtttggcatggctccagagcaaaactccaaggaggagctggccagagcatgccaaacaccctaactccagagttgtaaactctatgaagtttttggagctgcagtacaattttttggagtacctcttttgctgctctgaaaactccaaaaaag

SEQ ID NO: 90595 - DNA, 2959 bp, Zea Mays
cacagcgacattccaactgatagatgccgctcactcttggtgctgcgttccacgagcctgagagtagtggtggaggtcgagagacggccgtctgctcagccgtcgttggcgacggctcgtttcagggtcccccacctactaatcacgaccctggcctctctcgattctgttgccttgccattgccatcatccaccctcatgcatgtcggtgcaacgcccatgggcatccactggtgcttataagaggaataatccggcttccgttcctctgaggacatcctcggccttccagggcagcaaccacgaaagccttctgcgcggggtgctttcctcgcagcaaatattcctgccttttgcattccggctttgcaagttccttgctttgggcatatatattgtgaggtctctatatatataggtggttcgaggtgatcggcagaaccacacaggcaaagatggcgagcgtgcacaaggccaccacccttgttctcatgttctgcctgctagcgctggggagagcggagtacctcaagtacaaggacccaaagcagcccgtcgctgttcgcatcaaggacctgctgggtcggatgactctcgccgaaaagatcggccagatgacgcagatcgagagggaaaacgccacggccgacgcgctggccaaatacttcataggtagcgtgctgagcggcggaggcagcgtgcctgctcctcaggcgtctgctcaggcttgggccgccatggtgaccgagatgcagaagggcgctctttctacgcgtctgggtataccgatcatctacggtatcgatgcagtgcatgggcacaacaacgtctacaaagctactattttccctcacaacgtcgggcttggagctaccagggaccctgacctcgttaagagaattggagaagcaactgctcttgaagttagagctactggaattccttacgcctttgctccctgtatagcggtctgtagagatccaagatggggacgttgctatgagagctacagtgaggatccaaaggttgtccagtcactgacttcactcatctctggcctgcaaggtgacgctcctgcggattccgcgggaaggccgtatgttgggggaagtaagaaggttgctgcatgcgcgaagcactatgtcggtgatggtggaacgcataacggaatcaacgagaacaacacgatcatcgacacacacgggctgctgagcatccatatgcctccttactacaactctatcatccgaggtgtctccacggtcatggtctcctactccagctggaacggagtgaagatgcacgcgaaccatttcctggtcacggattttctcaagaacaagctcaagtttaggggttttgtgatttccgactgggagggcattgatcggatcactactcctcctcacgccaactactcttactcaattgaggctggtgttggtgctggaattgacatgatcatggttccattcagatacacagaattcatcgacgatctgacgacacaagttcagaacaaggtcatccccatgagcagaatcgacgacgccgtctacaggatccttcgtgtcaagttcaccatgggtctgttcgagaacccttaccccgactctagcctcgccggcgagctcgggaagcaagaacaccgggaactggcgcgcgaagccgtcaggaaatcccttgttctcctgaagaacggcaagtcctcctacgctccgttgctgcccctcccgaagaaggccggcaagatcctggtcgccggcagccacgccaacgacctgggcaaccagtgcggggggtggacgatcacgtggcaaggaagcagcggcaacaccactgccggcacgacgatcctctccgggatcgaggccaccgtggaccccagcacgcaggtggtgtactcggagagcccggacagcggcgtgctggccgacaagtacgactacgcgatcgtggtggtcggtgagccgccatacgcggagacgttcggcgacaacctgaacctgacgatcccggcgcccgggccgagcgtgatccagtcggtgtgcggggccgccaagtgcgtagtggtcctcatctccggcaggccgctggtggtggagccgtacctgggcgacatggacgcgctggtggcggcgtggctgccggggtcggaggggcagggcgtggcggacgtgctgttcggcgactacgggttcacggggaagctgccgcggacgtggttcaagtcggtggaccagctgcccatgaacgtgggcgacgcgcactacgacccgctcttcccgttcggcttcggactcaccaccaagggcacgaagtgagtgagtgtgaggcgctctgatgggatgtggcctgtgagtgagctgtgtattcgtgggcgggcgtgaggctctttggctttcgaattggttgggggtgacgggcggcgagtcgtgtacgccgcacacattgcgcagcgtacgttgggttgggatgtttgcgtctgggtaataacagtgatgcattcttgagatggttgctgttagtgtgggttgtttggaatgaacaataagatcaggcgcgttacattggcacgctactacctctcctgctgagaccagagatggcgatgtgcatttacccatcggcccgtgctattccataccctatttagccgtgtactgataaaagaatttgtcaaaccgtgtacgggtaaaatcatgtatccatgtactgctcactataccgtatacgccagctacttctactaccaatattactcgtatctagtgtaaaaatgattagggtgctaatattagggcctgtttggcatggctccagagcaaaactccaaggaggagctggccagagcatgccaaacaccctaactccagagttgtaaactctatgaagtttttggagctgcagtacaattttttggagtacctcttttgctgctctgaaaactccaaaaaag

SEQ ID NO: 90596 - DNA, 2686 bp, Zea Mays
agcttgtagcttctgaaagggtcttgtgcccatgatgtggtggtggtgcctacagtattctgttcatactgcattttatgctccatcgcccccctttttgtttgttccggctcagttcagtcaatcgaggtctctatatatataggtggttcgaggtgatcggcagaaccacacaggcaaagatggcgagcgtgcacaaggccaccacccttgttctcatgttctgcctgctagcgctggggagagcggagtacctcaagtacaaggacccaaagcagcccgtcgctgttcgcatcaaggacctgctgggtcggatgactctcgccgaaaagatcggccagatgacgcagatcgagagggaaaacgccacggccgacgcgctggccaaatacttcataggtagcgtgctgagcggcggaggcagcgtgcctgctcctcaggcgtctgctcaggcttgggccgccatggtgaccgagatgcagaagggcgctctttctacgcgtctgggtataccgatcatctacggtatcgatgcagtgcatgggcacaacaacgtctacaaagctactattttccctcacaacgtcgggcttggagctaccagggaccctgacctcgttaagagaattggagaagcaactgctcttgaagttagagctactggaattccttacgcctttgctccctgtatagcggtctgtagagatccaagatggggacgttgctatgagagctacagtgaggatccaaaggttgtccagtcactgacttcactcatctctggcctgcaaggtgacgctcctgcggattccgcgggaaggccgtatgttgggggaagtaagaaggttgctgcatgcgcgaagcactatgtcggtgatggtggaacgcataacggaatcaacgagaacaacacgatcatcgacacacacgggctgctgagcatccatatgcctccttactacaactctatcatccgaggtgtctccacggtcatggtctcctactccagctggaacggagtgaagatgcacgcgaaccatttcctggtcacggattttctcaagaacaagctcaagtttaggggttttgtgatttccgactgggagggcattgatcggatcactactcctcctcacgccaactactcttactcaattgaggctggtgttggtgctggaattgacatgatcatggttccattcagatacacagaattcatcgacgatctgacgacacaagttcagaacaaggtcatccccatgagcagaatcgacgacgccgtctacaggatccttcgtgtcaagttcaccatgggtctgttcgagaacccttaccccgactctagcctcgccggcgagctcgggaagcaagaacaccgggaactggcgcgcgaagccgtcaggaaatcccttgttctcctgaagaacggcaagtcctcctacgctccgttgctgcccctcccgaagaaggccggcaagatcctggtcgccggcagccacgccaacgacctgggcaaccagtgcggggggtggacgatcacgtggcaaggaagcagcggcaacaccactgccggcacgacgatcctctccgggatcgaggccaccgtggaccccagcacgcaggtggtgtactcggagagcccggacagcggcgtgctggccgacaagtacgactacgcgatcgtggtggtcggtgagccgccatacgcggagacgttcggcgacaacctgaacctgacgatcccggcgcccgggccgagcgtgatccagtcggtgtgcggggccgccaagtgcgtagtggtcctcatctccggcaggccgctggtggtggagccgtacctgggcgacatggacgcgctggtggcggcgtggctgccggggtcggaggggcagggcgtggcggacgtgctgttcggcgactacgggttcacggggaagctgccgcggacgtggttcaagtcggtggaccagctgcccatgaacgtgggcgacgcgcactacgacccgctcttcccgttcggcttcggactcaccaccaagggcacgaagtgagtgagtgtgaggcgctctgatgggatgtggcctgtgagtgagctgtgtattcgtgggcgggcgtgaggctctttggctttcgaattggttgggggtgacgggcggcgagtcgtgtacgccgcacacattgcgcagcgtacgttgggttgggatgtttgcgtctgggtaataacagtgatgcattcttgagatggttgctgttagtgtgggttgtttggaatgaacaataagatcaggcgcgttacattggcacgctactacctctcctgctgagaccagagatggcgatgtgcatttacccatcggcccgtgctattccataccctatttagccgtgtactgataaaagaatttgtcaaaccgtgtacgggtaaaatcatgtatccatgtactgctcactataccgtatacgccagctacttctactaccaatattactcgtatctagtgtaaaaatgattagggtgctaatattagggcctgtttggcatggctccagagcaaaactccaaggaggagctggccagagcatgccaaacaccctaactccagagttgtaaactctatgaagtttttggagctgcagtacaattttttggagtacctcttttgctgctctgaaaactccaaaaaag

SEQ ID NO: 90597 - DNA, 232 bp, Zea Mays
tcattccgtgttctgccattcccattcccccctccccacaaaactcattcccatttccggctgccactgtctttctcattcccccctcctcacaaatctcattctcattcccacgtgcatcccacgcctagctaaattcccattcccggctgccactgtctttctcattcctcctcctcacaaatctcattctcattcccacgcgcatcccacgcctagctaaaattaaatt

SEQ ID NO: 90598 - DNA, 3067 bp, Zea Mays
acccagctggacccacaattcatagatgcagtggtaattataacaagaagacaacattgtagatgcagtggtaattataacaagaagacaacattgtgagtggcaaaaatccaattatctcctgatttgcctccattaaacataaatcgtggccgctcgagctgagcccactccccattcctcgatccattcgtctccagatatatagaatcatcgcgtctgccaccacctgcagcaccctctccgcttcgtcctccctcggtcctccgtccgccattgttgcttggctggcttgctcaagccagccgtgtgcgtcgtcgttgcttctgcgggcactcctccaccacttggtagaatataactcgctgacaagttggaggccggaggcggagagggagcaggagcaggataagcttggcagtcggcacagcagatagggggcctgattagattaaatcattagagatagataaaagacacagacatggagtgtgctgccgtcaagtaacagcgcagctggctggttgcgggcccctgctgatctggggctgggtggcagtggcacggacgccgtcgctttcgatcgacgggggagctgagggctccctgctctgccgccgcaccggcaccgcgcccacttcaccgcatcgccgcgcggattcgtccttacttgatcgagacgactagctatactataacctagcctgccccctcacccggtcacccctcctcgctcgaccgactctataaatatatataaacctcgcgcagcgcagggcatgcatcgtctagagccatcctcttcttctagtctttttcctcgtgctgctgggcagggctgttgctccatccttccacgaccgccggcgctgctctgcctcgccgtaccgctttcccgacgaggcgtcccggccggatcgctcacatgggggtggcgatgaaactgcttgcacgagtccggaggcgcctcgtcccgctcctccgccgccaccggatggcgctgctcacggcgccggcggtggccgcgctgctgctgctcttctggtccgcggcgtacggcggtgacgcccaggaccagggcgtgccgccgccgtaccaggacgccagcaaggacgtggaggtccgcgtcagggacctgctcgcgcggatgacgctggccgagaaggtcggccagatgacgcagatagagcggatcgtcgcgtcgccgcaggcgctcagggactactacatcggcagcctgctcagcggcggcggcagcgtgccgcggaagcaggcgacggcggcggagtgggtcaccatggtcagcgacttccagaaggcgtgcctgtccacgcgcctcggcatcccgatgatctacggcatcgacgccgtccacggccacaacaacgtgtacggcgccaccatcttcccccacaacgtcggcctcggagccaccagggatccaaacctggtgaagaggatcggcgccgcgaccgcgcttgaagtgagagccaccggcatccagtacgcgttcgcgccatgcattgcggtgtgccgtgatccgaggtggggccggtgctacgagagctacagcgaggaccaccgtatcgtgcaggccatgactgagctcatcccgggcctgcagggcgacgtcccgcagaacttcaccagcggcatgcccttcgccgccggaaaggacaaggtcgcggcgtgcgccaagcacttcgtcggcgacggtggcacgcagaacggcatcaacgagaacaacaccatcatcgaccagcagggcctgatgagcatccacatgccggcctacctggacgcgctccgcaagggcgtctccaccgtcatgatctcctactccagctggaacgggctcaagatgcacgccaaccacgacctcatcacaggcttcctcaagggcaggctcaacttccagggcttcacgatctcggattgggagggcatcgacaggatcaccagccctccaggggcgaactactcctactctgtgcaggcttcgattcttgctggcattgacatgatcatggtgcccaacaactaccaaaacttcatcaccatcctgacgggtcacgtcaacagcggcctgatcccgatgagcaggatcgacgacgccgtgactcggattctgcgcgtcaagttcaccatgggcctgttcgagaaccccatgccggaccccagcctcgcggaccagctggggaagcaggagcacagggacctggcgcgggaggcggtgcgcaagtcgctggtgctcctcaagaacggcaagccgggcgacgcgccgctgctgcccctgcccaagaaggccgccaggatcctggtcgcagggagccacgccgacaacctggggtaccagtgcggcgggtggacgatcgagtggcagggcgacacggggcgcaccaccgtcggcaccacggtcctggacgccgtgaaggcggccgtggacccgtcgacggaggtggtgttcgcggagagccccgacgccgagttcgtcaggagcggcggcttctcgtacgcgatcgtggccgtgggcgagcacccgtacacggagaccaagggcgacagcatgaacctgacgatcccggaccccgggccgagcaccgtacagacggtgtgcgccgccgtgcggtgcgtgaccgtgctcatcagcggccgccccgtggtgatacagccgttcctgggcgccatggacgcggtcgtggcggcctggctgccggggaccgagggccagggtgtcaccgacgtgctgttcggggactacgggttcacggggaagctgccgcggacgtggttcaggtcggtggaccagctgccgatgaactacggcgacgcgcactacgacccgctgttcccgctcgggttcgggctcaccacacagggcaagatgtaccagaactagaagaaggcggagcgaggggaaaggggtagtacttggtaaagataataggaaattgaattaagcagtgctctgccgaggaaacgtgaacctgtagttcttgtttccctcaattctatgtcgattaattttgatgtatgctcagttctcactgtggagtagcatccacac

SEQ ID NO: 90599 - DNA, 2735 bp, Zea Mays
cagaacggaggacttgttgcattcgtatttctttctgcgcttgttcacagtcccacgggttttgttctcttgctagcactaccgcccggcgggtctcgccgtccacgtcctcatcaccgtcttcttcctcgaaccaccaccctcttgtgctgcgcgcctgcgcctgcgctgtgctcgctcgcgcactaaccgcgcgggagcagtaagtagtaataacccagctgtacccgtaattctcgccggaggagaacaggacaggatccatcacggacgagggttgctttcgccgcgccgcgccggaaggcaacaatcggggacgacgatcggatcgtcacggagggaaacaggatattatcgggcgggagggggtggctgtggcctgtggctcgcatcgaaggtgccaatggcgggcgcggcggtccctgctccaaccactcgctcctcagcccttatccgccatacctgctctccggttgctgctctactcctttatttaagggacactcgtcgggaggagcactaggcaggcaggacactcctcctcctcctcacctcctcctagtcccatctgctgctccacctttctgcagggctcctccaccggtccagttcctctgcttccggtccggaggcgcctcgtcccgctcctccgccgccaccggatggcgctgctcacggcgccggcggtggccgcgctgctgctgctcttctggtccgcggcgtacggcggtgacgcccaggaccagggcgtgccgccgccgtaccaggacgccagcaaggacgtggaggtccgcgtcagggacctgctcgcgcggatgacgctggccgagaaggtcggccagatgacgcagatagagcggatcgtcgcgtcgccgcaggcgctcagggactactacatcggcagcctgctcagcggcggcggcagcgtgccgcggaagcaggcgacggcggcggagtgggtcaccatggtcagcgacttccagaaggcgtgcctgtccacgcgcctcggcatcccgatgatctacggcatcgacgccgtccacggccacaacaacgtgtacggcgccaccatcttcccccacaacgtcggcctcggagccaccagggatccaaacctggtgaagaggatcggcgccgcgaccgcgcttgaagtgagagccaccggcatccagtacgcgttcgcgccatgcattgcggtgtgccgtgatccgaggtggggccggtgctacgagagctacagcgaggaccaccgtatcgtgcaggccatgactgagctcatcccgggcctgcagggcgacgtcccgcagaacttcaccagcggcatgcccttcgccgccggaaaggacaaggtcgcggcgtgcgccaagcacttcgtcggcgacggtggcacgcagaacggcatcaacgagaacaacaccatcatcgaccagcagggcctgatgagcatccacatgccggcctacctggacgcgctccgcaagggcgtctccaccgtcatgatctcctactccagctggaacgggctcaagatgcacgccaaccacgacctcatcacaggcttcctcaagggcaggctcaacttccagggcttcacgatctcggattgggagggcatcgacaggatcaccagccctccaggggcgaactactcctactctgtgcaggcttcgattcttgctggcattgacatgatcatggtgcccaacaactaccaaaacttcatcaccatcctgacgggtcacgtcaacagcggcctgatcccgatgagcaggatcgacgacgccgtgactcggattctgcgcgtcaagttcaccatgggcctgttcgagaaccccatgccggaccccagcctcgcggaccagctggggaagcaggagcacagggacctggcgcgggaggcggtgcgcaagtcgctggtgctcctcaagaacggcaagccgggcgacgcgccgctgctgcccctgcccaagaaggccgccaggatcctggtcgcagggagccacgccgacaacctggggtaccagtgcggcgggtggacgatcgagtggcagggcgacacggggcgcaccaccgtcggcaccacggtcctggacgccgtgaaggcggccgtggacccgtcgacggaggtggtgttcgcggagagccccgacgccgagttcgtcaggagcggcggcttctcgtacgcgatcgtggccgtgggcgagcacccgtacacggagaccaagggcgacagcatgaacctgacgatcccggaccccgggccgagcaccgtacagacggtgtgcgccgccgtgcggtgcgtgaccgtgctcatcagcggccgccccgtggtgatacagccgttcctgggcgccatggacgcggtcgtggcggcctggctgccggggaccgagggccagggtgtcaccgacgtgctgttcggggactacgggttcacggggaagctgccgcggacgtggttcaggtcggtggaccagctgccgatgaactacggcgacgcgcactacgacccgctgttcccgctcgggttcgggctcaccacacagggcaagatgtaccagaactagaagaaggcggagcgaggggaaaggggtagtacttggtaaagataataggaaattgaattaagcagtgctctgccgaggaaacgtgaacctgtagttcttgtttccctcaattctatgtcgattaattttgatgtatgctcagttctcactgtggagtagcatccacac

SEQ ID NO: 90600 - DNA, 2746 bp, Zea Mays
cagaacggaggacttgttgcattcgtatttctttctgcgcttgttcacagtcccacgggttttgttctcttgctagcactaccgcccggcgggtctcgccgtccacgtcctcatcaccgtcttcttcctcgaaccaccaccctcttgtgctgcgcgcctgcgcctgcgctgtgctcgctcgcgcactaaccgcgcgggagcagtaagtagtaataacccagctgtacccgtaattctcgccggaggagaacaggacaggatccatcacggacgagggttgctttcgccgcgccgcgccggaaggcaacaatcggggacgacgatcggatcgtcacggagggaaacaggatattatcgggcgggagggggtggctgtggcctgtggctcgcatcgaaggtgccaatggcgggcgcggcggtccctgctccaaccactcgctcctcagcccttatccgccatacctgctctccggttgctgctctactcctttatttaagggacactcgtcgggaggagcactaggcaggcaggacactcctcctcctcctcacctcctcctagtcccatctgctgctccacctttctggtccggaggcgcctcgtcccgctcctccgccgccaccggatggcgctgctcacggcgccggcggtggccgcgctgctgctgctcttctggtccgcggcgtacggcggtgacgcccaggaccagggcgtgccgccgccgtaccaggacgccagcaaggacgtggaggtccgcgtcagggacctgctcgcgcggatgacgctggccgagaaggtcggccagatgacgcagatagagcggatcgtcgcgtcgccgcaggcgctcagggactactacatcggcagcctgctcagcggcggcggcagcgtgccgcggaagcaggcgacggcggcggagtgggtcaccatggtcagcgacttccagaaggcgtgcctgtccacgcgcctcggcatcccgatgatctacggcatcgacgccgtccacggccacaacaacgtgtacggcgccaccatcttcccccacaacgtcggcctcggagccaccagggatccaaacctggtgaagaggatcggcgccgcgaccgcgcttgaagtgagagccaccggcatccagtacgcgttcgcgccatgcattgcggtgtgccgtgatccgaggtggggccggtgctacgagagctacagcgaggaccaccgtatcgtgcaggccatgactgagctcatcccgggcctgcagggcgacgtcccgcagaacttcaccagcggcatgcccttcgccgccggaaaggacaaggtcgcggcgtgcgccaagcacttcgtcggcgacggtggcacgcagaacggcatcaacgagaacaacaccatcatcgaccagcagggcctgatgagcatccacatgccggcctacctggacgcgctccgcaagggcgtctccaccgtcatgatctcctactccagctggaacgggctcaagatgcacgccaaccacgacctcatcacaggcttcctcaagggcaggctcaacttccagggcttcacgatctcggattgggagggcatcgacaggatcaccagccctccaggggcgaactactcctactctgtgcaggcttcgattcttgctggcattgacatgatcatggtgcccaacaactaccaaaacttcatcaccatcctgacgggtcacgtcaacagcggcctgatcccgatgagcaggatcgacgacgccgtgactcggattctgcgcgtcaagttcaccatgggcctgttcgagaaccccatgccggaccccagcctcgcggaccagctggggaagcaggagcacagggacctggcgcgggaggcggtgcgcaagtcgctggtgctcctcaagaacggcaagccgggcgacgcgccgctgctgcccctgcccaagaaggccgccaggatcctggtcgcagggagccacgccgacaacctggggtaccagtgcggcgggtggacgatcgagtggcagggcgacacggggcgcaccaccgtcggcaccacggtcctggacgccgtgaaggcggccgtggacccgtcgacggaggtggtgttcgcggagagccccgacgccgagttcgtcaggagcggcggcttctcgtacgcgatcgtggccgtgggcgagcacccgtacacggagaccaagggcgacagcatgaacctgacgatcccggaccccgggccgagcaccgtacagacggtgtgcgccgccgtgcggtgcgtgaccgtgctcatcagcggccgccccgtggtgatacagccgttcctgggcgccatggacgcggtcgtggcggcctggctgccggggaccgagggccagggtgtcaccgacgtgctgttcggggactacgggttcacggggaagctgccgcggacgtggttcaggtcggtggaccagctgccgatgaactacggcgacgcgcactacgacccgctgttcccgctcgggttcgggctcaccacacagggcaagatgtaccagaactagaagaaggcggagcgaggggaaaggggtagtacttggtaaagataataggaaattgaattaagcagtgctctgccgaggaaacgtgaacctgtagttcttgtttccctcaattctatgtcgattaattttgatgtatgctcagttctcactgtggagtagcatccacacatgagccatctcattcttatatgataatcatgatttgattttgctca

SEQ ID NO: 90601 - DNA, 2612 bp, Zea Mays
ccgtcttcttcctcgaaccaccaccctcttgtgctgcgcgcctgcgcctgcgctgtgctcgctcgcgcactaaccgcgcgggagcagtaagtagtaataacccagctgtacccgtaattctcgccggaggagaacaggacaggatccatcacggacgagggttgctttcgccgcgccgcgccggaaggcaacaatcggggacgacgatcggatcgtcacggagggaaacaggatattatcgggcgggagggggtggctgtggcctgtggctcgcatcgaaggtgccaatggcgggcgcggcggtccctgctccaaccactcgctcctcagcccttatccgccatacctgctctccggttgctgctctactcctttatttaagggacactcgtcgggaggagcactaggcaggcaggacactcctcctcctcctcacctcctcctagtcccatctgctgctccacctttctggtccggaggcgcctcgtcccgctcctccgccgccaccggatggcgctgctcacggcgccggcggtggccgcgctgctgctgctcttctggtccgcggcgtacggcggtgacgcccaggaccagggcgtgccgccgccgtaccaggacgccagcaaggacgtggaggtccgcgtcagggacctgctcgcgcggatgacgctggccgagaaggtcggccagatgacgcagatagagcggatcgtcgcgtcgccgcaggcgctcagggactactacatcggcagcctgctcagcggcggcggcagcgtgccgcggaagcaggcgacggcggcggagtgggtcaccatggtcagcgacttccagaaggcgtgcctgtccacgcgcctcggcatcccgatgatctacggcatcgacgccgtccacggccacaacaacgtggatccaaacctggtgaagaggatcggcgccgcgaccgcgcttgaagtgagagccaccggcatccagtacgcgttcgcgccatgcattgcggtgtgccgtgatccgaggtggggccggtgctacgagagctacagcgaggaccaccgtatcgtgcaggccatgactgagctcatcccgggcctgcagggcgacgtcccgcagaacttcaccagcggcatgcccttcgccgccggaaaggacaaggtcgcggcgtgcgccaagcacttcgtcggcgacggtggcacgcagaacggcatcaacgagaacaacaccatcatcgaccagcagggcctgatgagcatccacatgccggcctacctggacgcgctccgcaagggcgtctccaccgtcatgatctcctactccagctggaacgggctcaagatgcacgccaaccacgacctcatcacaggcttcctcaagggcaggctcaacttccaggtgagaagaagaagaagcagatagatgcgttttttaaacgttaatcagacttggaagctgcctgtgtatttttacagggcttcacgatctcggattgggagggcatcgacaggatcaccagccctccaggggcgaactactcctactctgtgcaggcttcgattcttgctggcattgacatgatcatggtgcccaacaactaccaaaacttcatcaccatcctgacgggtcacgtcaacagcggcctgatcccgatgagcaggatcgacgacgccgtgactcggattctgcgcgtcaagttcaccatgggcctgttcgagaaccccatgccggaccccagcctcgcggaccagctggggaagcaggagcacagggacctggcgcgggaggcggtgcgcaagtcgctggtgctcctcaagaacggcaagccgggcgacgcgccgctgctgcccctgcccaagaaggccgccaggatcctggtcgcagggagccacgccgacaacctggggtaccagtgcggcgggtggacgatcgagtggcagggcgacacggggcgcaccaccgtcggcaccacggtcctggacgccgtgaaggcggccgtggacccgtcgacggaggtggtgttcgcggagagccccgacgccgagttcgtcaggagcggcggcttctcgtacgcgatcgtggccgtgggcgagcacccgtacacggagaccaagggcgacagcatgaacctgacgatcccggaccccgggccgagcaccgtacagacggtgtgcgccgccgtgcggtgcgtgaccgtgctcatcagcggccgccccgtggtgatacagccgttcctgggcgccatggacgcggtcgtggcggcctggctgccggggaccgagggccagggtgtcaccgacgtgctgttcggggactacgggttcacggggaagctgccgcggacgtggttcaggtcggtggaccagctgccgatgaactacggcgacgcgcactacgacccgctgttcccgctcgggttcgggctcaccacacagggcaagatgtaccagaactagaagaaggcggagcgaggggaaaggggtagtacttggtaaagataataggaaattgaattaagcagtgctctgccgaggaaacgtgaacctgtagttcttgtttccctcaattctatgtcgattaattttgatgtatgctcagttctcactgtggagtagcatccacac

SEQ ID NO: 90602 - DNA, 2621 bp, Zea Mays
ccgtcttcttcctcgaaccaccaccctcttgtgctgcgcgcctgcgcctgcgctgtgctcgctcgcgcactaaccgcgcgggagcagtaagtagtaataacccagctgtacccgtaattctcgccggaggagaacaggacaggatccatcacggacgagggttgctttcgccgcgccgcgccggaaggcaacaatcggggacgacgatcggatcgtcacggagggaaacaggatattatcgggcgggagggggtggctgtggcctgtggctcgcatcgaaggtgccaatggcgggcgcggcggtccctgctccaaccactcgctcctcagcccttatccgccatacctgctctccggttgctgctctactcctttatttaagggacactcgtcgggaggagcactaggcaggcaggacactcctcctcctcctcacctcctcctagtcccatctgctgctccacctttctggtccggaggcgcctcgtcccgctcctccgccgccaccggatggcgctgctcacggcgccggcggtggccgcgctgctgctgctcttctggtccgcggcgtacggcggtgacgcccaggaccagggcgtgccgccgccgtaccaggacgccagcaaggacgtggaggtccgcgtcagggacctgctcgcgcggatgacgctggccgagaaggtcggccagatgacgcagatagagcggatcgtcgcgtcgccgcaggcgctcagggactactacatcggcagcctgctcagcggcggcggcagcgtgccgcggaagcaggcgacggcggcggagtgggtcaccatggtcagcgacttccagaaggcgtgcctgtccacgcgcctcggcatcccgatgatctacggcatcgacgccgtccacggccacaacaacgtggatccaaacctggtgaagaggatcggcgccgcgaccgcgcttgaagtgagagccaccggcatccagtacgcgttcgcgccatgcattgcggtgtgccgtgatccgaggtggggccggtgctacgagagctacagcgaggaccaccgtatcgtgcaggccatgactgagctcatcccgggcctgcagggcgacgtcccgcagaacttcaccagcggcatgcccttcgccgccggaaaggacaaggtcgcggcgtgcgccaagcacttcgtcggcgacggtggcacgcagaacggcatcaacgagaacaacaccatcatcgaccagcagggcctgatgagcatccacatgccggcctacctggacgcgctccgcaagggcgtctccaccgtcatgatctcctactccagctggaacgggctcaagatgcacgccaaccacgacctcatcacaggcttcctcaagggcaggctcaacttccagggcttcacgatctcggattgggagggcatcgacaggatcaccagccctccaggggcgaactactcctactctgtgcaggcttcgattcttgctggcattgacatggtaagccaagctagcattgacatggtcgggatttggcgttgcctaaacaactcttgtgtggtggtgtgcttcacttcagatcatggtgcccaacaactaccaaaacttcatcaccatcctgacgggtcacgtcaacagcggcctgatcccgatgagcaggatcgacgacgccgtgactcggattctgcgcgtcaagttcaccatgggcctgttcgagaaccccatgccggaccccagcctcgcggaccagctggggaagcaggagcacagggacctggcgcgggaggcggtgcgcaagtcgctggtgctcctcaagaacggcaagccgggcgacgcgccgctgctgcccctgcccaagaaggccgccaggatcctggtcgcagggagccacgccgacaacctggggtaccagtgcggcgggtggacgatcgagtggcagggcgacacggggcgcaccaccgtcggcaccacggtcctggacgccgtgaaggcggccgtggacccgtcgacggaggtggtgttcgcggagagccccgacgccgagttcgtcaggagcggcggcttctcgtacgcgatcgtggccgtgggcgagcacccgtacacggagaccaagggcgacagcatgaacctgacgatcccggaccccgggccgagcaccgtacagacggtgtgcgccgccgtgcggtgcgtgaccgtgctcatcagcggccgccccgtggtgatacagccgttcctgggcgccatggacgcggtcgtggcggcctggctgccggggaccgagggccagggtgtcaccgacgtgctgttcggggactacgggttcacggggaagctgccgcggacgtggttcaggtcggtggaccagctgccgatgaactacggcgacgcgcactacgacccgctgttcccgctcgggttcgggctcaccacacagggcaagatgtaccagaactagaagaaggcggagcgaggggaaaggggtagtacttggtaaagataataggaaattgaattaagcagtgctctgccgaggaaacgtgaacctgtagttcttgtttccctcaattctatgtcgattaattttgatgtatgctcagttctcactgtggagtagcatccacacatgagcc

SEQ ID NO: 90603 - DNA, 2392 bp, Zea Mays
gttcacgcgagttgggcatttgtgtgcgggagagggattccaacccgtcgcaacaaacgcattgaatcatcatcaccttccccccttcatagcctagcctcgtcacacgagcagtgctgccctgccgccgccggttctccgaagagcgccgccggggcatcgtgcctgtacttgcttcatataaccctcctgttcgtcctcgccgggctcacgcatttgtggttgtggcgcagcagggctcctccaccggtccagttcctctgcttccggtgattgattggtccggaggcgcctcgtcccgctcctccgccgccaccggatggcgctgctcacggcgccggcggtggccgcgctgctgctgctcttctggtccgcggcgtacggcggtgacgcccaggaccagggcgtgccgccgccgtaccaggacgccagcaaggacgtggaggtccgcgtcagggacctgctcgcgcggatgacgctggccgagaaggtcggccagatgacgcagatagagcggatcgtcgcgtcgccgcaggcgctcagggactactacatcggcagcctgctcagcggcggcggcagcgtgccgcggaagcaggcgacggcggcggagtgggtcaccatggtcagcgacttccagaaggcgtgcctgtccacgcgcctcggcatcccgatgatctacggcatcgacgccgtccacggccacaacaacgtgtacggcgccaccatcttcccccacaacgtcggcctcggagccaccagggatccaaacctggtgaagaggatcggcgccgcgaccgcgcttgaagtgagagccaccggcatccagtacgcgttcgcgccatgcattgcggtgtgccgtgatccgaggtggggccggtgctacgagagctacagcgaggaccaccgtatcgtgcaggccatgactgagctcatcccgggcctgcagggcgacgtcccgcagaacttcaccagcggcatgcccttcgccgccggaaaggacaaggtcgcggcgtgcgccaagcacttcgtcggcgacggtggcacgcagaacggcatcaacgagaacaacaccatcatcgaccagcagggcctgatgagcatccacatgccggcctacctggacgcgctccgcaagggcgtctccaccgtcatgatctcctactccagctggaacgggctcaagatgcacgccaaccacgacctcatcacaggcttcctcaagggcaggctcaacttccagggcttcacgatctcggattgggagggcatcgacaggatcaccagccctccaggggcgaactactcctactctgtgcaggcttcgattcttgctggcattgacatgatcatggtgcccaacaactaccaaaacttcatcaccatcctgacgggtcacgtcaacagcggcctgatcccgatgagcaggatcgacgacgccgtgactcggattctgcgcgtcaagttcaccatgggcctgttcgagaaccccatgccggaccccagcctcgcggaccagctggggaagcaggagcacagggacctggcgcgggaggcggtgcgcaagtcgctggtgctcctcaagaacggcaagccgggcgacgcgccgctgctgcccctgcccaagaaggccgccaggatcctggtcgcagggagccacgccgacaacctggggtaccagtgcggcgggtggacgatcgagtggcagggcgacacggggcgcaccaccgtcggcaccacggtcctggacgccgtgaaggcggccgtggacccgtcgacggaggtggtgttcgcggagagccccgacgccgagttcgtcaggagcggcggcttctcgtacgcgatcgtggccgtgggcgagcacccgtacacggagaccaagggcgacagcatgaacctgacgatcccggaccccgggccgagcaccgtacagacggtgtgcgccgccgtgcggtgcgtgaccgtgctcatcagcggccgccccgtggtgatacagccgttcctgggcgccatggacgcggtcgtggcggcctggctgccggggaccgagggccagggtgtcaccgacgtgctgttcggggactacgggttcacggggaagctgccgcggacgtggttcaggtcggtggaccagctgccgatgaactacggcgacgcgcactacgacccgctgttcccgctcgggttcgggctcaccacacagggcaagatgtaccagaactagaagaaggcggagcgaggggaaaggggtagtacttggtaaagataataggaaattgaattaagcagtgctctgccgaggaaacgtgaacctgtagttcttgtttccctcaattctatgtcgattaattttgatgtatgctcagttctcactgtggagtagcatccacac

SEQ ID NO: 90604 - DNA, 2172 bp, Zea Mays
gttagtttgcgtgttctggagtagatagtgctttgcaagctaatcgtttcgtattagcgtgtccggaggcgcctcgtcccgctcctccgccgccaccggatggcgctgctcacggcgccggcggtggccgcgctgctgctgctcttctggtccgcggcgtacggcggtgacgcccaggaccagggcgtgccgccgccgtaccaggacgccagcaaggacgtggaggtccgcgtcagggacctgctcgcgcggatgacgctggccgagaaggtcggccagatgacgcagatagagcggatcgtcgcgtcgccgcaggcgctcagggactactacatcggcagcctgctcagcggcggcggcagcgtgccgcggaagcaggcgacggcggcggagtgggtcaccatggtcagcgacttccagaaggcgtgcctgtccacgcgcctcggcatcccgatgatctacggcatcgacgccgtccacggccacaacaacgtgtacggcgccaccatcttcccccacaacgtcggcctcggagccaccagggatccaaacctggtgaagaggatcggcgccgcgaccgcgcttgaagtgagagccaccggcatccagtacgcgttcgcgccatgcattgcggtgtgccgtgatccgaggtggggccggtgctacgagagctacagcgaggaccaccgtatcgtgcaggccatgactgagctcatcccgggcctgcagggcgacgtcccgcagaacttcaccagcggcatgcccttcgccgccggaaaggacaaggtcgcggcgtgcgccaagcacttcgtcggcgacggtggcacgcagaacggcatcaacgagaacaacaccatcatcgaccagcagggcctgatgagcatccacatgccggcctacctggacgcgctccgcaagggcgtctccaccgtcatgatctcctactccagctggaacgggctcaagatgcacgccaaccacgacctcatcacaggcttcctcaagggcaggctcaacttccagggcttcacgatctcggattgggagggcatcgacaggatcaccagccctccaggggcgaactactcctactctgtgcaggcttcgattcttgctggcattgacatgatcatggtgcccaacaactaccaaaacttcatcaccatcctgacgggtcacgtcaacagcggcctgatcccgatgagcaggatcgacgacgccgtgactcggattctgcgcgtcaagttcaccatgggcctgttcgagaaccccatgccggaccccagcctcgcggaccagctggggaagcaggagcacagggacctggcgcgggaggcggtgcgcaagtcgctggtgctcctcaagaacggcaagccgggcgacgcgccgctgctgcccctgcccaagaaggccgccaggatcctggtcgcagggagccacgccgacaacctggggtaccagtgcggcgggtggacgatcgagtggcagggcgacacggggcgcaccaccgtcggcaccacggtcctggacgccgtgaaggcggccgtggacccgtcgacggaggtggtgttcgcggagagccccgacgccgagttcgtcaggagcggcggcttctcgtacgcgatcgtggccgtgggcgagcacccgtacacggagaccaagggcgacagcatgaacctgacgatcccggaccccgggccgagcaccgtacagacggtgtgcgccgccgtgcggtgcgtgaccgtgctcatcagcggccgccccgtggtgatacagccgttcctgggcgccatggacgcggtcgtggcggcctggctgccggggaccgagggccagggtgtcaccgacgtgctgttcggggactacgggttcacggggaagctgccgcggacgtggttcaggtcggtggaccagctgccgatgaactacggcgacgcgcactacgacccgctgttcccgctcgggttcgggctcaccacacagggcaagatgtaccagaactagaagaaggcggagcgaggggaaaggggtagtacttggtaaagataataggaaattgaattaagcagtgctctgccgaggaaacgtgaacctgtagttcttgtttccctcaattctatgtcgattaattttgatgtatgctcagttctcactgtggagtagcatccacac

SEQ ID NO: 90605 - DNA, 2170 bp, Zea Mays
gttagtttgcgtgttctggagtagatagtgctttgcaagctaatcgtttcgtattagcgtccggaggcgcctcgtcccgctcctccgccgccaccggatggcgctgctcacggcgccggcggtggccgcgctgctgctgctcttctggtccgcggcgtacggcggtgacgcccaggaccagggcgtgccgccgccgtaccaggacgccagcaaggacgtggaggtccgcgtcagggacctgctcgcgcggatgacgctggccgagaaggtcggccagatgacgcagatagagcggatcgtcgcgtcgccgcaggcgctcagggactactacatcggcagcctgctcagcggcggcggcagcgtgccgcggaagcaggcgacggcggcggagtgggtcaccatggtcagcgacttccagaaggcgtgcctgtccacgcgcctcggcatcccgatgatctacggcatcgacgccgtccacggccacaacaacgtgtacggcgccaccatcttcccccacaacgtcggcctcggagccaccagggatccaaacctggtgaagaggatcggcgccgcgaccgcgcttgaagtgagagccaccggcatccagtacgcgttcgcgccatgcattgcggtgtgccgtgatccgaggtggggccggtgctacgagagctacagcgaggaccaccgtatcgtgcaggccatgactgagctcatcccgggcctgcagggcgacgtcccgcagaacttcaccagcggcatgcccttcgccgccggaaaggacaaggtcgcggcgtgcgccaagcacttcgtcggcgacggtggcacgcagaacggcatcaacgagaacaacaccatcatcgaccagcagggcctgatgagcatccacatgccggcctacctggacgcgctccgcaagggcgtctccaccgtcatgatctcctactccagctggaacgggctcaagatgcacgccaaccacgacctcatcacaggcttcctcaagggcaggctcaacttccagggcttcacgatctcggattgggagggcatcgacaggatcaccagccctccaggggcgaactactcctactctgtgcaggcttcgattcttgctggcattgacatgatcatggtgcccaacaactaccaaaacttcatcaccatcctgacgggtcacgtcaacagcggcctgatcccgatgagcaggatcgacgacgccgtgactcggattctgcgcgtcaagttcaccatgggcctgttcgagaaccccatgccggaccccagcctcgcggaccagctggggaagcaggagcacagggacctggcgcgggaggcggtgcgcaagtcgctggtgctcctcaagaacggcaagccgggcgacgcgccgctgctgcccctgcccaagaaggccgccaggatcctggtcgcagggagccacgccgacaacctggggtaccagtgcggcgggtggacgatcgagtggcagggcgacacggggcgcaccaccgtcggcaccacggtcctggacgccgtgaaggcggccgtggacccgtcgacggaggtggtgttcgcggagagccccgacgccgagttcgtcaggagcggcggcttctcgtacgcgatcgtggccgtgggcgagcacccgtacacggagaccaagggcgacagcatgaacctgacgatcccggaccccgggccgagcaccgtacagacggtgtgcgccgccgtgcggtgcgtgaccgtgctcatcagcggccgccccgtggtgatacagccgttcctgggcgccatggacgcggtcgtggcggcctggctgccggggaccgagggccagggtgtcaccgacgtgctgttcggggactacgggttcacggggaagctgccgcggacgtggttcaggtcggtggaccagctgccgatgaactacggcgacgcgcactacgacccgctgttcccgctcgggttcgggctcaccacacagggcaagatgtaccagaactagaagaaggcggagcgaggggaaaggggtagtacttggtaaagataataggaaattgaattaagcagtgctctgccgaggaaacgtgaacctgtagttcttgtttccctcaattctatgtcgattaattttgatgtatgctcagttctcactgtggagtagcatccacac

SEQ ID NO: 90606 - DNA, 2313 bp, Zea Mays
ctcgttaataatactacacgcaaaccataaaaatggtttcttggatccctgcatctctgcgtccccggctctcgccgtcgccgccgttgactggccatgggcggcgagctcgccggccgcatcaggtcaggcgtcctcgagcccctggaggagcgcttcacggaggctctgacatggtcgctgcaatgctacgacgcgcaggtccggaggcgcctcgtcccgctcctccgccgccaccggatggcgctgctcacggcgccggcggtggccgcgctgctgctgctcttctggtccgcggcgtacggcggtgacgcccaggaccagggcgtgccgccgccgtaccaggacgccagcaaggacgtggaggtccgcgtcagggacctgctcgcgcggatgacgctggccgagaaggtcggccagatgacgcagatagagcggatcgtcgcgtcgccgcaggcgctcagggactactacatcggcagcctgctcagcggcggcggcagcgtgccgcggaagcaggcgacggcggcggagtgggtcaccatggtcagcgacttccagaaggcgtgcctgtccacgcgcctcggcatcccgatgatctacggcatcgacgccgtccacggccacaacaacgtgtacggcgccaccatcttcccccacaacgtcggcctcggagccaccagggatccaaacctggtgaagaggatcggcgccgcgaccgcgcttgaagtgagagccaccggcatccagtacgcgttcgcgccatgcattgcggtgtgccgtgatccgaggtggggccggtgctacgagagctacagcgaggaccaccgtatcgtgcaggccatgactgagctcatcccgggcctgcagggcgacgtcccgcagaacttcaccagcggcatgcccttcgccgccggaaaggacaaggtcgcggcgtgcgccaagcacttcgtcggcgacggtggcacgcagaacggcatcaacgagaacaacaccatcatcgaccagcagggcctgatgagcatccacatgccggcctacctggacgcgctccgcaagggcgtctccaccgtcatgatctcctactccagctggaacgggctcaagatgcacgccaaccacgacctcatcacaggcttcctcaagggcaggctcaacttccagggcttcacgatctcggattgggagggcatcgacaggatcaccagccctccaggggcgaactactcctactctgtgcaggcttcgattcttgctggcattgacatgatcatggtgcccaacaactaccaaaacttcatcaccatcctgacgggtcacgtcaacagcggcctgatcccgatgagcaggatcgacgacgccgtgactcggattctgcgcgtcaagttcaccatgggcctgttcgagaaccccatgccggaccccagcctcgcggaccagctggggaagcaggagcacagggacctggcgcgggaggcggtgcgcaagtcgctggtgctcctcaagaacggcaagccgggcgacgcgccgctgctgcccctgcccaagaaggccgccaggatcctggtcgcagggagccacgccgacaacctggggtaccagtgcggcgggtggacgatcgagtggcagggcgacacggggcgcaccaccgtcggcaccacggtcctggacgccgtgaaggcggccgtggacccgtcgacggaggtggtgttcgcggagagccccgacgccgagttcgtcaggagcggcggcttctcgtacgcgatcgtggccgtgggcgagcacccgtacacggagaccaagggcgacagcatgaacctgacgatcccggaccccgggccgagcaccgtacagacggtgtgcgccgccgtgcggtgcgtgaccgtgctcatcagcggccgccccgtggtgatacagccgttcctgggcgccatggacgcggtcgtggcggcctggctgccggggaccgagggccagggtgtcaccgacgtgctgttcggggactacgggttcacggggaagctgccgcggacgtggttcaggtcggtggaccagctgccgatgaactacggcgacgcgcactacgacccgctgttcccgctcgggttcgggctcaccacacagggcaagatgtaccagaactagaagaaggcggagcgaggggaaaggggtagtacttggtaaagataataggaaattgaattaagcagtgctctgccgaggaaacgtgaacctgtagttcttgtttccctcaattctatgtcgattaattttgatgtatgctcagttctcactgtggagtagcatccacac

SEQ ID NO: 90607 - DNA, 2237 bp, Zea Mays
ctcgttaataatactacacgcaaaccataaaaatggtttcttggatccctgcatctctgcgtccccggctctcgccgtcgccgccgttgactggccatgggcggcgagctcgccggccgcatcaggtccggaggcgcctcgtcccgctcctccgccgccaccggatggcgctgctcacggcgccggcggtggccgcgctgctgctgctcttctggtccgcggcgtacggcggtgacgcccaggaccagggcgtgccgccgccgtaccaggacgccagcaaggacgtggaggtccgcgtcagggacctgctcgcgcggatgacgctggccgagaaggtcggccagatgacgcagatagagcggatcgtcgcgtcgccgcaggcgctcagggactactacatcggcagcctgctcagcggcggcggcagcgtgccgcggaagcaggcgacggcggcggagtgggtcaccatggtcagcgacttccagaaggcgtgcctgtccacgcgcctcggcatcccgatgatctacggcatcgacgccgtccacggccacaacaacgtgtacggcgccaccatcttcccccacaacgtcggcctcggagccaccagggatccaaacctggtgaagaggatcggcgccgcgaccgcgcttgaagtgagagccaccggcatccagtacgcgttcgcgccatgcattgcggtgtgccgtgatccgaggtggggccggtgctacgagagctacagcgaggaccaccgtatcgtgcaggccatgactgagctcatcccgggcctgcagggcgacgtcccgcagaacttcaccagcggcatgcccttcgccgccggaaaggacaaggtcgcggcgtgcgccaagcacttcgtcggcgacggtggcacgcagaacggcatcaacgagaacaacaccatcatcgaccagcagggcctgatgagcatccacatgccggcctacctggacgcgctccgcaagggcgtctccaccgtcatgatctcctactccagctggaacgggctcaagatgcacgccaaccacgacctcatcacaggcttcctcaagggcaggctcaacttccagggcttcacgatctcggattgggagggcatcgacaggatcaccagccctccaggggcgaactactcctactctgtgcaggcttcgattcttgctggcattgacatgatcatggtgcccaacaactaccaaaacttcatcaccatcctgacgggtcacgtcaacagcggcctgatcccgatgagcaggatcgacgacgccgtgactcggattctgcgcgtcaagttcaccatgggcctgttcgagaaccccatgccggaccccagcctcgcggaccagctggggaagcaggagcacagggacctggcgcgggaggcggtgcgcaagtcgctggtgctcctcaagaacggcaagccgggcgacgcgccgctgctgcccctgcccaagaaggccgccaggatcctggtcgcagggagccacgccgacaacctggggtaccagtgcggcgggtggacgatcgagtggcagggcgacacggggcgcaccaccgtcggcaccacggtcctggacgccgtgaaggcggccgtggacccgtcgacggaggtggtgttcgcggagagccccgacgccgagttcgtcaggagcggcggcttctcgtacgcgatcgtggccgtgggcgagcacccgtacacggagaccaagggcgacagcatgaacctgacgatcccggaccccgggccgagcaccgtacagacggtgtgcgccgccgtgcggtgcgtgaccgtgctcatcagcggccgccccgtggtgatacagccgttcctgggcgccatggacgcggtcgtggcggcctggctgccggggaccgagggccagggtgtcaccgacgtgctgttcggggactacgggttcacggggaagctgccgcggacgtggttcaggtcggtggaccagctgccgatgaactacggcgacgcgcactacgacccgctgttcccgctcgggttcgggctcaccacacagggcaagatgtaccagaactagaagaaggcggagcgaggggaaaggggtagtacttggtaaagataataggaaattgaattaagcagtgctctgccgaggaaacgtgaacctgtagttcttgtttccctcaattctatgtcgattaattttgatgtatgctcagttctcactgtggagtagcatccacac

SEQ ID NO: 90608 - DNA, 1696 bp, Zea Mays
accgattgcaaccgaaccggatcgcgcgctacgaagccttcagaacaaggaaccaaaaccacgcgagccaggcacttcctctactcctccctgcagcacggcgtgcatctacacgagccggcggggcggcgggcggatctatctccaaaccctagccgtacgtgcaacagggcgacggcaaactagcggacgcagcagcgggaacgggaatgctccgggcggtcggtgcccgggcgaataggaactgctcccctcctccccctctgctacctgttgactcgccggtctccgctgctgagtacggcggtggaggcaactggagctcactcgcggagggtatgcgaaggcggagcgtgccgcttgcctagttcgccacgcctggaactggaagtctggacggaggcgcggcggtcacccacctctctcgctcttcttcagtcccttcccactcgttcccctcccctgcgagcgattccattgccactccgctttattattgctctttccgtcaggctcactgggcctttgggccaacgaggcccatgtggtaactccacaaatgctcatttcgctaaaaccattggttcgtcgtatcgaaggagtggaccagcggagtgtttgcccaattgccccgcgccgccgcccccgcagcagagtagcagaccagcggtggatgtgatggccgcgagcggtatggaggatgagagagtgagcggggaggtcagggagcaggaagacgacgacgacaacgtgcctcaactcagcgctgcggcgatggaggcgctccgggagtttctggcggaacagcatcgtccggaggagcagaatgaagctggaggaggggaagacggggtagagctggtcccggaggactggcggttgagccagttctggtatgatgagcgtaccgcgcgggagctcgtggaggaggtcgtccgccttgtctccccttctggatcaggctccgccgccggtgccgtggcctgcatcgcatgcccgacgctctacgcctacctgaagaagacggaccccggagtgcccgcgcagctgctggagtacgacgagcggttcgggcagtacggcggcgacttcaccttctacgactacaaccgaccggaggagctgccggcggcgatgaagcacgcctaccgagtcatcgttgccgaccctccctatctgagtaaggagtgcttggaaaaggttgccaaaacagtatctttcctcgcacggcctgaaggttcattcctgctgctgctcacaggggaagttcagatggaccgggcgttggagctgctgaatgttcgtccctgcggtttcaggcctcgccactcgaacaaactgggcaacgagttccggctgttcacgaattatgatcctgctgacagacttggtggttgggagcaaagtgatggtgcccccatttaactataaactaatacaatttttgttctagagttgttccatctttatgaacatgctgcatctttgatccacagctcactgatccctccaatttaaattgtagtgacaattacttgaggaatctgtgtgctatgatgtatggtcaatcaaacatttacattgttagtgtacctcatttttccgtgatcatgtttcggaggactataggtgttgtttggttcacatatttgtaatggataataaataacgttaaatcatgtttgtttaaatccaa

SEQ ID NO: 90609 - DNA, 809 bp, Zea Mays
gctgtgcagctatccactctccagtgctccacgctctccaattctctctcgaccgcggcatggccgccggcctctcattcccccgcgccggggccccgttcatcctcctccgcacctcctgtttctctccgtgggcagctctggtgccccgccgtcgacttctctctgggcctcccactgccggtgatcccccgcccccggcgctcccgccaacttcgaagctcgccgccccgccggttgtgggaacgccggagcccccgctgccgtttagggccgtggaggcggagatccttcgcgatattgaccccgtcgtcctgctcatcaaggatatcctccactccgatagatacggggatggcgaatgtctctgcccaagggacgaaaatgtcgtcgtggagaagctcctctcctaccatccacgcgcgcaggacaaaattgggtgtggacttgacgctataatggttgataggcaccctgagttcagaaagtcaagatgcctcttcgttgttcgaacagacggtgtttggattgatttctcataccagaagtgcctccgtgcatacatccgggaaaagtacccgtctcatgccgacagatttatacgagaacatttcaagcgaacatgaagcaaacccaaaagtaatttgaatacattgtatttttatgagttttggcatagtttatgtacatcattgaccctcaaagcctgttggtctattcatcgctttcctagcacgcgcgtgtatgactggaatctagagcgcacctttgcaaaaaaaagtataaaggaatgcatgcaaggttaataa

SEQ ID NO: 90610 - DNA, 833 bp, Zea Mays
accccgcagccaacaggacagtaggggctcccttctccagttctccttgctcgcgtcttcccggtctcgtatgcgtgcgtgcgatcgacgcagaggcgcgggcgctcgcaccaagccgatctgatggccttcatgcgctccctctcaaatgcatcttctggcatgggagttgctcctaacattagggagacgtttgtcgagctccaaatgaagaaggcattccgatatgttatcttcaaaatcgaagaaaagcaaaagcaggtagttgtggagaagacgggggccactacttaaagctatgatgattttctggcctctctccagagaatgactgtcgatatgcgttgtatgattttgattttgtcactggggagattgtgcagaaaagcaagattttcttcattgcctggtccccgttgacatcccgcatccgtgccaagatgctttactccacctcgaaggaccgcatcaagtatgagctcgacgggttccactatgagatccaggcgaccgacccatccgaggtggcgaggtggacattgaggttctgcgggagcgggctcactgaagctggttcgcctttgaagaagggaccaatggagggccatgaaccttttggttagatgcaaatcctattacaaatgatgaaagctcccgccttggtatttgttattaagtttatgtaagcatgtcgtttaggcgtgacgtgtgactctagctggtgaagcgttatcaaagctgtatctgtatgagctttgattgtcgagcctgtaaacgaagcaaggtttgcgaacttgttatattgtggtattgatggtactggattactggct

SEQ ID NO: 90611 - DNA, 632 bp, Zea Mays
cgcttcgtctctcatgccccaaagcaaagcaaagcttcaaagcatctctgctaggattttagcgagcggcaacgacgagcgacccaaaaaagcaatcattagtcaccatatctggtcctctcgctccacccccctcctctgcgacttgaggcaggacaggaggcacagacgtgcaatggggttcgtgctggtggtctctctgcccttcatcttcttctccatcctcctcggcttcggctgctacttcctcggcaagcacaggggccgggaggagatgcggaccggcatcggcgtgcagatctacggcacgccgctgccgccgcccggcgtcgtcggagcctcctcgccgccgcctgagccgttccacagcaagaaacaatggtccgaggctgtgtgactgagattcagacgtctctccatccatccattctactactactacatatatgtcttggtggtgatgttggatttatattcttagttctttcttctttaatttcgccctggctgtcttgagagtgtagattgagagtcaaatctgtgcttgtgtctaaagatggtgtgtgtggatgttgtgatacgattgcaatcacactttatatcttctgtaatcaagcaaaaaatttctgaaa

SEQ ID NO: 90612 - DNA, 619 bp, Zea Mays
atgccccaaagcaaagcaaagcttcaaagcatctctgctaggattttagcgagcggcaacgacgagcgacccaaaaaagcaatcattagtcaccatatctggtcctctcgctccacccccctcctctgcgacttgaggcaggacaggaggcacagacgtgcaatggggttcgtgctggtggtctctctgcccttcatcttcttctccatcctcctcggcttcggctgctacttcctcggcaagcacaggggccgggaggagatgcggaccggcatcggcgtgcagatctacggcacgccgctgccgccgcccggcgtcgtcggagcctcctcgccgccgcctgagccgttccacagcaagaaacaatggtccgaggctgtgtgactgagattcagacgtctctccatccatccattctactactactacatatatgtcttggtggtgatgttggatttatattcttagttctttcttctttaatttcgccctggctgtcttgagagtgtagattgagagtcaaatctgtgcttgtgtctaaagatggtgtgtgtggatgttgtgatacgattgcaatcacactttatatcttctgtaatcaagcaaaaaatttctgaaa

SEQ ID NO: 90613 - DNA, 963 bp, Zea Mays
ctgccgcgcagcttctcctgcgccgctcggccctgccatctccatggctgcgtcctgttcggtcgccctgtttgcagctcgccggcgcccaagccctctgctcgctctccatcgcgaccttcccagccttctctgccgagcccagctgaagctccctacgcgcggtcttctccaatcgagctgcgtcccgtccgctcggtcctgctcttctccaaccgcgcccctgatctggagtctagccgagctctccactgcctagctccatctcacggcgctctgtcctgctcgctcatggccgaagccacctggtcccaggtccggtcggccggctcagtttttcccagtgccgcgcgtcgcgcttccccttccagccgaccgaagctcccagctccaggcatggcgcgtccgctccctagagcttgctgcagcagcttctctctctcctcgagtttctctgcgttcagcccagccgcgcccctgtccatctcgtcgcggctgctgttttagtgtttttcctgcgtgccgtgctctcttccatggatgccgcggctgctgctctggagttctccctgcacgcgctcagcttcaattcagttgttgtgcccaccgtcggtttgtgtgtgcgcgcgctggacacggtaaaacgttgcgtgagcttgtgtccgagcccgcccgaccgtgaccttgctttgcttctcgcgtcgctactcgtcaagtccttctccaatccgcgccataaaattcactcggacacgatctcgtcgtcgttccgcgcgtcagcataaaatcctaagaatcgaatgaagacgaagctagcagcgcgatattccctaagcgctcgacaaattgcatgtatcggaaaatcgctaccgatctcgcggattcgagtcagctgttgaaacggtaagctgatgaatagtttagaataattcgaaagttaaataaattaatgtgttagtggga

SEQ ID NO: 90614 - DNA, 4276 bp, Zea Mays
tccgatccgcctccgccgccgtctcccctgcccaggcgccggaagtccacctcgggctccagcatatccgcgatgcatctggacggcgtcgacgacgagctcggaggcggcagctgcgccccctcccccgcgcgctttgagctccaagaggatccttccttctggaaggacaacaatgtgcaggttgcgatccgtatccggccgctgagcggcagtgaggtgtcgatgcaggggcagaagcggtgcgtcaggcaggatagtagccagagccttacctggattggacaccccgagtccaggttcactttcgatcttgtcgctgacgaacatgtcacgcaggagggcatgttcaatgttgccggggtgcccatggtggagaactgcatagctggctataacagctgcatgtttgcttacgggcaggaaaaagaattaaggagagatgaaaagctcatgtttacttgtaaatgctcatttttggagatttataatgagcagattctggatctgctcaacccaaattctgtaaacttgcagataagggaggatgccagaaagggtatacatgttgagaatttgacggaacatgaaatctccaatgctcgagaagcgctgcaacaacttattgagggagcagcaaacagaaaggtagcagccaccaatatgaaccgagcaagtagccgctctcatagtgttttcacctgccttatagaaagtaagtgggagtcacaaggtatcaagcaccaccgcttttctcgactcaaccttgttgaccttgcgggctcagagaggcaaaagagctcaggtgctgaaggggagcgattgaaggaagctaccaacatcaacaaatcactatcaactttgggacttgtcattacgaacctaattgctgtgtcaaacaaaaagtcacagcatgttccatacagagattcaaaattaacattcctcctccaggattcccttggaggaaattcaaaaacgaccataattgcaaacataagcccatccagctgttgtgctgctgagacattaagcacattgaaattcgcgcaacgagctaaatatataaggaataatgctataattaatgaggatgcttctggtgatgttcttagcatgcgtttacagatccagaaccttaagaaaagtaatcagccgtttgcaaggacaattgggttctgataaaacagaaagcattgcctctcatgggtttgtctgcgagtcccctagcacattcaaatgggatcagggtcatggcatgttcactccacttacttttgataaaagggctacacagaggaacgattgtgatgctgcccttgtcgctgcttttaggagggaacaagagaaggaagcacaattgaaggcagtaatagatgcaaagcagactgctgaacagctggtagctcaaaagacagaagaggtaagaagtttcaagatgaggcttaagtttcgtgaagaacggatcaaaagattggagcaggttgcttcagggaagttatctgctgaagcacatcttttgcaagagaaggaaaaccttgtaaaggaattagaggtcctgcggggtcaattagatcgtaatccagaaattacaaaatttgcaatggagaatctacaattaaaggaagagctacgaaggttgcagtcatttgttgatgaaggtgaacgagaaatgatgcatgagcaaatcattgttttacaagataagctgcttgaggcacttgactggaagcttatgaatgagaaggaacctattaacaagggtctctcattatttggggagtcagctggcgatgaggaaaatgagtttcttcgtttgcaggctattcaaaatgagagagaaattgagtcgttgcgtaaaaaaatgacattctgccttgaagcaaaagataatcttgaaaggcatgtcaatgagttgaccacagagttggagcttacaaagaaacacaacaacacatataaagagttcaaggctgcccagctccaggagcaaggagaagcagatttacataacttgtctgacgctcagatggaacttaagactttggttgatgcaatagcttctgcgagtcaacgggaggcagaagctcatgaaactgctatcggtttggccaaagagaatgaagaattgaggctgcagcttaaggttttgattgaggataacaagagattggttgagctctatgaacacactgttgtcaatgttgaggcaaatcaagatggaaaccctgtagatgatctgttgaatgcccaaccagcagccacatcagatttccatgcacataactcatctagtgtggcacaggagtctaagatagtagacgaaaaatgcaccaatgaggacaatttctcaagagttacatctgttgaattgcgtcttcagctggaggagatgcatgaggaaaatgatagacttatggggttgtatgagaaagctatgcaggaaagagatgaattcaaacggaaaattttagagcaaagcgactctgaagctgtaaaacatattcagttggacgagaaagatgtcgaaatgagtgaagcagctgagaatcctgaagtgaaacatattcatgactccacaattgcagctttgaaagaagtgctgcagattgttcggagtaagttggagcttgtccaagataaggttgtgtctgctcaggatgcagtaaaatattttaaggcactcgaaatagctagtggtaaggccgaagaactttctgcaagaattgagcttcagcgtctaggtgcgcagcgtggtcaggaagaaatcactttcctgaagtctgtgctatcagaatcacagaagaagaaaaatgcttttgaaggcaagtatttcttgcctgcagcatcatgttggaacttggttttgaagaccaaaagtcttgcggagtccaagtttgatgccagctttggatcaatgaatcagaagaaagaacagttgaatcatctccaaactcgcaaaattgaactatctgctgcaagaacgagagcacgtgaatctgaaactgagttgaaaagcaaaattgatggccttaaagcgaaacttcgcgctcatgaagctcaaagaaaggaggaagaaaaggtcctgtttgctattgataacctggatacttccactacactaatgcataaacccaagaactatggcaaggcaaccgacctgctgaaatctgaggaggatcggatgaagcttctgtgtgaactacagaaggcccgcgaacagcgctccatggtacataaggaaataagaagcatgaatgagtgtgattatattgatcgtgagattggagtccttgaagcagaaatagaggattcctgcatctccatactggaaactgacattgagaagtttgtccgtgacaacactttagcagagatttgggagggtagcgcaaaggatctggaggcattgctggtcgattaccaagactgtgttttccaagtcaacttgaaggaggaagagatcaaggtgtgcagtgagtccttgcagtatcaagccagggacatggataaacttcagtcgaagctgaaccaagcgatccgggagctgggtgagcttctgcaagatagaagaagcctaaccgcttgcagtctggatgaacccacgctgcccgttggtgaaaaggtggcagcagaccttgaggccgtccggattcatgtcgatgaagctaagcagcttttgattctcgacaaccaagctaattcatgaacctgcgcagctagtttcaggtcccttataaagatgcgacgagtgacaggctagtctgtcttggcttctgctgttcagatccttagtacgtagtagcaagacatcagagatgggaagctgcggaatttgcttcattagttggaagctatctgaagccgaatctgctgattcttttttccgtggatcagctaccttcttctggtggtcttgcttcgagtcaaaacaacaggtcctgcaagccactgttccggatccgatttctcctctggtgtacacttcaagatggagcggagaaactgatccgacttaggcttgaccttttgcttctgtaactctccagagactggtagcaactagcaaccagtgggtggacttgtatcacaacttaatctgagccaggtgtcttattttatttatgctataagtgcacaaatgctgcactccagtttcttgtagaaattttcgggctgatcttgaattttacctgctgaagagtttccgtgttctgctgctgtactgtaaacaggtgtgccaggtttgtagggggaccccctggattctgtggtc

SEQ ID NO: 90615 - DNA, 4643 bp, Zea Mays
atgcatctggacggcgtcgacgacgagctcggaggcggcagctgcgccccctcccccgcgcgctttgagctccaagaggatccttccttctggaaggacaacaatgtgcaggttgcgatccgtatccggccgctgagcggcagtgaggtgtcgatgcaggggcagaagcggtgcgtcaggcaggatagtagccagagccttacctggattggacaccccgagtccaggttcactttcgatcttgtcgctgacgaacatgtcacgcaggagggcatgttcaatgttgccggggtgcccatggtggagaactgcatagctggctataacagctgcatgtttgcttacgggcagactggaagcggaaaaacacatacaatgcttggtgacatagaaaatggaacacggaggaacaatgtgaattgtggtataactcctcgagtgtttgagcatctctttgaaaaagaattaaggagagatgaaaagctcatgtttacttgtaaatgctcatttttggagatttataatgagcagattctggatctgctcaacccaaattctgtaaacttgcagataagggaggatgccagaaagggtatacatgttgagaatttgacggaacatgaaatctccaatgctcgagaagcgctgcaacaacttattgagggagcagcaaacagaaaggtagcagccaccaatatgaaccgagcaagtagccgctctcatagtgttttcacctgccttatagaaagtaagtgggagtcacaaggtatcaagcaccaccgcttttctcgactcaaccttgttgaccttgcgggctcagagaggcaaaagagctcaggtgctgaaggggagcgattgaaggaagctaccaacatcaacaaatcactatcaactttgggacttgtcattacgaacctaattgctgtgtcaaacaaaaagtcacagcatgttccatacagagattcaaaattaacattcctcctccagcttccattccattttgaaagttacacatttgatatttctcgctttctatccagttgtgctgctgagacattaagcacattgaaattcgcgcaacgagctaaatatataaggaataatgctataattaatgaggatgcttctggtgatgttcttagcatgcgtttacagatccagaaccttaagattatcattcatcttaaacttacctgcttttgcagaaaagtaatcagccgtttgcaaggacaattgggttctgataaaacagaaagcattgcctctcatgggtttgtctgcgagtcccctagcacattcaaatgggatcagggtcatggcatgttcactccacttacttttgataaaagggctacacagaggaacgattgtgatgctgcccttgtcgctgcttttaggagggaacaagagaaggaagcacaattgaaggcagtaatagatgcaaagcagactgctgaacagctggtagctcaaaagacagaagaggtaagaagtttcaagatgaggcttaagtttcgtgaagaacggatcaaaagattggagcaggttgcttcagggaagttatctgctgaagcacatcttttgcaagagaaggaaaaccttgtaaaggaattagaggtcctgcggggtcaattagatcgtaatccagaaattacaaaatttgcaatggagaatctacaattaaaggaagagctacgaaggttgcagtcatttgttgatgaaggtgaacgagaaatgatgcatgagcaaatcattgttttacaagataagctgcttgaggcacttgactggaagcttatgaatgagaaggaacctattaacaagggtctctcattatttggggagtcagctggcgatgaggaaaatgagtttcttcgtttgcaggctattcaaaatgagagagaaattgagtcgttgcgtaaaaaaatgacattctgccttgaagcaaaagataatcttgaaaggcatgtcaatgagttgaccacagagttggagcttacaaagaaacacaacaacacatataaagagttcaaggctgcccagctccaggagcaaggagaagcagatttacataacttgtctgacgctcagatggaacttaagactttggttgatgcaatagcttctgcgagtcaacgggaggcagaagctcatgaaactgctatcggtttggccaaagagaatgaagaattgaggctgcagcttaaggttttgattgaggataacaagagattggttgagctctatgaacacactgttgtcaatgttgaggcaaatcaagatggaaaccctgtagatgatctgttgaatgcccaaccagcagccacatcagatttccatgcacataactcatctagtgtggcacaggagtctaagatagtagacgaaaaatgcaccaatgaggacaatttctcaagagttacatctgttgaattgcgtcttcagctggaggagatgcatgaggaaaatgatagacttatggggttgtatgagaaagctatgcaggaaagagatgaattcaaacggaaaattttagagcaaagcgactctgaagctgtaaaacatattcagttggacgagaaagatgtcgaaatgagtgaagcagctgagaatcctgaagtgaaacatattcatgactccacaattgcagctttgaaagaagtgctgcagattgttcggagtaagttggagcttgtccaagataaggttgtgtctgctcaggatgcagtaaaatattttaaggcactcgaaatagctagtggtaaggccgaagaactttctgcaagaattgagcttcagcgtctaggtgcgcagcgtggtcaggaagaaatcactttcctgaagtctgtgctatcagaatcacagaagaagaaaaatgcttttgaaggcaagtatttcttgcctgcagcatcatgttggaacttggttttgaagaccaaaagtcttgcggagtccaagtttgatgccagctttggatcaatgaatcagaagaaagaacagttgaatcatctccaaactcgcaaaattgaactatctgctgcaagaacgagagcacgtgaatctgaaactgagttgaaaagcaaaattgatggccttaaagcgaaacttcgcgctcatgaagctcaaagaaaggaggaagaaaaggtcctgtttgctattgataacctggatacttccactacactaatgcataaacccaagaactatggcaaggcaaccgacctgctgaaatctgaggaggatcggatgaagcttctgtgtgaactacagaaggcccgcgaacagcgctccatggtacataaggaaataagaagcatgaatgagtgtgattatattgatcgtgagattggagtccttgaagcagaaatagaggattcctgcatctccatactggaaactgacattgagaagtttgtccgtgacaacactttagcagagatttgggagggtagcgcaaaggatctggaggcattgctggtcgattaccaagactgtgttttccaagtcaacttgaaggaggaagagatcaaggtgtgcagtgagtccttgcagtatcaagccagggacatggataaacttcagtcgaagctgaaccaagcgatccgggagctgggtgagcttctgcaagatagaagaagcctaaccgcttgcagtctggatgaacccacgctgcccgttggtgaaaaggtgtgccagccggcggcaacctgtgcggggagcgccaagggctccaggaaagaatcggcggcgggctcgcgatcgggaaggggagcggggcgcatgcgcgagcactggcacggcgacggcgacggcgacggcgaggacgagcatgagccccagccggggtgcggggagggcgcggggcaggcggcggcgaactgcgcggcggtgtgctgctgctgcccgctggcgctgctcgacgtgctgctgctcgtcaccgtccggctccccgcgggcgtcatgcggcgggtgaggaggaggcgccggcgccgccgcggccacggaggtgccggagccaaccggaagaggccggcgcccgcgtcgccttcgggaagcagcggcaaggcgatgatcggagcggcgacgctagacatcgacgaggaggcgcgcggcgaggtggagtcggcggcggcggcggagctggagcgcgagatcatgagctcgcacttctacggcgccggcttctggcgcagcgtctcctccaactccagctcctcgtccaggcgctaccaatagatgcgcgttctggcgtaaatagtgagcactcggtcgctactaaactacccacgattactccatctgttcttggagtctcctccaactgccagtcagcgcagcatgcatggcaaaaggagcagcagccttcggcatcgtgcaagtgcacttattctgaatggacacgtgcgaaactggcacgtgcgggttgcatcattgtactgctacgccattgtctcgagcatggaccacgccagcagctgcagcttgggatggagaagcgaaaggggtcagtgattgtgcttaggtttttcatctctctcctaatcttttttgtgtaactggagcaggaaatgctgaaacctcaagcttctgtccaaacgatgtactcctatttagtattattgattgattgagaggccgatcga

SEQ ID NO: 90616 - DNA, 375 bp, Zea Mays
atggcgatgtgcgacgctcagcacagcactagacttcatttagagagaatgcaccaagctgctatacccgacagatacccgatatccgcccgatacccgatgggtacgggcacgggggttgccgctttggggctcggcacctacggcgcgcacatgttccgccccaagaaccccgcgtacaaagaggtttggcacacggcgtccctgtaccatctcgtccacaccgcggcgctgctcggggcgcccatcaccaaagcgcccccaacgttttcggagggctcctcactgctggaattgtgctcttctctggaacttggacatgccagtgaaattgcgcctctggttaataattcaagctgtatgatgtttatgtaa

SEQ ID NO: 90617 - DNA, 651 bp, Zea Mays
atcttcacgctagtagtgtatcataatacggtcagcgctgactagcaaggagccaagcaggacataatactgaagcaggctgcggctgcggctgcagcaacaagtcaaggaggttgaaggcgaattagagagaagaggaagatgttggcggcgacggatccgatgctgtggcacaaggtggccgccgtctccggggttgccgctttggggctcggcacctacggcgcgcacatgttccgccccaagaaccccgcgtacaaagaggtttggcacacggcgtccctgtaccatctcgtccacaccgcggcgctgctcggggcgcccatcaccaaagcgcccccaacgttttcggagggctcctcactgctggaattgtgctcttctctggaacgtgctacaccgtggcttatcttgaagacaggaagttttcttcaccggcaccattggggggctttgcgtttattgctgcttgggccagcctcctcttctgattaaattgtgcttttccaagaaaacaaaaaaagtcataaacctctctatatggtgttttatcaggttgtgaaaaatatacttgtaaagtgtatacagtggacagtatgcgcctctgtttaataattcaatctgtgattcctatgtttctattctatgata

SEQ ID NO: 90618 - DNA, 4167 bp, Zea Mays
atgagtgataggataatcatgataacatcaccatctaagagggatgatgccagagatattggagatattgatttgcagtcctacatggacttggagaacatcgcgttctaccaggttccagcaaatttggaatcagccttgtccatggaaagtgagagatcactaggaattcatgtctgcatggacaacagtggtgtcaacttcctgcacaggtttcttcgtcatcttgtggagtataaagagaattacatgaatttgagaaacatcctattccatggtattgaatggcaggttcaagggttgcaacttctctgttcacttttaggccctggctcaagcgtgaagcaggtggaattcaagaagaatgttttcagcacaaaaccaggacatgcttttgttccactttcggagatgcttcaccagaacaacaccatcaaagcagttgttttttctgaatgtagaattggatcaactggagccacgttgcttgcttcagctttggcaaacaacagaagtgtggaggatttccaaatatgggaggactccataggatccaagggggcagaagaactctccaagatgattgaggtgaactttatgctgaagaagttgatcatccttgacaacagctccattacagtggctccacttatctctgctgtactcgcacgcaaccgtagagtggaggttcacatatggggacacggttgtggtacaaaaggtggcacgaacagctgtaaaattgttgaattcctgcctgagactgggagcatgaagatctacagcagcattagctcaacagggctgcaacgggttgcttgtgctctgccatggaataccacagtgacaacactggacatgtcaagtgtcccactaaagtccaaatggaccaaagagcttagaggagtccttgaacggaacaggagcctgaaaactgtgaagctcagcaagtgttcccttggggacaaagcagtggtgtatatagctgcagggctttttaagaacagctatttagagaacttgactttggatggaaatagatttggtggagtaggggtggagcatttgctatgccctcttagcaccttttctccacttcagagacaagccaataccacattgaaggttttgagttttggaggagagcgagcgaatataagcaagtttggtgtacctgctatcttgcagatgttggagacaaaccagagcctaattcagctggcaatatgcaatgatgcaagtttgaagccaaatgatgttgtcaaaatctttactagtttagagaggaatgccactcttcgtagcttgtctttgagaggctgtaagggagttgagggggaggcaatcctgcagaccattatgagcactttagaagtcaacccttggattgaagaaattgacctccacggaacacctttgcatgttgctggtaaaacggaccaaatttatgagaagctctgtcaaaatgagagtcttgttctgccaaacgattttcttgatttgccactaagtgctcctacttgctgccgggtttttctatgtggtcaggaatcagcaggtaaaagcacgttacataactccataaatcagagcatgaacccattgaagtcgcctcacataaatataacaagtactttgatgaatccggttttgcaaatggagtacaccaatgagaataaaagtagtgttttctttgatggcaacacaaaaatgacaatgtacaatcttgatggacaagaggagggttttccctcacatgattttatgtttctggtgcatggtggtccatgctttttcatgattgtatctagtttggttctgaagcctgctaataggtatcccaaaagcatagagcagattgaactggagctaatatattggcttaagtttttggtttcaaattctaagagagtctcacaattatttcttcccagtgtaactatagttctcacccattatgacaaggtagctcatctgccagaagggctacagccaattgccacacttgtacaaaggctcagagaagaattccattcatatgcagaaatttaccccactgtttttgccgtggatgcaagatcattggtttcagtaagtagactcacccatcacttgaggatgacaattaagacaatcctccagcaagtacctcaagtttatgaagtatgcaatgatttggttagagttttgcatgactggaggttgaagaataataaagctgtaatcaaatggtctgagttccgtgagatatgtcagctcaacattccagagctaagattgagatcaaggcgtgataatgtagagaaagtggacacaagaagacgtacggttgcaaaatcactgcataacttgggtgaaatcatattttttgaggatcttggagtactgatcttggattgcgactggttctgtcgatatgtccttaaccaactggctacactgaaatcaatcaagacagaaagaagtggttttatccgcaaacaagagcttgagaagattctacaagagaagctgtgcaaccaaattcaagggtcaaactggagagccggtgcatctttccagggcaatgatgtcataaatttgctgttgaagcttgaattgtgttatgaacaggaacctggaaacccagacacattacttctagtgccatcaattcttgaggaaagcaaagaaggtgctcagcagtggcacttggccatgccagagtgcagatatgttggaaggtgtcttaaatgcacagatatacatatgtttttgacaggcgatttctttccaaggcttcaggttcgtttgcagaacaagatcatgtgcatgggacaacaacagggtgcactctacatcttggagaaaaatcttatttatacagtggtcaatagtatccatgtcagagtggtgctgggaagtacattagagtcatccgtcgatgtgcttgcatgctccagcaaaagtgttactgacatggtgaggatattccacaagttaataatcccaaccatactaaacctgtcttcaagtttgatgttcgaggaaagcattatcaggccagactgtgtaaaatatctcataccgcataggttcctccaaacacagcagctgcctctgaagagaatgaagcaaattcttttgtcattgcctgcagaaagcatgtatgattacgagcatacatggagtgccattgaaagcaataaaaggatcatcttacaatcaggatcagatcatgccagagaattgctatcagatgatgatttccatgaggttcttcaccgtagatactatgatctacagcacctcgcaactgaacttgctgtcaaccctgacaatcagcagcaacatgaaatcatccccgaaacagatgtggttgatccttccatattaggcattgcaaaaggtgttgagatggttctacaaagattgaagagagtggaacaaggaataagggacctcaaggaggaaatcgcaagcttgaggtactatgagtatcaccttttgactgaactccacaggaaaatggactacatgatgaattacaacacccagttggaggagaggaaagtgccacagatgttttatcttgttagcctggacaaccggtccaaacagctggtcacaagaatactgcctgggatgcggtccttacgggtgcatatgctatgtgaattccgtagagagatgcatgtagtggaagatcagctcggctgtgacctgattcaagtggacaaccagacggtgaaatccttgctaccttacatgagtaagttcatgaagctgctgacctttgctctgaagatcggcgcgcatttcatcgttgggatgggagagatgatacctgacctgagcagggaggtggtgcgcctgctggactcctcggccttgtacggcacaactgcatctgccatgtccgtgggggctctgggcgcggcagcactgtatggcaagtcaaggaatggtagcacgagcgacatgggagaggatatgacagcagccaggcaatggcttgtggatttcttgaaagggcaaggggttctgacggggatggacatagcacagagatttggcctgtggcgtgttcgatacagagatgacggccacattgcatggatctgcaggaaacacatcgcagcaagggaagaggaaatcttcgagctgccactttgagcatccagaggc

SEQ ID NO: 90619 - DNA, 750 bp, Zea Mays
gaacaccgggcagcccttgacggcgatgcccggcgcggtggggcaggaggcgagtgggcagtgatccacctccgtgccccaccacttgagctcgtggtgcgcgttctggagggcgaagaagatgagcacacccatgaaggcggtgccggcgtcgagcgccgccgatagcacgtagttgtacttctgccaccaccccttgcggtacctgaagacgaagtagttgaagatggtgcccgtcaccagccaggtggcgatgttggtgggcgtggccggcggcatcccggcgaacccgtacgagatgacgggcacgttgatgagtgcgatccacttcttctccgggaacgccctgctcagcagccacaccggcacggggagcaccgcgccgaccaggaacagccacaccaggttgcggtacagcccgtgctggccgaagagccgccccgggccgatcaggccccagatcaccgacgcgtcgaacgtgacgcggtacttggggcacgtccacgggctgtccgggtgcagcgcctccacgtcgcagatgttctcgatgttgtccagcatccaccacgccaccgccaggttcaccacgccggcgaccaccgtcccgaccagctgcggcgcaggtttagggccagtttcattcatatgcgggcggcgtctcccgaaaggtctgctgaagggggacgacgacgacgacagcgaccactacgtacctgggccgtgtacatgcaccgtggggggatcttcatg

SEQ ID NO: 90620 - DNA, 219 bp, Zea Mays
atgtcgccggcggcggggaggggaagggactggaccgctgaaaacgagcaagtggtgtggcggcgaggcgcatgggcaatgcagaaccctgccccgcctgcggagaggcggagggccgaggcacaagtgggtgatgcggagaagaagggcatccggttctgcgaggacagatgggtggtggccgtgcgtcgtgcctgttctgcccagacggctgcctga

SEQ ID NO: 90621 - DNA, 2201 bp, Zea Mays
gtgagtgtcagacatccccttccccgtttcaatcgcgaccacgcgctcgcagccgcaatcgactcgacccggcccgaccgagctccccgtgcccaacaaaccctcacaattaccagttccccatcgccgacgccgtacaccggagctcgaccgctccgcgtggtgtccgattctacttcgtcgaagactacaagcggcctcctagagttccacctcaactgcgcaggggaagggaggctcccaacgcatccccgccgacctcaacgccgacggtcctttcctaacccgcagccgccggccgcagtctctctcttctggtccagtgggggctgctatcttccaggaatattggagatgtgccttcaacactctagggctcgattgtctccagatgagcaacttgctgcagaaaaaagttttgccttgtattgcaagccagttgaattgtacaatattatccagaggcgagctattaaaaatccaccttttgttcaaagatcccttctttataagatacaggcaaggagaaaaaagaggattcagataactgtatcactttctgcaagtacaaatacacaagcacagaatatctttcccctttatgtacttttagctagacctaccagtaatatttcgcttgaggggcattctccgatatatcgattcagtagggcttgtttgcttacaaattttagtgaatttggaaataaagacaaaactgaagccacattcatcatccctgatgtgaagaatttatcaacctcccgtgcttgcaaccttaacattatatttattagccgtgggcaagtaggacaaattattggtgaagatagctgttccgggaatgatgtggaaggatcttccctccaaaagcttgaagggaaatgttcctggggtaaaatgccgactaatttacttgcgccctctttggagaaatgtgtgactttaagtacaggaaatgctgtggatttgacttctacagttacaatgaacccaagcttcttagagccaaaatttctggaacaagacagttgcttgacattttgctctcataaggttgatgctacgggttcataccaattacaagtatgcatatccgcagaagaggctggcgcaagagaattacttttatctccttattattgcaattactcatataataatgtcccaccttctctattaccagaaatcataaggttgagagctggaaatgtactttttaattacaagtactacaacaatacaatgcaaaagactgaagttactgaagatttttcctgcccattttgcttggtaccatgtggaagcttcaagggcctaggatgccacttaaattcatcacatgacctgttccactatgagttgtggatatctgaagagtgccaggctgtgaatgttagtctgaaggctgatgcctggaaaactgagtttgtggcagagggagttgatccaaggcatcaaacattttcctactgctcgaggtttaagaagcgtagaaggttggaaaccacagctgagaaattcaggcatgttcacccacatattatggaatcaggatcacatgaagatgcccaggcagggtctgaagatgactatgtgcaaagggaaaatgggctttctgtagcaaatacttcagttgaccctagtcagcctgtacatgggagcaatctttcaccaccaacagtgctacagtttggaaagtcaagaaaactatctgccgagcgatctgaccccagaaaccgacaactgttgcaaaagcgtcagttcttccattcacacagggcacagccaatgccattggaacaagtcctctcagatcatgatagcgaagacgaggttgatgatgacattgccgactttgaggatagacggatgctcgacgattttgttgatgttacaaaagatgagaagcttattatgcatatgtggaattcatttgttcgaaagcaaagggtgctagccgatggtcatataccgtgggcatgcgaggcgttctccagatgccatggacaacagcttgtacaaaaccctgccctgctgtggggctggcgtttcttcatgattaaactctggaaccacagccttcttgacgcccgcgccatgaatgcttgcaacacaatccttcaaggctaccaagacggaagtgcggaccccaagtaaatctacaatccagagaaatcgttggccagcgtgtgtaagat

SEQ ID NO: 90622 - DNA, 2561 bp, Zea Mays
gtttcaatcgcgaccacgcgctcgcagccgcaatcgactcgacccggcccgaccgagctccccgtgcccaacaaaccctcacaattaccagttccccatcgccgacgccgtacaccggagctcgaccgctccgcgtggtgtccgattctacttcgtcgaagactacaagcggcctcctagagttccacctcaactgcgcaggggaagggaggctcccaacgcatccccgccgacctcaacgccgacggtcctttcctaacccgcagccgccggccgcagtctctctcttctggtccagtgggggctgctatcttccaggaatattggagatgtgccttcaacactctagggctcgattgtctccagatgagcaacttgctgcagaaaaaagttttgccttgtattgcaagccagttgaattgtacaatattatccagaggcgagctattaaaaatccaccttttgttcaaagatcccttctttataagatacaggcaaggagaaaaaagaggattcagataactgtatcactttctgcaagtacaaatacacaagcacagaatatctttcccctttatgtacttttagctagacctaccagtaatatttcgcttgaggggcattctccgatatatcgattcagtagggcttgtttgcttacaaattttagtgaatttggaaataaagacaaaactgaagccacattcatcatccctgatgtgaagaatttatcaacctcccgtgcttgcaaccttaacattatatttattagccgtggtaagatgtgcattttatggcaagtaggacaaattattggtgaagatagctgttccgggaatgatgtggaaggatcttccctccaaaagcttgaagggaaatgttcctggggtaaaatgccgactaatttacttgcgccctctttggagaaatgtgtgactttaagtacaggaaatgctgtggatttgacttctacagttacaatgaacccaagcttcttagagccaaaatttctggaacaagacagttgcttgacattttgctctcataaggttgatgctacgggttcataccaattacaagtatgcatatccgcagaagaggctggcgcaagagaattacttttatctccttattattgcaattactcatataataatgtcccaccttctctattaccagaaatcataaggttgagagctggaaatgtactttttaattacaagtactacaacaatacaatgcaaaagactgaagttactgaagatttttcctgcccattttgcttggtaccatgtggaagcttcaagggcctaggatgccacttaaattcatcacatgacctgttccactatgagttgtggatatctgaagagtgccaggctgtgaatgttagtctgaaggctgatgcctggaaaactgagtttgtggcagagggagttgatccaaggcatcaaacattttcctactgctcgaggtttaagaagcgtagaaggttggaaaccacagctgagaaattcaggcatgttcacccacatattatggaatcaggatcacatgaagatgcccaggcagggtctgaagatgactatgtgcaaagggaaaatgggctttctgtagcaaatacttcagttgaccctagtcagcctgtacatgggagcaatctttcaccaccaacagtgctacagtttggaaagtcaagaaaactatctgccgagcgatctgaccccagaaaccgacaactgttgcaaaagcgtcagttcttccattcacacagggcacagccaatgccattggaacaagtcctctcagatcatgatagcgaagacgaggttgatgatgacattgccgactttgaggatagacggatgctcgacgattttgttgatgttacaaaagatgagaagcttattatgcatatgtggaattcatttgttcgaaagcaaagggtgctagccgatggtcatataccgtgggcatgcgaggcgttctccagatgccatggacaacagcttgtacaaaaccctgccctgctgtggggctggcgtttcttcatgattaaactctggaaccacagccttcttgacgcccgcgccatgaatgcttgcaacacaatccttcaaggctaccaagacggaagtgcggaccccaagtaaatctacaatccagagaaatcgttggccagcgtgtgtaagatctgccggttccggcggttatttctgaaccccaaaacagctatgtgaagaactggaatggggccatagcggcatttgttttaaggtttagggttactccatttttccaagggaggaaactaatttcccttggaaaaatgaaaatccattgggaaaaatgagtttcccaaactagccattaaaagggtagcttcctcccacctagggggaaaaaaactaggagggaaaagctggatccttggccgagacaatcatcattgcttcattcgtgattcggttgtatttatcggtaccagttgttgttggcatgtggagtttgtatggatgataatgataaatgaagtgattcactgcagcccttgtatagtt

SEQ ID NO: 90623 - DNA, 1000 bp, Zea Mays
tattttttttttgccttaggacgctcgtttagaaccgtgcacgtctctcggtctaaaaaccgcagcattctttggcggctggggctggctttgggtagggcgccatttgtttttgctgggtttgttttgttcacgccacgccacgcgccgccctctcggggtcaaacggtagggtgagcgagggacaagatatggcaatttttccatcgcccattctccccagtcctcaccccccacagaaaaggaagatgatctcccctcttgcctcacaagatcgacggcacccaaatacacaaggatcggatcaccaccgccctcacccaaatagaaatagggtgctggaggctgaggttgtgatgtatcacccaaatagaaatagtgcgttggtggattggtttggttgccggtatggcgatacgcgggccgctgtgcgcgccagtgcgggtgacgacgggttcctgcctgcctgccatcgtctcattgaacgccggccgttgctgtggacccgaacgaacggatcgcgagttcccgtcgcaacgtgccgccactcgcaaacgacgaccgaacagacggcggcgtggcctgcgggcatggcggcactgggccgcgatccatagcgtcgtgcacggcgtgggccagccgcagctatgcctatctcgccgccgtcgtcgtccctcccagcgcacgtttctgaccccgaggcccgagcgatgtgctacgtacggtgatcacagacacagagcaggtctcgatcgtagctttacgtactccccactcgctgttgttcctgtcatcccttccctcctgctgcctcttggtgatcgggcgggcacggcatatcatatgcaaggtcagagcgtgaaagaaatcgtctgaaaaaacaactgcttctgtgccttaacttgttagccagaaggatccagaagaaagagcactaccaaggctcggcacgacggcaccatccatcggcgtcacgaaacgaaccgttccatccctcacc

SEQ ID NO: 90624 - DNA, 1431 bp, Zea Mays
atcctccccctcccttcctctcccttctcttctcttcttcacttcacagcacgatcgagccagttgcaatcacacagacgatgccgaccatcatcgtctcggtggacctggaatgcagccgctgccgcgccaagatccagagggtgctcaacaggatccaaggtctgttcgcgcttgcttgctactcctctctgttgttcgctcttccctttccgcttgtacaggtaggtctcgagacggttcgcgttgatcgcaactgataagtttcctgggacgacggacggacgcctcggcttgcagagaagggcgagttctgcatcgatgacatcgacttcgacgagaagaacaacaaggtgaaggtcacggggcccttcgacccggacaagctcgccgacaagctgtgctgcaaggcgtgcaagatcatcaagcagatcgagatcgtcgagcccccgcccccgccgccgcccaagcccaaggaggagccgaagaaggaggagcaagccccgccgccgccggagaagaaggaggaggccgccccgcccccgccggcgaaggtggagccgcccaaggaggagccacccaaggagaagcccccgccacccaaggaggagccgcccaaggagaagccacccccgcccaaggaggagaagcccgccccggcaccgcccaaggaggagaagcccgccccgccgccgcccaaggtggtggaggtcccctacccgtggccgtacccgtacccgtaccctgcgtggccgtccgactgctgctgccaccacggccacggcgggtgccactgctgctcctgcggcaaggcccccgagccggccccggcccccgccccggccccacccccgccgcagtacttcccgcagtacatgccccagccgtacccctgcaacccctgcggcggcggctaccggatcgtctgcgaggaggacccctcctacgcctgcgccatcatgtgattcgtttattatcaatatcatcccttgatgagtgtaccgtccgtgtgcgtaccatggccttaattaccattatacccaaccccaccctaaaaaaaaccccagtacgtcgtctcatcatcattccgtacctcctcctgtataatcgccgtacagattcatcatatatatactctatacatatatagcatcatgtatacaccgccgtaccccctgtcatctctttatgtagattgtgcattatgttctgcgcgcttcgttttggtaattacagtatatgccagtcaggctaagtgagagaataaaataagcaatgatgctgttgttttttttttcttctgtgtgtgtaaagaaaaagggcaaggtgagagagttcatccgttgatggcagcagaaatgtcctaccttgcacaccagcatccctttctttatgttgcacccagggaaaaaaaaataaacagttgctttt

SEQ ID NO: 90625 - DNA, 1303 bp, Zea Mays
atcctccccctcccttcctctcccttctcttctcttcttcacttcacagcacgatcgagccagttgcaatcacacagcgcagacgatgccgaccatcatcgtctcggtggacctggaatgcagccgctgccgcgccaagatccagagggtgctcaacaggatccaagagaagggcgagttctgcatcgatgacatcgacttcgacgagaagaacaacaaggtgaaggtcacggggcccttcgacccggacaagctcgccgacaagctgtgctgcaaggcgtgcaagatcatcaagcagatcgagatcgtcgagcccccgcccccgccgccgcccaagcccaaggaggagccgaagaaggaggagcaagccccgccgccgccggagaagaaggaggaggccgccccgcccccgccggcgaaggtggagccgcccaaggaggagccacccaaggagaagcccccgccacccaaggaggagccgcccaaggagaagccacccccgcccaaggaggagaagcccgccccggcaccgcccaaggaggagaagcccgccccgccgccgcccaaggtggtggaggtcccctacccgtggccgtacccgtacccgtaccctgcgtggccgtccgactgctgctgccaccacggccacggcgggtgccactgctgctcctgcggcaaggcccccgagccggccccggcccccgccccggccccacccccgccgcagtacttcccgcagtacatgccccagccgtacccctgcaacccctgcggcggcggctaccggatcgtctgcgaggaggacccctcctacgcctgcgccatcatgtgattcgtttattatcaatatcatcccttgatgagtgtaccgtccgtgtgcgtaccatggccttaattaccattatacccaaccccaccctaaaaaaaaccccagtacgtcgtctcatcatcattccgtacctcctcctgtataatcgccgtacagattcatcatatatatactctatacatatatagcatcatgtatacaccgccgtaccccctgtcatctctttatgtagattgtgcattatgttctgcgcgcttcgttttggtaattacagtatatgccagtcaggctaagtgagagaataaaataagcaatgatgctgttgttttttttttcttctgtgtgtgtaaagaaaaagggcaaggtgagagagttcatccgttgatggcagcagaaatgtcctaccttgcacaccagcatccctttctttatgttgcacccagggaaaaaaaaataaacagttgcttttatcaa

SEQ ID NO: 90626 - DNA, 1298 bp, Zea Mays
atcctccccctcccttcctctcccttctcttctcttcttcacttcacagcacgatcgagccagttgcaatcacacagacgatgccgaccatcatcgtctcggtggacctggaatgcagccgctgccgcgccaagatccagagggtgctcaacaggatccaagagaagggcgagttctgcatcgatgacatcgacttcgacgagaagaacaacaaggtgaaggtcacggggcccttcgacccggacaagctcgccgacaagctgtgctgcaaggcgtgcaagatcatcaagcagatcgagatcgtcgagcccccgcccccgccgccgcccaagcccaaggaggagccgaagaaggaggagcaagccccgccgccgccggagaagaaggaggaggccgccccgcccccgccggcgaaggtggagccgcccaaggaggagccacccaaggagaagcccccgccacccaaggaggagccgcccaaggagaagccacccccgcccaaggaggagaagcccgccccggcaccgcccaaggaggagaagcccgccccgccgccgcccaaggtggtggaggtcccctacccgtggccgtacccgtacccgtaccctgcgtggccgtccgactgctgctgccaccacggccacggcgggtgccactgctgctcctgcggcaaggcccccgagccggccccggcccccgccccggccccacccccgccgcagtacttcccgcagtacatgccccagccgtacccctgcaacccctgcggcggcggctaccggatcgtctgcgaggaggacccctcctacgcctgcgccatcatgtgattcgtttattatcaatatcatcccttgatgagtgtaccgtccgtgtgcgtaccatggccttaattaccattatacccaaccccaccctaaaaaaaaccccagtacgtcgtctcatcatcattccgtacctcctcctgtataatcgccgtacagattcatcatatatatactctatacatatatagcatcatgtatacaccgccgtaccccctgtcatctctttatgtagattgtgcattatgttctgcgcgcttcgttttggtaattacagtatatgccagtcaggctaagtgagagaataaaataagcaatgatgctgttgttttttttttcttctgtgtgtgtaaagaaaaagggcaaggtgagagagttcatccgttgatggcagcagaaatgtcctaccttgcacaccagcatccctttctttatgttgcacccagggaaaaaaaaataaacagttgcttttatcaa

SEQ ID NO: 90627 - DNA, 498 bp, Zea Mays
caatagagaacacaagtgaagcctttattcgtcctcacagctcatcatcattcacatacagttatcggtcgacgttacgttacacctagccagctagcttatctctccaaagccaaacaaccaaatctatccgcactacacaggccgtgctagataccagaaccgaccaaccgatgtttcagtagcagccacttggctagctacaaccgagacttcgacacggcagaacactcgctgcagttccagcagcatgagggtcagaatttactcgtcgaaggcttggaccgcttgctgctgagctgggcgaccgggaactccatcaggatgatgaacgacgaggtgtcggcttctcgaaggtactgtaccgtgccgctcatcgttttcaccagcttctggcttatgtacaggccgaggccctccctggacacccctgggttgtgctggaacatctcctgtatcagggcctctggaacgcctggagctggatggacaatcctg

SEQ ID NO: 90628 - DNA, 1259 bp, Zea Mays
atagcccctcacgccagccgccaatgccccaatcccgtaatcgcagcctcgccccgctcgcatcttcctctccctctcagcactggtgctcaatctacaggttgtcccgctccctacacacccgccctccggtgtgaacctccatgacgtccacaaccactctccggtatgaatcccgcgtgcgcttacacgaagattggtaatagtggcgacccagtcgcagccgtggaccttctcctcctcatcgcttgctcgttgtcgtcttttgcctacgtctgcacccgacgctgctacccttcgctcacctgttcatcatcctttcagatctgctgtcgtgacctcatccagccgtgctgtggcagtggatcgaagttcgctccagctctgattgggggaaaatgactagggtatcaagtggaaaaacataatggtccaggttctactgcggcacctctttcaggctaagcatctaaacaacaatatgtaaattatccttttccaataaaatacatgcttaaatcgtggctgctaggcgaatggtcctactttggtcatcaaatgcaggttagcttaactttttctaatgcattattatttgtggtttccatcaaatgtacgttagcttatcttttagcaaatttgtagctgatgtcaattaactttttagtggaattttatctgctcattcttatattcaggaattccactactatatgtgccacttgaagttgttatgtcaaaataatatggtgaaaacgagcgtctattgggatctattttttatcttgcaaatgatcttcctgaaggaggtaatatattcttagatgaggtatatatcgtaatacttatagcataaacactcaagccactacaaactgccttcgtccccttcatcactgctaatgaccgtgacttggagacccgacagcggccctcgacgttgtcgccgccgagcccatgctggttccaccagtggtccaccacccggatgtggtccgccaagacgagcagtaacggtggcagcgaggcgaggtggtagatccagcaccgcttctgcacgaccatccattcctccacccagagcatgtacccaggcttgcctctcctcggggaacatgccgaggtcgtccgactggagcagaaggcgacatcgctcaacaagctggtcgaggagcagtgcgagagcataaacgatctcaagtccaaggctagtgctgatctccttccctgatttatgaactgcattgagtcgcgtgcga

SEQ ID NO: 90629 - DNA, 1396 bp, Zea Mays
atagcccctcacgccagccgccaatgccccaatcccgtaatcgcagcctcgccccgctcgcatcttcctctccctctcagcactggtgctcaatctacaggttgtcccgctccctacacacccgccctccggtgtgaacctccatgacgtccacaaccactctccggtatgaatcccgcgtgcgcttacacgaagattggtaatagtggcgacccagtcgcagccgtggaccttctcctcctcatcgcttgctcgttgtcgtcttttgcctacgtctgcacccgacgctgctacccttcgctcacctgttcatcatcctttcagatctgctgtcgtgacctcatccagccgtgctgtggcagtggatcgaagttcgctccagctctgattgggggaaaatgactagggtatcaagtggaaaaacataatggtccaggttctactgcggcacctctttcaggctaagcatctaaacaacaatatgtaaattatccttttccaataaaatacatgcttaaatcgtggctgctaggcgaatggtcctactttggtcatcaaatgcaggaattccactactatatgtgccacttgaagttgttatgtcaaaataatatggtgaaaacgagcgtctattgggatctattttttatcttgcaaatgatcttcctgaaggagattgatatgtcaagatacgcttgtttcatttgagctcaatgttatctgaaaatatatagactgccttcgtccccttcatcactgctaatgaccgtgacttggagacccgacagcggccctcgacgttgtcgccgccgagcccatgctggttccaccagtggtccaccacccggatgtggtccgccaagacgagcagtaacggtggcagcgaggcgaggtggtagatccagcaccgcttctgcacgaccatccattcctccacccagagcatgtacccaggcttgcctctcctcggggaacatgccgaggtcgtccgactggagcagaaggcgacatcgctcaacaagctggtcgaggagcagtgcgagagcataaacgatctcaagtccaaggctagtgctgatctccttccctgatttatgaactgcattgagtcgcgtgcgagtttattttatttatgattttttcgtggtggtaactagtgttggtaaacaaaagtttacccccacctttctgctgcttttttctacctcagggaggtttttgatgctcgtaaatattttaacttcgtatgttatttatttaatttttttatcttaactgttgggagaaaagatgaggaaaagcgagagatgggcgtgaatgttggtgctccttgctctgtgctattaactcttcaggtttccgtaggcaaaaaatatacctggacaaatatgcataa

SEQ ID NO: 90630 - DNA, 1320 bp, Zea Mays
atagcccctcacgccagccgccaatgccccaatcccgtaatcgcagcctcgccccgctcgcatcttcctctccctctcagcactggtgctcaatctacaggttgtcccgctccctacacacccgccctccggtgtgaacctccatgacgtccacaaccactctccggtatgaatcccgcgtgcgcttacacgaagattggtaatagtggcgacccagtcgcagccgtggaccttctcctcctcatcgcttgctcgttgtcgtcttttgcctacgtctgcacccgacgctgctacccttcgctcacctgttcatcatcctttcagatctgctgtcgtgacctcatccagccgtgctgtggcagtggatcgaagttcgctccagctctgattgggggaaaatgactagggtatcaagtggaaaaacataatggtccaggttctactgcggcacctctttcaggctaagcatctaaacaacaatatgtaaattatccttttccaataaaatacatgcttaaatcgtggctgctaggcgaatggtcctactttggtcatcaaatgcaggaattccactactatatgtgccacttgaagttgttatgtcaaaataatatggtgaaaacgagcgtctattgggatctattttttatcttgcaaatgatcttcctgaaggagattgatatgtcaagatacgcttgtttcatttgagctcaatgttatctgaaaatatatagactgccttcgtccccttcatcactgctaatgaccgtgacttggagacccgacagcggccctcgacgttgtcgccgccgagcccatgctggttccaccagtggtccaccacccggatgtggtccgccaagacgagcagtaacggtggcagcgaggcgaggtggtagatccagcaccgcttctgcacgaccatccattcctccacccagagcatgtacccaggcttgcctctcctcggggaacatgccgaggtcgtccgactggagcagaaggcgacatcgctcaacaagctggtcgaggagcagtgcgagagcataaacgatctcaagtccaagagggaagctgaaccttgttcttctgccatcatctagcatgcggcttacctttgtttgtgatgatggttatccagagcaactagctctcttgagcaacgactttgaattttcggaagttatgattgaagaaatatcagctgataattctggacgctctttcctaatcagaatttcagaatctaaagtgttttactactggtgtgctgagaagtcgaaggaagattgaatggaacttcttgcaaaggtttgtatg

SEQ ID NO: 90631 - DNA, 1828 bp, Zea Mays
atagcccctcacgccagccgccaatgccccaatcccgtaatcgcagcctcgccccgctcgcatcttcctctccctctcagcactggtgctcaatctacaggttgtcccgctccctacacacccgccctccggtgtgaacctccatgacgtccacaaccactctccggtatgaatcccgcgtgcgcttacacgaagattggtaatagtggcgacccagtcgcagccgtggaccttctcctcctcatcgcttgctcgttgtcgtcttttgcctacgtctgcacccgacgctgctacccttcgctcacctgttcatcatcctttcagatctgctgtcgtgacctcatccagccgtgctgtggcagtggatcgaagttcgctccagctctgattgggggaaaatgactagggtatcaagtggaaaaacataatggtccaggttctactgcggcacctctttcaggctaagcatctaaacaacaatatgtaaattatccttttccaataaaatacatgcttaaatcgtggctgctaggcgaatggtcctactttggtcatcaaatgcaggaattccactactatatgtgccacttgaagttgttatgtcaaaataatatggtgaaaacgagcgtctattgggatctattttttatcttgcaaatgatcttcctgaaggagattgatatgtcaagatacgcttgtttcatttgagctcaatgttatctgaaaatatatagactgccttcgtccccttcatcactgctaatgaccgtgacttggagacccgacagcggccctcgacgttgtcgccgccgagcccatgctggttccaccagtggtccaccacccggatgtggtccgccaagacgagcagtaacggtggcagcgaggcgaggtggtagatccagcaccgcttctgcacgaccatccattcctccacccagagcatgtacccaggcttgcctctcctcggggaacatgccgaggtcgtccgactggagcagaaggcgacatcgctcaacaagctggtcgaggagcagtgcgagagcataaacgatctcaagtccaagagccatccgattctgggcccagaacactttgccaaacaaaaagttatcgctcttcatccttgataggctacagaagaaggatacatatgctgtattttcgtagcctgttgatcctgaagagagggaagctgaaccttgttcttctgccatcatctagcatgcggcttacctttgtttgtgatgatggttatccagagcaactagctctcttgagcaacgactttgaattttcggaagttatgattgaagaaatatcagctgataattctggacgctctttcctaatcagaatttcagaatctaaagtgttttactactggtgtgctgagaagtcgaaggaagattgaatggaacttcttgcaaaggtcttcaagggagaagcggcttaaaatgtgtgagcaggtattttcggactcgtaccagaaagggaaaagctacaaaggttgacacagcgccgaagctgtgaagcaggaaagcttcggcatgttcgcagaaaagggaaccgacttaaagatgaaaaggccatttagacctcgatagagtgctatagaattatcaccaaatgtaaagggcatgtatgtaattttgtatgggttgtaccccgtgcctataaataggtgaacagtacccccgtactgttcacgttgacttggcatttgcttttgcgtcacacttgtattttcatctccttccaaaccgaaggtacatttataatttgatattgtctctatttctctataatgatataataaagttaaatg

SEQ ID NO: 90632 - DNA, 1578 bp, Zea Mays
cgccagccgccaatgccccaatcccgtaatcgcagcctcgccccgctcgcatcttcctctccctctcagcactggtgctcaatctacaggttgtcccgctccctacacacccgccctccggtgtgaacctccatgacgtccacaaccactctccgatctgctgtcgtgacctcatccagccgtgctgtggcagtggatcgaagttcgctccagctctgattgggggaaaatgactagggtatcaagtggaaaaacataatggtccaggttctactgcggcacctctttcaggctaagcatctaaacaacaatatgaattccactactatatgtgccacttgaagttgttatgtcaaaataatatggtgaaaacgagcgtctattgggatctattttttatcttgcaaatgatcttcctgaaggagattgatatgtcaagatacgcttgtttcatttgagctcaatgttatctgaaaatatatagactgccttcgtccccttcatcactgctaatgaccgtgacttggagacccgacagcggccctcgacgttgtcgccgccgagcccatgctggttccaccagtggtccaccacccggatgtggtccgccaagacgagcagtaacggtggcagcgaggcgaggtggtagatccagcaccgcttctgcacgaccatccattcctccacccagagcatgtacccaggcttgcctctcctcggggaacatgccgaggtcgtccgactggagcagaaggcgacatcgctcaacaagctggtcgaggagcagtgcgagagcataaacgatctcaagtccaagagccatccgattctgggcccagaacactttgccaaacaaaaagttatcgctcttcatccttgataggctacagaagaaggatacatatgctgtattttcgtagcctgttgatcctgaagagagggaagctgaaccttgttcttctgccatcatctagcatgcggcttacctttgtttgtgatgatggttatccagagcaactagctctcttgagcaacgactttgaattttcggaagttatgattgaagaaatatcagctgataattctggacgctctttcctaatcagaatttcagaatctaaagtgttttactactggtgtgctgagaagtcgaaggaagattgaatggaacttcttgcaaaggtcttcaagggagaagcggcttaaaatgtgtgagcaggtattttcggactcgtaccagaaagggaaaagctacaaaggttgacacagcgccgaagctgtgaagcaggaaagcttcggcatgttcgcagaaaagggaaccgacttaaagatgaaaaggccatttagacctcgatagagtgctatagaattatcaccaaatgtaaagggcatgtatgtaattttgtatgggttgtaccccgtgcctataaataggtgaacagtacccccgtactgttcacgttgacttggcatttgcttttgcgtcacacttgtattttcatctccttccaaaccgaaggtacatttataatttgatattgtctctatttctctataatgatataataaagttaaatg

SEQ ID NO: 90633 - DNA, 1410 bp, Zea Mays
cgtatatataattaatgatcgtgcctctgttttccctgtgcctcatggcttcgatttgttcattcgacagagccatccgattctgggcccagaacactttgccaaacaaaaagttatcgctcttcatccttgataggctacagaagtgagttgtcgtgttcgttgcttgtacggctcccattctcagctctaggacctctcatctttgtgtgtcctgcactccttgtttcttgtaggaaggatacatatgctgtattttcgtagcctgttgatcctgaagaggtttgtttcaatgcacgatcacattaattggtacatgtattcttatcattataaaaaagggactgtataaacaaccttcaactaggagaaattcgctgaattttgaatatccaatccatgttgttatccagtccacagtaaagtacacatgtgaacctagagttgttttatttttaagaacctacaataattgtttagtcttgggacgctattattttcttgctaaagtctgtagaagagtctgtcatgttttatatgatatctaggattcatctttcttccaactaatcgctaatacaccagtttcagcaactgaactttagcaggatgtgtttacatagatgacatttgtatgcctcactctgcattgctttgcttggcctgacatcaagatacactgtttaatcaccttatcagtcttcttattttttataacaatatgttctgggatctcatgtatgtacatttcctatgtgcagagggaagctgaaccttgttcttctgccatcatctagcatgcggcttacctttgtttgtgatgatggttatccagagcaactagctctcttgagcaacgactttgaattttcggaagttatgattgaagaaatatcagctgataattctggacgctctttcctaatcagaatttcagaatctaaagtgttttactactggtgtgctgagaagtcgaaggaagattgaatggaacttcttgcaaaggtcttcaagggagaagcggcttaaaatgtgtgagcaggtattttcggactcgtaccagaaagggaaaagctacaaaggttgacacagcgccgaagctgtgaagcaggaaagcttcggcatgttcgcagaaaagggaaccgacttaaagatgaaaaggccatttagacctcgatagagtgctatagaattatcaccaaatgtaaagggcatgtatgtaattttgtatgggttgtaccccgtgcctataaataggtgaacagtacccccgtactgttcacgttgacttggcatttgcttttgcgtcacacttgtattttcatctccttccaaaccgaaggtacatttataatttgatattgtctctatttctctataatgatataataaagttaaatgaatgatgtt

SEQ ID NO: 90634 - DNA, 343 bp, Zea Mays
acttgagatcgtttatgctctcgcactgctcctcgactagcttgttgagcgatgccgccttctgctccagccggacgacctcggcatgttccccgaggagaggcaagcctgggtacatgctctgggtggaggaatggatggtcgtgcagaggcggtgctggatctaccacctcgcctcgctgccaccgttcctgctcgtcttggcgggccacatccgggcggtggaccactggtggaaccagcatgggctcggcggcgacaacgtcgagggtcgctgtcgggtctccaagtcacggtcatcagcagtgatgaaggggacgaaggcagtctatatattttcaga

SEQ ID NO: 90635 - DNA, 927 bp, Zea Mays
agggtaaggatttgcttcaggatcctgaggaattagggcggtttgcttcagtgatcggtgaacgtgaaaaacacaaagaatctgttgagtacaagcgagcagcagaggaggaatgggcttcaagacatcggcaattacaaatacaggccgaggaagcaaagaaattgcgaaagagaaagaaagctgaagctcaacgattgcttgacatggagaagagacaaaagcaaagattgcaagaagtccgtgaatcgcagagaaagaatgaagaagctatacaactgaaggagcggtatcgggcaacggtcggaaaggagctggaagatatagaaaggagacattgtgatatgacttcaatactgcatgcgctaggcatctcagttgaaggtggtgaggttaaagccttcaagcaagctcttctgaaattccatcccgacagggtatcaaggaatgatatttatcaacaagtaaaagcagaggagacatttaagttcatttcgcggctgaaggagaagctacctcggctatcctaatagccatcccactcttttttccacatgccttggcgcatcctccattcacctgtagggtcaaggtacagaattcagaggatgtttattggcgttatttacaagtaactagggctttagcttgttaaatgtgtttttgtgtgtgtgtgtgtgtgttgggggttgggttgggtaggcattcgtgtcagctatgacatgggatggtaaccacttcgatttgtgatggcgaaatggttgtacatcaccgatggcagaaagatcattttttaagaccatctttattagtttattcgacagaataccacggtgtcgtcctctggttttcatacatctgcattttgtactaaaaggtgtctaggagacatcagaacatcgcaattaaatcagatgtagccctttc

SEQ ID NO: 90636 - DNA, 371 bp, Zea Mays
ctcaacggcgatggcgtcgcggtgacgagtgtcttcggcctcgacggagaagaccaccgagaaggagatcagcgacggccgaaggaggccgccgaggcacacgagcgatcgagggaggcgagggacgtgaccaggcagaagacgggcgagtacaccgacgccagcagggaggccgcgcaggaggccagggacaggtcccgagccacagcacaggagggacgccaccgccgacaaggcgagggcggccaaggacgtggacgcgggcactcgtcggcgacaaggatctggagataggggtgcttggggaggctctccagctgccgcagctcgtccaacccttgaggaagctgccggcacacaggtgctgctgc

SEQ ID NO: 90637 - DNA, 1006 bp, Zea Mays
atggcggccggcgagagcagcagcagcatgagaagaagggcctgggtggtggaggtggagaagacgctggacgaggcggacgcgtcggtggaggtgtcgtggtggcagctccactccatctaccacgtgccggcgtgcatcaaggacctcaaccgcaaggcgtacaagccgcagcccacaggtggtgtcgctgggccccttcaccgccgccacagcgaactcctacccatggaggagcacaaggagcacgcgctgcggtacctgctccgccgatccaagcgcccgctggaggagttcgcgaccgccgtggcggacatcgcggagcagctggagagcgtgtacctggacctaggcgccgagtggcgcggtgcagacgggcgggagcggttcctggacggctgcttcctactggaggtcatcaaggccaccgagatgctcttgtatgccactggtgtggtacttggaaaggtgataaaaaatgtagtagctgcaagaaagcaaggtactgttctgagaaacatcaggcgttgcattggcgtactggtcatgaaaatgattgcctccagataataagttctgctgcttcaaattcagttctgccagctgtaggaatagtgtttgtccgctggtttgctaaggcaagcaacgtacatagactgctcgtcttggatccttcaggaatcataaaagcatatggaggaaatatgtataggctacaaagaagcataagaagcattttttatagcagaagccaagtgttctgatgattttgttttttcaattgtgttttctgttattggttcagcatgcacatatattgacatgatttatggcatggcatctgtcatctttgttatatttatgacaccgttcttgattgatgtgtgcgacatgaatgatggatctttttaacatcctgaccatcattgtgtcgctcattatcgtattttgtatatcatttatgggttcacggatatgaaatgataggtttcttatttttgagatc

SEQ ID NO: 90638 - DNA, 447 bp, Zea Mays
taccctgtatcccaccccgcgcctccaacttgttcttccgctgcaagacagcagtcccgagctgtatgcctgtatgtatcctgctaccgttcttgtctagtcgtcttcctcggcaagccgcggcggtcgttgccccctcgtataatctactcgcggcatccttgtcatcgccgtttcgatttggttgatacagaggggagccgcgagggggcggagatgccgacgctgacgaagctgtacagcatggaggaggctgccctccacaacacgcccgacgactgctgggtcatcgtcgacggcaagatttatgatgtgaccaagtatttggaagaccatcctgggggtgccgatgttctgctcgaagcaaccggtaaggatgctaccgtacaatttgacgatgcagggcacagcaagagtgccaaggataacgaatcaagctgattcatc

SEQ ID NO: 90639 - DNA, 99 bp, Zea Mays
gctgttatatcttgtgtatacgaaacgcgcaggtctcttccgttctcgtctatcagtgggccattatctcacagatgtgagaaacgatacaaactcaac

SEQ ID NO: 90640 - DNA, 756 bp, Zea Mays
ccagaacatacataagcaactgatagcaagtaaaatgtaaaaattcagtacatgggcaacttacttagagcttgggttgccctgcgcccgtccgcggtgaaaaacttcgtaggcctgccaacaatggcacgcccacatgtgtacccagggcctggagtcttaagagtgaagttcctgggcaccttaacagttttattggtagttccagcaagaccaacactgatctggaaggaggaagcagcatttgctgggtcctggttaaaggtatttacaactcctgccttgcagcaattggcaatttgcatgttgtatggagtgcctggaagtaaatcgacaattgttggatctttcttgcagcaatggggtgggctgctcttgaactttgagcagtcgccctgttcagtggtctgagccccaaccattgaccatataacctccttctttgcccatgtccacccaagctgccaaccaggtgcgccgatatgccgaaattgttgataattaaacattgtgacaacagcctgcaggaggtattttatgggaaatcaggaaccatgtatgcatagcatgcttcttctgacataaatttggggatgatgttcttgttgtctgtgatgtatgtttctagttcagccattggccatgttacataacttatattgtacaggtcgactggactactcaatagaatagaccagggcctgctaggctggagatgaaatatatacagctgttggggtgggcattctacttacg

SEQ ID NO: 90641 - DNA, 679 bp, Zea Mays
atgggcaacttacttagagcttgggttgccctgcgcccgtccgcggtgaaaaacttcgtaggcctgccaacaatggcacgcccacatgtgtacccagggcctggagtcttaagagtgaagttcctgggcaccttaacagttttattggtagttccagcaagaccaacactgatctggaaggaggaagcagcatttgctgggtcctggttaaaggtatttacaactcctgccttgcagcaattggcaatttgcatgttgtatggagtgcctggaagtaaatcgacaattgttggatctttcttgcagcaatggggtgggctgctcttgaactttgagcagtcgccctgttcagtggtctgagccccaaccattgaccatataacctccttctttgcccatgtccacccaagctgccaaccaggtgcgccgatatgccgaaattgttgataattaaacattgtgacaacagcctgcaggaggtattttatgggaaatcaggaaccatgtatgcatagcatgcttcttctgacataaatttggggatgatgttcttgttgtctgtgatgtatgtttctagttcagccattggccatgttacataacttatattgtacaggtcgactggactactcaatagaatagaccagggcctgctaggctggagatgaaatatatacag

SEQ ID NO: 90642 - DNA, 258 bp, Zea Mays
tccgtctcatcgccatgagaaccaggaatctgacgcgggaccgccccgcttccatggtgacgacatctactgggctgctcctctcccttgccctcctctccttcacctgtgtgtcatcgccgtcgcagtcgccggatttggaggcaatctcccggttccaggagcacctctgtatcgatacggcgcagccggcgccagactacgccgtggccttcccccgaaagcagtcctccgtggctgggtgcgtggcacgcacgc

SEQ ID NO: 90643 - DNA, 1760 bp, Zea Mays
cgcggcgacgccctccaacaaaaccgaagaggcgaggaaggaacacatgctctctccgctgttcttgctgagttgttgtggacaaaaagagcacgaaagtgggtagagaaaacggggggcaagccaaccacactcgcagccagcctgcccgctcgcccgcccgccattcttgccgattcgagtcgacgtcacgcctccggcgcccccttcggttgtcacctcgggggtcgcggattggtggaggggaggatttgagcggcgcggccatggatacaacatctagggccgccaagatcccgtcgctccaccagacggagatcaactgggataacctcgacaagaccaagctctacgtggtgggcgcaggcatgttcagcggggtcaccgtggcgctgtaccctgtctcggtggtcaagacccggatgcaggttgcctctggggacgccatggggaggaacgcactggctaccttcaagaacatccttaaggtggacggcgtgccagggctgtaccgggggtttcctactgttatcattggggctgtaccaactaggatcatcttcctcacggcgcttgagacaaccaaagcagcctctctcaagcttgttgagcccttcaagctgtcagagccggtgcaggctgcctttgccaatggccttgccggtctgtcggcatctacatgttcgcaggctatttttgtcccaattgatgtgatcagccagaaattgatggttcaagggtattctggtaatgtcagatacaaaggtggaatagatgttgctcgcaaggtcataaaggctgatggcattagggggctctacagaggatttggactctctgttatgacctatgcaccatcgagtgctgtgtggtgggcgagttatggttctagccagcgcataatttggagtgcccttggccatttgcataacaaagaagaggctcctagccaattgaaaatagttggtgttcaagcatcaggggggatttttgctggtgctgtgacctcttttgttacgactcccatagatacaatcaagaccaggctgcaggttatggataatgaaaataagccaaaagctggggaagttgttaaaagattgattgctgaagatggatggaaaggtttgtacagagggttgggtccaagatttttcagctcatcagcttggggtacctcaatgatagtatgctacgagtacctgaagcgcttgtgtgctaaagttgaagaggtctgacttctgttcttactatcctggaagttttgtattagcagaagtgaaataatgctgtatgtcgacaacattgacaccaccggaagcttcagttcttgctgacgtaggtgaaagcattcaacatggatgtttgatggtgtacttcatttgatgctagacaatagtctttacaaactttgcttctctgggctatattctcaaaaaaatggaggggcctatatttttttgctcatatgatgaatatgggttaggcggattattttaggtgagtataaacgatatcagatgtacacacttctcattcttttatacatgaaggctgttttagcgaggctgtatgattatgaccagtctggatgattgagaccagttgtaatgacacggaacgatgtttccgggagatgctgttttgaccttttttttttcctcatgcggtttcagttatctttttgatctgcccttggaatgcaaaaatgctgaacacgttgctgcacccatattttgagaagcaaatcgtaagcaaac

SEQ ID NO: 90644 - DNA, 882 bp, Zea Mays
ccgctgttcttgctgagttgttgtggacaaaaagagcacgaaagtgggtagagaaaacggggggcaagccaaccacactcgcagccagcctgcccgctcgcccgcccgccattcttgccgattcgagtcgacgtcacgcctccggcgcccccttcggttgtcacctcgggggtcgcggattggtggaggggaggatttgagcggcgcggccatggatacaacatctagggccgccaagatcccgtcgctccaccagacggagatcaactgggataacctcgacaagaccaagctctacgtggtgggcgcaggcatgttcagcggggtcaccgtggcgctgtaccctgtctcggtggtcaagacccggatgcaggttgcctctggggacgccatggggaggaacgcactggctaccttcaagaacatccttaaggtggacggcgtgccagggctgtaccgggggtttcctactgttatcattggggctgtaccaactaggatcatcttcctcacggcgcttgagacaaccaaagcagcctctctcaagcttgttgagcccttcaagctgtcagagccggtgcaggctgcctttgccaatggccttgccggtctgtcggcatctacatgttcgcaggctatttttgtcccaattgatgtggtatgcctctcatttgcctccgacatgatgttgtacagacaaaagttatcttacagtaagttgctgttaaatgttaattagaattctagactactgtgctcactgttttgtgcattggaatgtttcagatcagccagaaattgatggttcaagggtattctggtaatgtcagatacaaaggtggaatagatgttgctcgcaaggtcataaaggctgatggcatt

SEQ ID NO: 90645 - DNA, 1758 bp, Zea Mays
acgagcgagaactgttgtcatttcatgagacgttactcgggatgcacttgtaacgggatagtgtagtagcaagcataggagtaaggagttttgctagtcttcttcagcttcagtagttcagtccaatcacagatcgcagtacaactgaacccgcctcccgcacaaggcatccaggatttgttcggccttcggacttcggagggtagagaatcgaagcgacgagaacaaagcaatgaacgaggcggtgcaggaggcgaagctgctgcggcaggtgaacgcgctcatcgtggcacacctccgtagccagaacctcgggcaggccgcagccgccgtcgccgccgccaccatgacccccatctccgctgccgaatccgtccccgccaatcacctcctgcgtctcgtggccaagggcctcgccgcggagcacggaggaggtgacgccgcttccgcattcgactccgccgggttcggtgtggcggtgcagccgcccggctccagtgccgtggatttcagtattcaggatgtcaagggctcatccaaaagcttccccaagcacgaggtgaagcatgtctctgaccataagaacgctgcccggtgtgtgaaatttagtcctgatggaaagtattttgcaactgggagtgctgatacatccattaagttttttgaggttgctaagattaagcagactatggtaggagactctaaagatggccctgccaggcctgtggtacggacattttatgatcacacacaggccatcaatgatctggattttcatcctgagagtccaatactgatatcagctgcaaaagacagtacaataagattctttgacttttcaaaaaccaatgcgaggaaagcgttcagagttattcaggatactcataatgttagatctgtatgttttcatccttgtggggattaccttttagcagggactgatcacccagttgctcatttatatgatataaatacttttacatgctacttatcagcaaatgcacaggattctagttctcccattaaccaggtacgctactcttgtactgggagcttgtatgtgactgcttctaaagatggttctctgcgcatttgggatggagtatctgctgaatgtgttcgacctattattggagcacatggatcatcagaagctattagcgcgattttcaccaaagatgagaggtacgtcctatcttgtgggaaagattctcgtgtcaagttatgggaagttggcactggacgacttgtgaagcaatatgcaggagcaattcgcagacaatttcgttgtcaggctgtcttcaatgaaaccgaggaatttgtgctatcagttgatgaacaaaacaatgaggttgtcgtctgggatgcacttactgctgaaaaggttacaagattgccttctggcagcactggtgctcctagatggctcgaccattccccagttgagccagtttttgttagttgtggaaacgatagatcgatcaaattctggaaacaaaccgtataagcttgtagattcaaccacgcaaatcaaaagagtatgttttcagtattactgtttcaggaggaatgtgctagtgtaactttagttgtatatgggagaaatttgcataagcgatttttttttgaaactgcataagcaattgtttgacctaatagcaaatcccaatcagatgtttttttttggttctgcagatgccagttatatgaaccattgacctgatttttattggtcagcctcctttcgatgttctgtta

SEQ ID NO: 90646 - DNA, 2795 bp, Zea Mays
caattttccccatttgccattcccgacgagcaccttcaccgtctcctcccagtcccacctcgcgtggcacgccatggctttctccccgcgctcgccgtggtcgcgtgccaagaaaaccgacgtctactcaaccttcgttgtccacggcgatgacgatgaagacgacgcccgcggcggcaggggcccctccacgcgggcggaggaagacgaggaggaagacccctcctcgctgcctccgcttcttcagcggctccccaaggactttggcggcgcctcgttcgacgacgacgaggacccctactcctccgaccctgacgatgcttccctctctgccacggcggccttcaagagcggcgtcccggcctccggtcgatctccgttcctggatctgcggcgctcaagcccccgcgctaccgatgacgacccgtactctaccttcgtcgttcattccaccacacgctcggggagaacctcctccagccctcgcgggtccgcctccggcacattcatccgtcgctcgggtggctcgtctagccctcgcgagtccgtctctggcacattcatccgccggaccggcagcccgtcgagccccgggaagtcagcctccggcacattcatccgccggccagggagcccgtcgagcccccgcgggtcgttctctggcaccttcattcgccacaccagcgggggctccagttcccatgaatctgcctctggcggcggcgggggtttcgggtcctctttctggactccagcggtggagcagtcagaggagctccggcagccatcgcctctgatgcagcaacaacagcaacaacattcaaggcggaagccatcggtcagctcggtgccagacagtgttaccagggaggatccttccaccaagtacgagctgctccatgagcttgggaaaggttcatatggtgcagtgtacaaagcaagggatctcagaacgcaggagcttgtggctgtcaagatcatctcattaacagaaggggaagaaggctatgaagacatacggggagaaattgagatgctgcagcaatgcagccatccaaatgttgtccgctactttggaagctaccaaggagaggagtacctatggataattatggaatactgtggtggtggaagtgttgctgacttgataggcatcacagaggagcctcttgatgaatcccaaatagcttacatttgtagagaagcactaaagggccttgcttacctgcactccatttttaaagttcacagagatattaaggggggcaacatccttctaactgagcaaggcgaggtgaagttgggtgattttggtgtagctgcccagctgacaagaaccatgtcaaagcgcaacacgttcattggtactccacattggatggcaccagaggtcattcaagaaagtcgttatgatggaaaggtagacgtttgggcattaggtgtatctgcaatcgagatggcagagggcatgccaccaagatccactgtgcatccaatgagagttatcttcatgatatctagtgaaccagcacctatgctggaggataaagagaaatggtctctcctcttccatgattttattgcaaagtgtcttactaaagaccccagacttcggcctgctgcaattgagatgctgaagcacaaatttattgagaagtgcaatagtggagcttcgaaaatgttggcaaagatcaaggtagcgaagaagattagagccacactagctgtgcaaaatgagctgtctgaccctgacaatacaacgcaagatgtgccttttcgaataaatgaggactatggggaaactgtccctacaagttctcagcaacacatgaaacatggcacatataatgattgtcaggcaggtgattttggtactatgattgttcatactgaagatggggacgaagtgacagaatcacccattttcccaagaacagaattcatacccggccttggtagcatcaattctttcacacatgatccaaagagagcagaacttatttcaagtttttgggcggagaacataggtgatagtgatgccaataaagaccgagatacagattatggtcctgacatgcaggaatcaaaagtgatctcacctttaactggaacagtgaagaagaatattggtgcagaagggactataaggtgccatgataatcaaattaacttgtcaccaggacttgcaaacacaacaactaaattgaacaacagcccaagccgtaaagcgttttcagttcaggataagctctggtcaatttatgctgccggcaacactgtaccaataccatttcttaaggcaattgacatttcaccactagctctagtatcagaaaatgaatcaggaaatggcctggctgggtcaagtacaaatgatgctttggaggcagttagggagctgttcagtggtgatgggcaggcaaagaaaggacggaaagggcaaaacgaagtccctcttcctccgggtgtgcatcacaggctgacgacaagccccacattgatgaacctggcccaagctctagcttatcataaaacgtgctatgaggacatgccgctacaagattcacaagcgacgcaagagcagcaaacgatacaaaatctttgtgacacacttcgcacaatactgggttgacacaggaatctctacggaagtggaaatttctgtccctgttaatagcctcttggagtttcactatgtagagacggcatcaaattttgctaatcagattttgtggcactaacgcatattgtagcctggttttgtatcgttgtcaatgcatttgttctccaaataa

SEQ ID NO: 90647 - DNA, 3146 bp, Zea Mays
tttccccatttgccattcccgacgagcaccttcaccgtctcctcccagtcccacctcgcgtggcacgccatggctttctccccgcgctcgccgtggtcgcgtgccaagaaaaccgacgtctactcaaccttcgttgtccacggcgatgacgatgaagacgacgcccgcggcggcaggggcccctccacgcgggcggaggaagacgaggaggaagacccctcctcgctgcctccgcttcttcagcggctccccaaggactttggcggcgcctcgttcgacgacgacgaggacccctactcctccgaccctgacgatgcttccctctctgccacggcggccttcaagagcggcgtcccggcctccggtcgatctccgttcctggatctgcggcgctcaagcccccgcgctaccgatgacgacccgtactctaccttcgtcgttcattccaccacacgctcggggagaacctcctccagccctcgcgggtccgcctccggcacattcatccgtcgctcgggtggctcgtctagccctcgcgagtccgtctctggcacattcatccgccggaccggcagcccgtcgagccccgggaagtcagcctccggcacattcatccgccggccagggagcccgtcgagcccccgcgggtcgttctctggcaccttcattcgccacaccagcgggggctccagttcccatgaatctgcctctggcggcggcgggggtttcgggtcctctttctggactccagcggtggagcagtcagaggagctccggcagccatcgcctctgatgcagcaacaacagcaacaacattcaaggcggaagccatcggtcagctcggtgccagacagtgttaccagggaggatccttccaccaagtacgagctgctccatgagcttgggaaaggttcatatggtgcagtgtacaaagcaagggatctcagaacgcaggagcttgtggctgtcaagatcatctcattaacagaaggggaagaaggctatgaagacatacggggagaaattgagatgctgcagcaatgcagccatccaaatgttgtccgctactttggaagctaccaaggagaggagtacctatggataattatggaatactgtggtggtggaagtgttgctgacttgataggcatcacagaggagcctcttgatgaatcccaaatagcttacatttgtagagaagcactaaagggccttgcttacctgcactccatttttaaagttcacagagatattaaggggggcaacatccttctaactgagcaaggcgaggtgaagttgggtgattttggtgtagctgcccagctgacaagaaccatgtcaaagcgcaacacgttcattggtactccacattggatggcaccagaggtcattcaagaaagtcgttatgatggaaaggtagacgtttgggcattaggtgtatctgcaatcgagatggcagagggcatgccaccaagatccactgtgcatccaatgagagttatcttcatgatatctagtgaaccagcacctatgctggaggataaagagaaatggtctctcctcttccatgattttattgcaaagtgtcttactaaagaccccagacttcggcctgctgcaattgagatgctgaagcacaaatttattgagaagtgcaatagtggagcttcgaaaatgttggcaaagatcaaggtagcgaagaagattagagccacactagctgtgcaaaatgagctgtctgaccctgacaatacaacgcaagatgtgccttttcgaataaatgaggactatggggaaactgtccctacaagttctcagcaacacatgaaacatggcacatataatgattgtcaggcaggtgattttggtactatgattgttcatactgaagatggggacgaagtgacagaatcacccattttcccaagaacagaattcatacccggccttggtagcatcaattctttcacacatgatccaaagagagcagaacttatttcaagtttttggtatgagaaacataaatttatcttattgtttgtgttgtcagtcattgaaagcagcttaacaagaaggttttatttatcccatcacaaatcttatgcacagtttcttgatagggcggagaacataggtgatagtgatgccaataaagaccgagatacagattatggtcctgacatgcaggaatcaaaagtgatctcacctttaactggaacagtgaagaagaatattggtgcagaagggactataaggtgccatgataatcaaattaacttgtcaccaggacttgcaaacacaacaactaaattgaacaacagcccaagccgtaaagcgttttcagttcaggataagctctggtcaatttatgctgccggcaacactgtaccaataccatttcttaaggcaattgacatttcaccactagctctagtatcagaaaatgaatcaggaaatggcctggctgggtcaagtacaaatgatgctttggaggcagttagggagctgttcagtggtgatgggcaggcaaagaaaggacggaaagggcaaaacgaagtccctcttcctccgggtgtgcatcacaggctgacgacaagccccacattgatgaacctggcccaagctctagcttatcataaaacgtgctatgaggacatgccgctacaagattcacaagcgacgcaagagcagcaaacgatacaaaatctttgtgacacacttcgcacaatactgaggttgtagatctgcaagagtgaaggctgcaacctttggagttccgaagcctgcatggagccaagggtgaacgtggcactgatcctgctcgtggtggagaactgaggatcgaaggaacgcatgacatgtgcctaccgtggagcaggcctaatggcttctgcgttttagcctgtggacgctttggtcactggaagctgggttgacacaggaatctctacggaagtggaaatttctgtccctgttaatagcctcttggagtttcactatgtagagacggcatcaaattttgctaatcagattttgtggcactaacgcatattgtagcctggttttgtatcgttgtcaatgcatttgttctccaaataaagagaaatagttaagcagaaataaacgaaaagttatttatgttggct

SEQ ID NO: 90648 - DNA, 770 bp, Zea Mays
ccgataaaactccctctatctctctccatagttaacctggcaagtcatcaaaattgctgatgtgtaatagcattaaatgcaaatgaaactcagatgaaactcccagtgagatcgaccttagtctaatactgcatttggtgcattaggtccctcttcctccgggtgtgcatcacaggctgacgacaagccccacattgatgaacctggcccaagctctagcttatcataaaacgtgctatgaggacatgccgctacaagattcacaagcgacgcaagagcagcaaacgatacaaaatctttgtgacacacttcgcacaatactgaggttgtagatctgcaagagtgaaggctgcaacctttggagttccgaagcctgcatggagccaagggtgaacgtggcactgatcctgctcgtggtggagaactgaggatcgaaggaacgcatgacatgtgcctaccgtggagcaggcctaatggcttctgcgttttagcctgtggacgctttggtcactggaagctgggttgacacaggaatctctacggaagtggaaatttctgtccctgttaatagcctcttggagtttcactatgtagagacggcatcaaattttgctaatcagattttgtggcactaacgcatattgtagcctggttttgtatcgttgtcaatgcatttgttctccaaataaagagaaatagttaagcagaaataaacgaaaagttatttatgttggctattcgaaatcatgggaggcgtgatttctgctgtc

SEQ ID NO: 90649 - DNA, 1092 bp, Zea Mays
accagcaagtcgccttcttcccatccctctccatcaagcaaaagactgacaggaaagctaaaccccaacaatcgccatgggattcttccaaggcaagacctccaagcagaccacgagggtcaagaagcttctcggactcgccctgtcgcgcctcaccatagcacgtcgtccccgccttgctcgcaggtccatctgccgtagcgatgtcggccagctcctctccctcggctacctccaccacgctctcctccgcgcagagcaggtcatagaggaggataacatgctgcaggcgttcgacatcattgagctctgctgcaagcgactcgtcgagcatgcagcgcatttagacaaaccgcaggagtgcggcgaagagataagggaggcagctgccgggatcatgtttgcagccaggtggtgcggcgatctgccggagctgcaggtcgcgcgcaccatcctagaagacaagttcggcagcgacatggctgtgatcgcgaaggaggggactagcattgtcgatcccatgttggtgtggaagctatccggcgataagacaaacatggagctaaagaagaaagtgaccaaggaaatcgccgtcgagaatagtttcatggtcgacttctccgagctccagctgcaagaagcagtctagctagcacgggaacactcacagaagaagtccatgctaggagttcgaccacgcaatgacgtcttaagaagcgcgagaatggatgaatgtttaaagctagattatggtcttccatcctcacaaaggacgagtgccttattcttggaggcagcccgactgggatctaggcagcaacgaggaggaatggaggatgcacctgagaattccaagcaattggcagctgaaacccaaggctcaccaagtttcaagaataataatgcctcaaacagcaacaataagggttttaggcattgagtaatgttctgttgtgtgggactatgacatgctttaagctctttttagagcgcgtctgtgaaaaaatattcaaactgttgtctcttcatattctgttgtgtggtttgcatagtttggattaagctaacataacaatcaataattttaaaata

SEQ ID NO: 90650 - DNA, 1085 bp, Zea Mays
accagcaagtcgccttcttcccatccctctccatcaagcaaaagactgacaggaaagctaaaccccaacaatcaccatgggattcttccaaggcaagacctccaagcagaccacgagggtcaagaagcttctcggactcgccctgtcgcgcctcgccattgcacgccgtccccgccttgctcgcaggtccatctgccgtaacgatgtcggccagctcctctccctcggctacctccatcgcgctctcctccgcgcagagcaggtcatagaggaggataacatgctgcaggcgttcgacatcattgagctctgctgcaagcgactcgtcgagcacgcaacacatttagacaaaccgcgggagtgcggcgaagagataagggaggcggctgccgggatcatgtttgcagccaggtggtgcggcgacctgccggagctgcaggtcgcgcgcaccatcctagaagacaagttcggcagcgacatggctatgatcgcgaaggaggggaccgacattgtcgatcccatgttggtgtggaagctatccggcgataagacaaacatggagctgaagaagaaagtgaccaaggaaatcgccgtcgagaacagtttcatggtcgacttctccgagctccagctgcaagaagcagtctagctagcacgggaacactcacagaagaagtccatgctaggagttcgaccacgaaacgacgtctcaagaagcacgcgaatggatgaatgtttagagccagattatggtcttccatcctcacaaaggacgagtgccctattcttggaggcagcctggccaatccaggcagcaacgaggaggaatggaggatgcacctgagaattccaagcaattggcagctgaaacccaaggctcacaaagtttcaagaataataatgcctcaaacagcagcaataagggttttagaaattgaataatgttctattgtgtgcgactatatatgacatgctctaagctctttttatgcccgtctgtgaaaaacattcaaactgtcgtgagttggtgaagaatttgtttaactatatctatctattgatgaatatatttaattaattattgt

SEQ ID NO: 90651 - DNA, 1109 bp, Zea Mays
accgtagctacggcctggcccaataacgaaccctgatccttgatctctataaattagaaaccctagcaccccgcgtcaccttcacccacctccgccagccactccaaacacttgcgccgccgctgcctcacaggtaaggccgccatggtctccggttcgggcgtgtgcgcgaagcgcatcgtggtcgacgcgcgccaccacatgctgggccgtctctcctcgatcatagccaaggagctgctcaatgggcagaaggtggtcgtcgtccgctgcgaggagatctgcatgtcgggcggcctcgtccgtcagaagatgaagtacctccgcttcctccgcaagcggatgaacaccaagccgtcccacgggcccatccacttccgcgcccccgccaagatcctgtggcgcaccatccgcgggatgattccgcacaagaccaagaggggggaggcggctctggcgaggctcaagacgtacgagggcgtcccgccgccgtacgacaagaccaagcgtatggtcatccctgacgctcttaaggttctgaggctacagcctggacacaagtactgcctcctcggcgagctctctaaggaggtcgggtggaactaccatgacaccatcagggaacttgaggagaagaggaaggagaaggccaaggttgcctacgagaggaagaagcaattggccaagctgcgtgtcaaggccgagaaggcagccgaggagaagttggggtctcagttggagattcttgcccctatcaagtactgaggagctgtgctttgtcatcagttttggggaacatctagtctttgttttaagtgttcggtaacagtttgtgacagtataatctggtaaaccgtgttatttttctgccactcctatttgaacacattttctagctggtgaatgaactgtttggtcgatcttgttcagatgtctggttcgcattcgcattctgagagatttcatgtctcgtgctgactcaagctgtcacgcccatgtgcttcttgcacacgattatcaattcagtagttgtgattaaccaaatttttatgtgtactggcagaacccagttgcaattgcaatgaagctcgatgttgctctatcagatc

SEQ ID NO: 90652 - DNA, 677 bp, Zea Mays
catcattgtatcattttaacaccattttaacatcattagatcgttactgtgattctcctatgatgtgatcaaaatatttgctactcttgctggatgttcccattacatttcaattagaaaaaagagagtctttatgtgagcgcctaaaggcggcagtagcagttgctaatgttttcatggcctttttctttcacactggaattgtatcctaccaagttctgatagctgactgcacttgcccttgtccgctctatcaggaacttgaggagaagaggaaggagaaggccaaggttgcctacgagaggaagaagcaattggccaagctgcgtgtcaaggccgagaaggcagccgaggagaagttggggtctcagttggagattcttgcccctatcaagtactgaggagctgtgctttgtcatcagttttggggaacatctagtctttgttttaagtgttcggtaacagtttgtgacagtataatctggtaaaccgtgttatttttctgccactcctatttgaacacattttctagctggtgaatgaactgtttggtcgatcttgttcagatgtctggttcgcattcgcattctgagagatttcatgtctcgtgctgactcaagctgtcacgcccatgtgcttcttgcacacgattatcaattcagtagttgtgattaacc

SEQ ID NO: 90653 - DNA, 822 bp, Zea Mays
aaagatctcacccctccagagtcccgggataattcgcttcgatccccagaggcacagacgagacgacagagatgaaggacggaacgtcgtcggggggaggggcgttcgctgcgggcagcgatccaaggcagccgtcgacggcgaagccatacgcgccgccgaagctgtcgccccaggacctacccatcgactatgcaggcttcctcgccgtcgccttcggcgtcctcggcgtcatgctccgctacaaggtgtgctcgtggatcgcaatcatcttctgcgctcagtcgttggcaaacatgaagaactttgagaacgatctgaagcagctttctatggccttcatgtttgctgttatgggtctggtgacgaactattttggccccgctcgtccaggcagtacaaagcgctaaactgcggaagaacatgtgctacattcttcataggactttttggtgcttccgatagctttgccatcggtgctgacattatgtatgtccaatttgagcaaacgtcataggtatgggcatcaaattaatggaccggtacatgtatgatgctcaataatttatttgtgcaatactagtaaacgcatagactgtttgaacgagtacttggtttctccggatatgttgatcaatgttttctggacttgatgcttcggtcttatcagtttaccccaaaatgccggtagatggactgacgttttggctttttaaaatatgttacttttattatgtatctagatataatttatgtttagatatattgtttatctaagtgtataataaaatctatgtatctgaaaaaaatccaaaacatcta

SEQ ID NO: 90654 - DNA, 2136 bp, Zea Mays
cacattttaaaaaatggctcatcgtggactacacatcgcatggttgcagttttcaacagactacactacatgttctttgaaaagtttacggcatggaaagacaccgatgccagtggctccagttaagttcgtcgcatgtgctttcctcatcttgtttgtatatatgtggatgaatacctacacacatcatgtgtatacgtacaactgagctctttgtcgccatgtgacctgctactgaagagtacgtagtcggtgtaactgagttgaccccttttgctcaattccattgcatgattcgagagggaggtggtgcaacgtggaagtgttggccggcgaggcagaaaaatcccgtgctcattttcacacatatataataagcttatcttctcgggcttggaaacaccccactgtttaacgttctcttgtagcaccagagagaggcagaggggcgaaggaaggctaggtaggctagccatggcccccaaagctcacgtgctggtgctgccgatgccatgccagggccatgtcacgccgctgatggagctctcccacctcctggtcgaccaaggcttcgaggtcaccttcgtcaacaccgacgtggaccgcgcggccgtggtagccgcgctggaggcctccggcggcgtggcggcgctgggcggcggcatccacctggcgtccatcccggacgggctggccgacgacgaggaccgcaaggacatcagcaagctcgtcgacgcctacacgcgccacatgccgggctacctggagcgcctcctcgccgacatggaggccgccgggcggcccagggccaagtggctcgttgccgacaccaacatgggctggtcgttcgaggtcgccaagaagctcggcatccgggtcgtgtccttctggccggcggccaccgcgtgcttagccttcatgctcaagatccccaagctcatacaggacgggctcctcgacgataaggggctgccagtccgtcaggagacgttccagctcgccccggggatgccgccgctgcactcgtcgcagctgtcgtggaacaacgccggcgagcccgaggggcagcacatcatcttcgagctggtgacccggaacaacaagctgaacgatgagctggcggagatggtggtgagcaactccttctacgaggccgaggccggcgcgttcaagcttttcccgggcatcctgcccatcggcccgctgtccgccgacggggcgttccggaagcccgtgggccactacctgccggaggacgagcggtgcgtcaagtggctggacgcgcatccggacgcgtcgtccgtcgtgtacgtggccttcggcagcataaccatcttcagcgcgcgccagttcgaggagctggccgagggcctggagctcaccggccgcccgttcctgtgggtggtgcggccggacttcacccccggcctcagcaaggcgtggctccacgagttccagcggcgcgtcgccggcaggggcatgatcgtcagctggtgttcccagcaacaggtcctggcgcaccgtgcggtggcgtgcttcgtgtcgcactgcgggtggaactcgaccatggagggtctgaggaacggcgtgccgttcctgtgctggccctacttctgcgaccagtacctgaaccggagctacatcgtcaacgtgtggaggaccgggctggcggtgacgcccgacgcggacggaatcgtaggcagggaggagctgaggagcaaggtggagcaggtcgtcggcgacgccgacatcaaggacagggcgcgggtgctcaaggacgaagcccaccggtgcgtcgccgaaggagggtcctcgaacgacaacttcaaaaagctcgtgaatctgctcagtgaatgatgagaaccgggagactgggagcatcgtgtccagtgtcctggcgttgtaaatgttggtgcacttagggcttgtttggtttgatggctaacttgtcatattttacctaacttttgtgtctaaagttagttcttcaattcgaacgactaaccttaggtaaagtgtgacacatttagctacgaaccaaatagccccttaatctccttgattgtaaacagtggtggagcacctcttacggttaggggtgctaattgatcgcaatctaaattcttcttgacaaaa

SEQ ID NO: 90655 - DNA, 1709 bp, Zea Mays
gcggatctcagtttcctgttttatttatccatgaccatgagccgacgaagtggatagagctattcttgtgatcggtgatgtacgaccttttgtttctttgcgaatcttgaaccagtatcaatcgcaggcagagctttctggcaccatgcgacatcttggttccgttccaaagatccaagctccccacccttcctcatggtcatggcggcacctcgtgttctagttctgccttaccccgcccagggccatgtcatccctatgatggagctctcccactgcctcatcgagcacggcgtcaaggtcaccttcgtcaacaccgaggtaaaccaccgtctcattcttggtgccttggcgaccggagacaaagaactcggcggggtcgacatggtgtccataccggacggcctgggcaccggcgaagaccggaaggacctcggccgtctcaccgactcgttctccaaggtcatgcccggcgagctggagaagctcattacaagcatcaacgccgatggacgagagcgcgagaaggtcagctggttgatcgccgacgtgaacatggcgtgggccttccctgtggcgaagaagcacggcctccgaaccgccgggttctgcccatcgtcggcggcgatgttcgcgatgaggatcagaattcctgagatgataagcgacggcgttcttgacgagagaggctggcccaagcggcgcggcgcgttccagttggctccggcgatgccggccatcgacacttcggagttctcgtggaaccgtgccgccgacgccaaggggaagccgatcatctttcagctgatcctccggaacaacgcggccacgcacctcgccgagaccatcgtctgcaactccatccaagagctggagcccggagccttggcgctcgtccccgacgtcttccccgtgggcccgctctcctccgacaaaccggtcggctgcttctgggccgaagacgcctcctgccccgcgtggctggacgcgcagccggccagctccgtcgtgtacgtcgcgttcggcagcctcgccgcctacggcgccgcgcagctagtcgagctggccgaggggctgctgctgacctcccggccgttcctgtgggtggtcaggccggggtcgacgggcgagcagcaccttgagcagctccgccgccgcgccgcgccgcgcgggcgcgtggtgagctggtgcccgcagcagaacgtgctggcgcaccacgcggtcgcctgcttcctgacgcactgcggctggaactcgacgatggaggcggtgcggaacggcgtgcccctcctgtgctggccgtatttcaccgaccagtttctgaaccagagctacatctgcgacgtgtggaggacgggactgaaggttccattgccgccaggggcggcgcacggaacgggactcgtggggagagacgttgttcgggacaagatcgaggagctgctccgtgacagtgagacgaaggcgagggcgctcgcgctgcgggacctcgccagtcgggcagtcggcgatggaggttcgtcgcgccggaatctcaggcagttcttgggccttgtgcgaggatcggagagctaaagctgcaattttggggctactgttgtgtttgcgaatcgcgatgccaggacaaaggtctgcaccgtgaaaaatcctgtttcgatgttctgaaaaattaaaaaacatgtataatatatcctgacaggaatcactac

SEQ ID NO: 90656 - DNA, 1752 bp, Zea Mays
gttgcaagcgacacgacctctgagcagtgacactgacagtgcagctcggagctcacgatcgccctgtagctgtagccgaccagcagccgtttaccagcacgtcaaactccaagagtgtcttcagccaccctgctccatggcggcggctcctcatcggcctcgtgtaatgatgctgcccttcgccgcgcagggccacgtcatgcccctcatggagctctcccaccggctcgtcgagcacggcttcgaggtcgtcttcgtgaacacagacttcaaccatgcccgcatcctcgcgaccatggcaggagcgacccccgctggcgggatccatctggtctccttcccggacggcatggaccccgacggcgaccgcacggacatcggcaaggtgctcgacggcttgccggcggcgatgctcggcggcctcgaggagacgatcaggtccagggacatcaggtgggtggtggccgacgtgtccatgagcttcgcgctggagctcgtccacacggtgggcgtgcgtgtcgctctcttctccacctactcggccgccaccttcgcgctgaggatgcaacttccccggatgctagaggatggcatcctcgacgaaacagggaacgtgagaaggaacgagagggtccagctagactccaagatgccggccatcgacgcctccaagcttccctggaccagcctcggcaagagcccagagtcacggagagccatgatccagagcacgctcacgaccaacccgacactatcgctcgccgaaaccatcgtctgcaacacgttccaggaggtcgagtccgtggcgctggcccgcctccccgtaccggcggtcgccatcggcccgctggaggcgcccaagtcggtgtcgtcggcggcggcggccggccatttctgggcgcaagacgaggcctgcctccgctggctcgacgcgcaggctcccggctcggtcgtgtacgtggcgttcgggagcctgacggtgttcgacgcggaacggctccaggagctggcagacgggctggcgctcacggggcggccgttcctgtgggtggtccggccgaacttcgccgacggcgtcggcgagcgctggctcgacgggttccggcgccgcgttggagaaggcaggggcctggtcgtcggctgggctccccagcagcgcgtgctcgcgcacccctcggtggcgtgcttcgtcacgcactgcgggtggaactccaccatggaaggggtgcggcacggcgtcccgttcctttgctggccctacttcgccgaccagttcctgaaccagagctacatctgcgacctgtggggcgtcgggttgaaggtgtgcgccgacgccgacgagaggggcgttgtcaccaaggaggagatcagggacaaggtggcgcggctgcttggggacgaggcgatcaaggcgaggacggtggccttgaagagcgcagcgtgcgccagcgtcgcggacggagggtcctcgcaccaggatttgctcaagttagtgaatctgctgagagagaaatagcctacagcatgtcagaaatgtttttcagaagttgagtggttatatattcatcagtagcacagacgtgaagaaaataaaagtagatgtgcagacatgcattgtttcaggcgacaatagaaaggattgttcacattttaaactgtatcactagagagccagcgcgatgccatatgcttcccccattactgaataaatgaattcagctgaattaaatttaaaaaaaataggttcttcgt

SEQ ID NO: 90657 - DNA, 1836 bp, Zea Mays
cacgacctctgagcagtgacactgacagtgcagctcggagctcacgatcgccctgtagctgtagccgaccagcagccgtttaccagcacgtcaaactccaagagtgtcttcagccaccctgctccatggcggcggctcctcatcggcctcgtgtaatgatgctgcccttcgccgcgcagggccacgtcatgcccctcatggagctctcccaccggctcgtcgagcacggcttcgaggtcgtcttcgtgaacacagacttcaaccatgcccgcatcctcgcgaccatggcaggagcgacccccgctggcgggatccatctggtctccttcccggacggcatggaccccgacggcgaccgcacggacatcggcaaggtgctcgacggcttgccggcggcgatgctcggcggcctcgaggagacgatcaggtccagggacatcaggtgggtggtggccgacgtgtccatgagcttcgcgctggagctcgtccacacggtgggcgtgcgtgtcgctctcttctccacctactcggccgccaccttcgcgctgaggatgcaacttccccggatgctagaggatggcatcctcgacgaaacaggtaagagcccagagccccagagccgtcgtcattactctagcaaaccacgtcgtcgtaagatcagaacgtacgtgatgatggtgctacgttcgcagggaacgtgagaaggaacgagagggtccagctagactccaagatgccggccatcgacgcctccaagcttccctggaccagcctcggcaagagcccagagtcacggagagccatgatccagagcacgctcacgaccaacccgacactatcgctcgccgaaaccatcgtctgcaacacgttccaggaggtcgagtccgtggcgctggcccgcctccccgtaccggcggtcgccatcggcccgctggaggcgcccaagtcggtgtcgtcggcggcggcggccggccatttctgggcgcaagacgaggcctgcctccgctggctcgacgcgcaggctcccggctcggtcgtgtacgtggcgttcgggagcctgacggtgttcgacgcggaacggctccaggagctggcagacgggctggcgctcacggggcggccgttcctgtgggtggtccggccgaacttcgccgacggcgtcggcgagcgctggctcgacgggttccggcgccgcgttggagaaggcaggggcctggtcgtcggctgggctccccagcagcgcgtgctcgcgcacccctcggtggcgtgcttcgtcacgcactgcgggtggaactccaccatggaaggggtgcggcacggcgtcccgttcctttgctggccctacttcgccgaccagttcctgaaccagagctacatctgcgacctgtggggcgtcgggttgaaggtgtgcgccgacgccgacgagaggggcgttgtcaccaaggaggagatcagggacaaggtggcgcggctgcttggggacgaggcgatcaaggcgaggacggtggccttgaagagcgcagcgtgcgccagcgtcgcggacggagggtcctcgcaccaggatttgctcaagttagtgaatctgctgagagagaaatagcctacagcatgtcagaaatgtttttcagaagttgagtggttatatattcatcagtagcacagacgtgaagaaaataaaagtagatgtgcagacatgcattgtttcaggcgacaatagaaaggattgttcacattttaaactgtatcactagagagccagcgcgatgccatatgcttcccccattactgaataaatgaattcagctgaattaaatttaaaaaaaataggttcttcgt

SEQ ID NO: 90658 - DNA, 1650 bp, Zea Mays
caggcagccaacagcaacctctgagatctgacagtgctgcaacccaggtgcggtgccgccgtataccacaccagcaccagcggtccagcgcacacacgctagctgctaccagcctccgatccatggccgcggctcctccccggcctcgtgtcatggtgctgcccttccctgcccagggccatgtcatgccgctcatggagctgtcgcaccgcctcgtcgaccatggcttcgaggtcgacttcgtgaacacggacttcaaccacgcccgcatcgtcacggccttggcggcaggaggaggagagaccagggcagctgcccacgccgggatccacttggtctctttcccggacggcatgggccccgatggcgaccgcgcggacatcgttaggctggcccagggcttgccggcggcgatgctcggccgccttgaggagctggccagagctcagaggactcggtgggtcgtggctgatgtctccatgaactgggtgctggacctggccggcacggtgggcgtgcgcgtcgccttgttctcgacctactcggccaccgtcttcgcgctgaggacgcttattcccaagatgattgaggatggcatcattgatgaaagtgcggatgtgaggaggaatgagaagatcaagctgagccccaacatgccagtcatcgacgccgccgacctcccatggagtaagtttgatggaagccccgagatacgaagaatcatggtaaagggcatcgtcaagagcaacccaacgttggcgcgcgctgacaccattgtctgcaacacgttccatgctatcgagtccgaggtgctggccctcctccccacggccgcgctggccgtcggcccccttgaggcgccaaggtcgacctcggccagccagctctggcccgaagacagggcctgcctcgtctggctcgacgcccagccccccggatcagttgtctacgtggccttcgggagcttcacagtcttcgacaccgcaaggctccaggagctcgccgacgggctggcgctcacgggacgcccgtttctgtgggtggtccggccgaactttgccaacggcgtcgaccaaggctggctggacaagttcaggtgccgcgtcggagacacggggctcgtcgtcggctgggctccccagcagcgcgtgctctcgcaccctgcggtggcatgcttcatctcgcactgtggatggaactcgaccatggaaggggtgcgtcacggcgtcccgttcctgtgttggccatactttgccgaccagttcttgaaccagaagtacatctgcgacgtgtggggcacgggcttgaggatccgtgccaacgagcggggcgtcttcaccaaggaggagatcagggacaaagtcaaccagctgctcgctgatgatacgatcagagcgagggcactttctttgaagagagcagcgtgcgagagtatcacagatggagggtcctcgcatcaggatctgctcaagcttgtaaacctgctgaaggaacaataaaatttaagataaatatagttgtccgcaaagtcgtattcaaagttggatagacagacatggagaattaaaacagattccacgtaggtgttactagcaaatgcactgtcacctcatgggccacatactgaaagtgacacctagctatatctaa

SEQ ID NO: 90659 - DNA, 596 bp, Zea Mays
tgattgtaaagcctgcctcacctggtttgacacgcaagccctaggctctgtcatatatgtggcattgggaagctctactgtctttgatgcaacaagatttcatgaactcgccaatagaattgtgttatctggctgggcattgatatgggtggttcggccaaacttcaccaaaaaaatttgatgcgaattggttcaatcaattcaagcaaagtgtcgatgggaagggattaatggtgactcgagctccccagcaaagggtactgtcacaccactcagtcgcttgtttcatgacacattgtgggtggaactcaacggtggaaactgtgcttcatggtgtcccgttcttgtgctgcccctactttcccgagtcctgaccagtcctgcaaccagagatccgtgtgcaatgtgtggaagacaggcaagaaacttttgttccgatgactgagaagggaaaaggttgtgcagctgctgagagatgaggatatcaaggcgagggcagttatttggaagaatatggcctgtgcaagcatccgaaaggaagggtcctcccatgcgaacttgatcaaacttgtgaatttggtacgagaaggacgacg

SEQ ID NO: 90660 - DNA, 2523 bp, Zea Mays
gaaatgatgtcatcccaccaaatttaaaaaatatacttatgatacaccatttcatttttatttttgatgaagagattactcaaaccaacgccctctaagtatttgtacgtttcatgatactagatggatatgacggaactagtgcacttaaaatgtttgattttatgtaaagagcaagcctaataaaaatagtgatgagtgagaagatgacagactagcttattactcaaaccaaacaccctataaatttagtgaaatagccacatttctcatattaatactaactaactatgagaaataagatggtaattggtcaacttattctatgtcataaatcaaacaaaaaaaagtgagaaataagaattccacaaatcaaacaaaaaagtgagaaatgagaagataatgaactaaatcattactcaaatcaaacaccatatataaaccttgcatgcgatgactctatgacaacttttcgcggtctttttcttttagtttaaaactttttgtgttgttgaagatacttttgccagatatttttttaactgcacacaacaaaaaaaaaataaaaaaaataaatgacgctctaaaaaaaggaaagcaatatgatacgtggtaactattcctttactctctccgtttagctcgtaattactgaacagatcagatctggagaaactgcgagagccggctgaagttgacgtcgctcctgttcaggccatcacgtcaagcaaccggtcacagatctatctgacaaaatggtgaagatctgctgcatcggtgctggctatgtcggtggcccaaccatggccgtcattgccctcaagtgcccagacattgaggtcgtcgtcgttgacatctccaagccccgcattgaggcctggaacagtgacaccctgccaatctacgagcctggtctcgatgatgttgtgaagcagtgcaggggcaggaacctcttcttcagcactgatgttgagaagcacgtcgctgaggctgacattatctttgtctcggtgaacacccccaccaagacccgtgggcttggagctggcaaggctgccgacctcacctactgggagagcgctgcccgcatgattgcggatgtctccaagtctgacaagattgttgttgagaagtccactgtccctgtcaagaccgctgaggctattgagaagatcttgacccacaacagcaagggcatcaactaccagatcctttccaacccagagttccttgcggagggcactgccattgaggacctgttcaagcctgacagagtgcttatcggtggccgggagacccctgagggcaggaaggccgtccaggctctcaaggatgtgtacgctcactgggttcccgaggacaggatcctcaccaccaacctgtggtctgctgagctctccaagctcgctgccaacgcgttcctggcacagaggatctcctctgtgaacgccatctccgccctctgcgaggccaccggcgcgaatgtgactgaggtggcttacgccgtgggcaaggacacgaggattggccccaagttcctgaacgccagtgttgggttcggtgggtcttgcttccagaaggacatcctgaacctggtgtacatctgcgagtgcaatggcctgcccgaggtggccaactactggaagcaggtgatcaagatcaacgactaccagaagagccggttcgtgaaccgcgtcgtgtcgtccatgttcaacaccgttgccggcaagaagatcgccgtcctcggcttcgccttcaagaaggacaccggcgacaccagggagaccccggccatcgatgtctgcaagggcctgctgggtgacaaggcccagatcagcatctacgacccccaggtgacggaggaccagatccagcgggacctagccatgaacaagttcgactgggaccacccgatgcacctgcagccgacgagcccgacggccgtgaagcaggtgagctgcgtgtgggacgcgtacgaggccaccaagggcgcccacgggctgtgcatcctgaccgagtgggacgagttcaagaccctggactaccagaagatcttcgacaacatgcagaagcccgccttcgtcttcgacggccgcaacatcgtcgactccgagaagctgagggagatcggcttcatcgtctactccatcggcaagccgctcgacgcctggctcaaggacatgcccgcggtcgcctaatcccacccccctcacccatggattggattccgggaaggaagaggagagaagctggttgaccgttctttattacagtttgtttttgcaggctacgctaccgattttctcttgtgtcaggcataaaaaaaggttggacgggctgctagtattccctgctgtttggtgttttcgtatcggaggacgtctgtagatgtacaattcctcaggccccttgtgttcggcttgaggaagtttccgttgtaccctggacctgctatagccggttgattcttcaattgtattcctaaaagttactacacagtcgatatgttccttttcttttttg

SEQ ID NO: 90661 - DNA, 2120 bp, Zea Mays
ctctgtctctcctctctctctccttcagttgctctggtttctgaccagccttgacgcggttgctactttttttttctttctttacgggacacggcacggttattttttgaagcggaggggtagatctgaatcggtgggttcgcgggacggggtatttaaggactcgtggcctcgcccctcctctgcacacagacacacaaacacaagtcgtcgtaggcagcgagcgtctctcctctcccacgcatcgcgccaaggaagagagagagatcgccgctccccttctcggcgtcggtggtgcgggtgccctccctcctcgagcgagatctgtctggtcacagatctatctgacaaaatggtgaagatctgctgcatcggtgctggctatgtcggtggcccaaccatggccgtcattgccctcaagtgcccagacattgaggtcgtcgtcgttgacatctccaagccccgcattgaggcctggaacagtgacaccctgccaatctacgagcctggtctcgatgatgttgtgaagcagtgcaggggcaggaacctcttcttcagcactgatgttgagaagcacgtcgctgaggctgacattatctttgtctcggtgaacacccccaccaagacccgtgggcttggagctggcaaggctgccgacctcacctactgggagagcgctgcccgcatgattgcggatgtctccaagtctgacaagattgttgttgagaagtccactgtccctgtcaagaccgctgaggctattgagaagatcttgacccacaacagcaagggcatcaactaccagatcctttccaacccagagttccttgcggagggcactgccattgaggacctgttcaagcctgacagagtgcttatcggtggccgggagacccctgagggcaggaaggccgtccaggctctcaaggatgtgtacgctcactgggttcccgaggacaggatcctcaccaccaacctgtggtctgctgagctctccaagctcgctgccaacgcgttcctggcacagaggatctcctctgtgaacgccatctccgccctctgcgaggccaccggcgcgaatgtgactgaggtggcttacgccgtgggcaaggacacgaggattggccccaagttcctgaacgccagtgttgggttcggtgggtcttgcttccagaaggacatcctgaacctggtgtacatctgcgagtgcaatggcctgcccgaggtggccaactactggaagcaggtgatcaagatcaacgactaccagaagagccggttcgtgaaccgcgtcgtgtcgtccatgttcaacaccgttgccggcaagaagatcgccgtcctcggcttcgccttcaagaaggacaccggcgacaccagggagaccccggccatcgatgtctgcaagggcctgctgggtgacaaggcccagatcagcatctacgacccccaggtgacggaggaccagatccagcgggacctagccatgaacaagttcgactgggaccacccgatgcacctgcagccgacgagcccgacggccgtgaagcaggtgagctgcgtgtgggacgcgtacgaggccaccaagggcgcccacgggctgtgcatcctgaccgagtgggacgagttcaagaccctggactaccagaagatcttcgacaacatgcagaagcccgccttcgtcttcgacggccgcaacatcgtcgactccgagaagctgagggagatcggcttcatcgtctactccatcggcaagccgctcgacgcctggctcaaggacatgcccgcggtcgcctaatcccacccccctcacccatggattggattccgggaaggaagaggagagaagctggttgaccgttctttattacagtttgtttttgcaggctacgctaccgattttctcttgtgtcaggcataaaaaaaggttggacgggctgctagtattccctgctgtttggtgttttcgtatcggaggacgtctgtagatgtacaattcctcaggccccttgtgttcggcttgaggaagtttccgttgtaccctggacctgctatagccggttgattcttcaattgtattcctaaaagttactacacagtcgatatgttccttttcttttttg

SEQ ID NO: 90662 - DNA, 2543 bp, Zea Mays
ggggccaacccaatcttgaccagcagaaagcctgcgatatgccgtgccttctttaataaatatgagatctgacttggtaggtagacgttgccaattactgtacctaataatttatccgatctcctatttgttcagatcagatcacttaagtaaccttcacagaacatgtctggctatgctctgttgtctcagtcgtgcactagtagtgttcaggatctggtgcatttgccagtgaattctgactgcttctgttaacatgtttggctatgttctgttgtttcagtcgtgcactagtagtgttcaagatctggtgcttttgcttgtgaattctgactgtttttgttagtttgggaaagttggtcgacttgtctcatctgtcagatgctcagggtatgtgttctactttacaagtcactaatgaagcaccttttgcgattacaggtcacagatctatctgacaaaatggtgaagatctgctgcatcggtgctggctatgtcggtggcccaaccatggccgtcattgccctcaagtgcccagacattgaggtcgtcgtcgttgacatctccaagccccgcattgaggcctggaacagtgacaccctgccaatctacgagcctggtctcgatgatgttgtgaagcagtgcaggggcaggaacctcttcttcagcactgatgttgagaagcacgtcgctgaggctgacattatctttgtctcggtgaacacccccaccaagacccgtgggcttggagctggcaaggctgccgacctcacctactgggagagcgctgcccgcatgattgcggatgtctccaagtctgacaagattgttgttgagaagtccactgtccctgtcaagaccgctgaggctattgagaagatcttgacccacaacagcaagggcatcaactaccagatcctttccaacccagagttccttgcggagggcactgccattgaggacctgttcaagcctgacagagtgcttatcggtggccgggagacccctgagggcaggaaggccgtccaggctctcaaggatgtgtacgctcactgggttcccgaggacaggatcctcaccaccaacctgtggtctgctgagctctccaagctcgctgccaacgcgttcctggcacagaggatctcctctgtgaacgccatctccgccctctgcgaggccaccggcgcgaatgtgactgaggtggcttacgccgtgggcaaggacacgaggattggccccaagttcctgaacgccagtgttgggttcggtgggtcttgcttccagaaggacatcctgaacctggtgtacatctgcgagtgcaatggcctgcccgaggtggccaactactggaagcaggtgatcaagatcaacgactaccagaagagccggttcgtgaaccgcgtcgtgtcgtccatgttcaacaccgttgccggcaagaagatcgccgtcctcggcttcgccttcaagaaggacaccggcgacaccagggagaccccggccatcgatgtctgcaagggcctgctgggtgacaaggcccagatcagcatctacgacccccaggtgacggaggaccagatccagcgggacctagccatgaacaagttcgactgggaccacccgatgcacctgcagccgacgagcccgacggccgtgaagcaggtgagctgcgtgtgggacgcgtacgaggccaccaagggcgcccacgggctgtgcatcctgaccgagtgggacgagttcaagaccctggactaccagaagatcttcgacaacatgcagaagcccgccttcgtcttcgacggccgcaacatcgtcgactccgagaagctgagggagatcggcttcatcgtctactccatcggcaagccgctcgacgcctggctcaaggacatgcccgcggtcgcctaatcccacccccctcacccatggattggattccgggaaggaagaggagagaagctggttgaccgttctttattacagtttgtttttgcaggctacgctaccgattttctcttgtgtcaggcataaaaaaaggttggacgggctgctagtattccctgctgtttggtgttttcgtatcggaggacgtctgtagatgtacaattcctcaggccccttgtgttcggcttgaggaagtttccgttgtaccctggacctgctatagccggttgattcttcaattgtattcctaaaagttactacacagtcgatatgttccttttcttttttgcatagtagcaatacctgtcccacatcagtcacagtaaacatgcgctgctgttaaggaaatgcgtgcagggcattttctttgataacggtgtaatctctctatttcccccttccactgtttcacatgaatcgtgaacggctcacgtgtatatggtttcgtacctgcctgaggtcggttgcctgtaccgaaatttggcttaagagtttttctgtttccactaggtcacgttagtctattcttctggtaaaagctggacagcttgatgagcctaattgtacgagcatcgggtgtgagtaaataatcacaaggtgca

SEQ ID NO: 90663 - DNA, 459 bp, Zea Mays
atgggaaatacaactcaaggacagtgtatggtgtttacgtggaacggcagaagaacaaacactaagcagcgatatgtctactgcactatacttgacagcattgtgaaggtgactggcatcataaagtttgatctacatgttgaaccggaaagtggtaggaaagaacttgaagtgggaggaaatgtacaaggcatatatgacctgggacctgatatatttggttcagaggcgatttttgttcccaaacatccaggtgtgtctggagaagaagatgacgactatttgatattctttgtacacgacgagaacacagggaaatctgaagtaaatgttatcgatgcaaagacaatgtctgctgatccagttgcggtggttgagcttcctaatagggtcccttatggattccatgccttctttgtaaccgaggaccaactggctcgacaggcggaggggcagtga

SEQ ID NO: 90664 - DNA, 2623 bp, Zea Mays
cttgcctccatccactggcactgatccaccacatcccacgccgagcgcgacgccagcagcaggctagctccgctgtccgctccgccgctcactagctgctggaccgcgcctccctccatcgcgccggcgcgcgcgcctaactagcggagccgccttttcatggtccccgccgtggtcgggacgagatgcctcgcctcgcattcctccgccgctccctccccgcgaggcttctcgcgcgagcgtgtggtggtggtggtggtggagaccaggggagcccggaccaggtggcgcgggacgaggaggccggaggcagcggcggaatgagcgggcggtcgtcggcgggtgggccgtccggcggggagtgctacgcgtgcacgcagcccggggtgccggcgttccactccacgacgtgcgaccaggtgcactcgccggactgggacgccgacgcggggtcctcgctcgtgccggtccagggccaggcgcaggcggcggcggcggcggcggcgccgcggcagcggcacgcggcgcggtggctgttggggcccgtgctggacccgcggagcaggcgcgtgcagcgctggaaccgctggatcctgctgggccgcgccgccgcgctggcggtggacccgctcttcttctacgcgctctccatcggccgcgctggccagccctgcctctacatggacgccgggctcgcctccgcggtcacggcgctgcggacctgcgccgacgtggcgcacctcgcgcacgtgctcctgcagctccgcctcgcctacgtctcccgcgagtccctcgtcgtcgggtgcggcaagctcgtgtgggacgcccgcgccgtcgccgcgcactacgcacgctccgtcaagggcctctgcttcgacctcttcgtcatcctccccatcccgcaggttatcttctggctggttataccaaagttaatcagggaggagcaggttaagcttatcatgacaatactgctgctcatgttcatatttcaatttctccccaaggtctaccatagtatacacatcatgaggaaaatgcagaaggtgacaggttacatctttggatcaatatggtggggatttggtttaaatctatttgcctatttcattgcttctcatattgcgggtgggtgctggtatgttcttgcgatccagcgcatcgcttcctgcctccaggaagaatgcaagagaaacaacagttgcgatctaatatcgctagcttgttccaaggagatatgttttcaccctccgtggtcatcgaatgttaacggattcgcgtgcgatacgaacatgacctcctttagccaacaaaatgtgtctacttgcttgagtggaaaaggttccttcgcttatggaatctatttgggggctcttcctgttatatcgagcaattcgctcgctgtcaaaatactctatcctatattttggggcctcatgacactcagtacttttggtaacgaccttgccccaacaagcaatggcattgaggtgatattcagcataatcaatgtcctcagtggccttatgctcttcacgttgctgatcggaaacatacaggtatttctgcacgcggtcctggcaaggaagcggaagatgcagctgcggttccgggacatggaatggtggatgaggcggaggcaactaccgtcccggctgaggcaaagggtgcgcaaatacgagcgcgaacgctgggccgccgtcacgggagacgaggagatggagatgatcaaggatctgcctgaagggctgaggcgggacatcaagcgctacctgtgccttgagctagttaagcaggttccactgttccatggcatggacgacctgatcctggacaacatctgcgaccggctgcggcctctggtgttgtccagcggggagaaggtgatccgggagggcgaccccgtgcagcgcatggtgttcatcctgcagggcaagctccggagcacgcagccgctgaccaaaggcgtggtggcgacgtgcatgctgggcgcgggcagcttcctgggcgacgagctgctgtcgtggtgcctgcgccgccccttcgtggaccggctccccgcgtcgtcggccacgttcgagtgcgtggaagcggcgcaggcgttctgcctcggcgcgccggacctgcggttcatcaccgagcacttccggtacaacttcgccaacgagaagctcaagcgcacggcgcggtactactcgtccaactggcggacgtgggccgccgtcaacatccagctcgcgtggcgcaggtacagggcccggacgtcggcggacctggcggcgccgccgttggtgggcgggcccgacgacggggaccggcggctcagacactacgcggccatgttcatgtcgctacggccgcatgaccacctagagtgagcactgatgagcaggagggagggaccatcctaggctcctagctgtgccggccgcgtcatggtgactgtacagtgtgcactgtaatagtatattgctgccatcttttgcgtaagtgaattagtgaattgtcaattgccttttcccccacaagaatccgaactctgaaatacttctgttggcctgtctctccgcgttcgtcaggatattgctgcttctgaccgcgccattgcggcctcagctgcagg

SEQ ID NO: 90665 - DNA, 408 bp, Zea Mays
atgaccgttgaacaaaaaaacgagaaaagtagaaaacgtcgtgaagcaagccaacgaaataaaggacctcctatacagacagaggcatctagagttagtctttcagatggctgtagcacaattgatttcacaaactttgcaacacaagttccaaatgtgaatcgagatgatgatagcgattggttgcataggaatgagacattcaagtcagacgatgttttcacaacaagagaccttctgacaccaggcggtgtgcatgaaactgttggtaacacgcctaaccataatttgggaagggctgcctactttagagagcggtacaaaaacttaactccagccgagagggagcttaatcgtgaacgccttagttgtataataatacaccaaagcggaaagggtcaaagatag

SEQ ID NO: 90666 - DNA, 3956 bp, Zea Mays
ctctctcctcttgctctcgctccctctcgctcccccagtccgcctccctggcccatcagatccaattccttccccgacccccatcccggatccgccgcaattcctccgtgcgtcgagctcgattgctccccgcccgtggaatttgctcctttctcccgcaagaatcccacctcggccggcgacttggggggacctgccaaggtttgggcgcgcgctcctgcttggcgtagcgggccatgggcgtgctgttgccagctaggctgttcgtgcgccggatgctcagggttgtcaggctcaacccgttgcagcgcagcgccaagagtggatgaggtaatttctcgcgagcgcattcagcacagcaggttactattggctgctcgtccacttaagcaggttgaggtatccatttggttcgacacagtgaagaactgaagatacgcattgtgcttgcttgtcttgcggggctcacaaacatcctgctggtgtgctgtgctgggaaggtcacataatccacttggctatatgccggggtgggaatgtgaatcggggcttcattagtgcaggcagcaggcttgttaacttgttttgcaacaagcatgggggcaaaagttgaaggggaaagctatatgcctggatattatgccacaggggatctcaacgtggaagcaagtggtaggtggtctccatactatgaggagatgacatcaaatggccagttatgcaatggcttcgcaacaaaaccaacaagtggttattcagaatttgacaaagaaatactcaagcatcaaattcttgaacatgaagctgtgttcagacaacagcctcacaacccactcgctatccaggtgtatgaactgcaccgagtttacaaaatacagaaggatatgatgaaacaacatcaaagaaaagaggtatattcatacccaactttggcaggtgcatcacatactaattcaccatcacaagtgccaccaaacggtgcaaagatgatgtggcagatgccagttcctcctgtgtctacaacatacaggaaagctattggagagcataatgatacaaaccagtcctgcatgaagttccttagagaaggcagtgtgcagtcttctccaaatggatttctatcaagtgatgctgctccaagaaccagacaaggcacttttgaccttcaacttccagccgatcattatatagatgacgatgacacatcagataacaagcccatagatttccttggtttggcatcagatgcaaaaccccagaatgatgctgagcttacattagttagtgcagaacgcttgggcaagttcagtgataatagttcatcctcaggtttgcggactacaaataatcttggaagccgacaagttaccaacctgaatgaatcaaatactggcttctttatgggtagagcaaatggatctgtttccagaggccttccgcataccctcgagaactcgtggcaccaaccgatattgagatcaagcacaactactttcaatttcagtaaagaatactccaaagaaaagcacacaaatgaaggtacaagctcaaatttttttgacacaagtgcgaaactaacacatgacgacaagccaacaatcaataaaggtaaacaagtcagcagtataacttttttagcacccagatataatgatgctgatcccccaaaatacttcaaagctgctgatgggaggcctgccagttataaccaatttctttaccaaggtcagaatagttcagctggatggattgcacgaagtcctctggaaccttctgttatcaataattttgctagagttgaccgtccacatcattcgaatctgggtacatttactgtccccatctctattcctcaaatagacaatccttcaattgtctccccgatgggttcttgcacagcagacccaaggagcagcattgtcaacaatcctgctttaattccaagattcaatgggtcgtcaaccgtgaattcgtacgccagtcttagtgctgtgacacagagcattggaacttcaatcccaaagctgaaaaatgtggataacttagataaacgctatcctggttttccacttgattcgttttctgtgtcccactcacgacatcaggtagcaatttcaagtaacctggagcaaaagaactcccagaagtttgaagattcagatcaacagtcccatggcaagggtatgaagaacttcaatttgaatgagacactgtcagattgtcaggaagatggtcttgtagaacaagatgggagatgtgctgccagttttcagcatggtaaagacggagggtcagtattcgggatctcttggctcaaaaataaagctgtgtctgctgatccaacagctttggagaaggcagggaagatttttggccattcgtttggaactacaatggagctgaaaaatgctaaagaccagaacgaaccagctgtgactattcgaaatttgtcagactctgcttcgacatctcttggctgtggaattaagaaggatgggccttcagaagacattgccactggaactttgctggtttgtaataaagcccaagaggacgctacatgtttacccctttcatgccagaaacatgtgcctaaagatggacaagatgctgatggagtcatcaagataagtggtgcctccatcaggaatttcatcgatctcaatgatgctgtgccaaacgatgacaattctgaagaatcagtagtgtcacatgaatgccaggcggaaccttcacggaacaaccatcctaaacgagcatttgtgattgatctagaggtgccggcttgtgaagaggatgctgcttgggattttgatcaagaatgtgcacagcctaaacctgatgcacaccaggaagttgacggcagatctgatacatctgctctagctgcagctgagaacatcgtagcgttgtcaaggattattccaacagctctagaggcatctgatgatatgttgcagtggtttgcagatctcgctgtattgaacatcaaggaccttgctgagcaagctgaactccaagcttgtaccaatgattccagtaacgacgagtcagattcattcgaatccttgacactgaagctggaagagaccaagattgatgagtactggagcaggccactggaacctgaaatcacaaccgatgaacaattaatttcaactgctcaccttctcaccaagcccagaaggggccagcaaaggaggcgacggcagaagcgggatttccagaaagatatcttgcctggcctttcgtcactttcccggcctgaaatcatagaggatgtccagttgcttgaggggttagtccaggcttctggtggatcctgggagtcgagtttaactaggcgaggacgttatggtgggcggactcgaggtaggaaacctcggaaaactgtagtaactgtaattgtagaagaggaggtcgaggttagcccaccgccgaaacctgttggcactggcgacctcgaagccgatggtaggggtatggttggatggggcagaacaacaaggcggtgtcgcagagcgagatgtccgtcaggtaacaacttggctgctgcgtcttgagaaagggtattgccagcaagcattggacctgattaggtacttggtggttcacaattgttatagactccgatggatggactggtataaggtgatcacagtcatgagtgtacatactctgtcggcgtattggcctcaccccaactttcatgcttttgggttgaaacatggtttacgttcttataataagttccgtaaattagctggtaagacatttctgcgacagcattgtattaagctgttccaggttatgaggtccggtataaattcattgtgagaaaaaaaactgcaatgcctgtaaaccaccttgatctctgaagattagctcatcgcatgcgcaacaaagggtgtgaaagacttcgggtctgtattcttttttagcttatatatgctctg

SEQ ID NO: 90667 - DNA, 1328 bp, Zea Mays
agtttttcccgttcgaatttcggagccctcctctcctccccgctccagcgcccctgcagttctcgctccactgacagctcgccgaggggccgcgccgcgctcgagacccgtcgatggcgaggcggagcctggcggtcgacgcaaccgcaggcgccgcatcccgggttcggttcgcgcccacctccaataacctgctcgtctcctcatgggattcggggctgcggttgtacgatgccgacgagggcacgctcagggtcaacgtggagtcagaggcggcattcctcgactgctgcttcgaggatgagtctgcagcgtttgcctgcggctctgatggatctgtgagaaggtacgacttccactcaggttcgcaggatacggtggggctccatgaagatgcactagcctgcattgagttctcttcactgaccggtcagattatgacaggcagccttgacaagaagctaaagctttgggattcaaaaacaagaaatgtaagcccgagcggcaccataaccttaaattcagatgtggcctcaatttctatatgcggcatttacatattagctgcagttgagagaaatgtttatctttatgacatgaggaatctaacaagaccagttgatgaaaaagactgtcctctggattatcaaattcgatgccttcatacttctctagagtggaatgcttatgttgctggctctgtggatggagttgttgcattgaagtatcttgatcgtggaacagatagagatttgggatatgcatttcgttgtcatccaaattccagaaacggaaaatggaatctggtccctgtaaattgcatctcagttcatccctgcaacagaactttcgttacgggagatgataaaggatgcactattgtttgggatgctcaattgaaaaagaagctgattgagcttccaatgtatttgggcagtgtggcgtcagtggcatacaaccataatggccaacttctggcggttgcctcaaactattttttagaagtggataaagaggagcaacaccaccaggtattcattgaaactgtggagaacttcaaaggcaagtcccgtgtgggatagagccttctaacaaaacatgttctgttcatctgttgtattgtattttgtctaccatacatgttaaaggtcaccaagatgtgacagcatgttgtattatgttgtatgactaagcattttttttaggaaacgacataatatggctaagcaatacttgtatatattggttacatctagtctgagacagctgtggtgtgttgtaactcttttgagcttttgcaaccagtattgctgttctggacttctggt

SEQ ID NO: 90668 - DNA, 1139 bp, Zea Mays
tcctccccgctccagcgcccctgcagttctcgctccactgacagctcgccgaggggccgcgccgcgctcgagacccgtcgatggcgaggcggagcctggcggtcgacgcaaccgcaggcgccgcatcccgggttcggttcgcgcccacctccaataacctgctcgtctcctcatgggattcggggctgcggttgtacgatgccgacgagggcacgctcagggtcaacgtggagtcagaggcggcattcctcgactgctgcttcgaggatgagtctgcagcgtttgcctgcggctctgatggatctgtgagaaggtacgacttccactcaggttcgcaggatacggtggggctccatgaagatgcactagcctgcattgagttctcttcactgaccggtcagattatgacaggcagccttgacaagaagctaaagctttgggattcaaaaacaagaaatgtaagcccgagcggcaccataaccttaaattcagatgtggcctcaatttctatatgcggcatttacatattagctgcagttgagagaaatgtttatctttatgacatgaggaatctaacaagaccagttgatgaaaaagactgtcctctggattatcaaattcgatgccttcatacttctctagagtggaatgatagagatttgggatatgcatttcgttgtcatccaaattccagaaacggaaaatggaatctggtccctgtaaattgcatctcagttcatccctgcaacagaactttcgttacgggagatgataaaggatgcactattgtttgggatgctcaattgaaaaagaagctgattgagcttccaatgtatttgggcagtgtggcgtcagtggcatacaaccataatggccaacttctggcggttgcctcaaactattttttagaagtggataaagaggagcaacaccaccaggtattcattgaaactgtggagaacttcaaaggcaagtcccgtgtgggatagagccttctaacaaaacatgttctgttcatctgttgtattgtattttgtctaccatacatgttaaaggtcaccaagatgtgacagcatgttgtattatgttgtatgactaagcattttttttaggaaacgacataatatggctaagcaata

SEQ ID NO: 90669 - DNA, 1287 bp, Zea Mays
gccgcagcctaggtttcatggcagccagcttcttcccgttgtgcacctcgccgcgtcccggcgcaaccgactgtgcaccgcccgtgcggccgtctcagggccaccggaggtggacgaggacgattccatgagcatcgacaacttgcatcgcttcttcgacctcaacgtcgggaagtgggatggccggttctacgtatgctccgccctctgccagttcgcatctaatcttcgagcctttctgcattttccggatacgtgatctggctgagtgttgtgcgcgcctgtgcttgtgttctgtgtagcaattcgacgcgcacgggaaggttcttcaggagattagcacgaggctgtccgtgagctcgtacggggaggacaaactcatcagcctcctgcaatcgttgtacattaagcaaggatcctctgcaatatcgattgtggacgaagaggattctgaacctgaatgggtggagtacaaaatcaaagagacgaacatgttcactgtggacaaatatcagcagatagggttctttcctgaacaaaaggcatttgctctgaggtaccagactgctggaatgctggagactgttcttcggattggtgtgcttggagaagatgatactggtgaagaatcccccaagcaatggtagaatcagggcttttcacataatggatccaaagggagtgctcgacacacttcttgtttttcatgagaagaggcagggatctaaagtgccacagccacttacaaactattcagttggtaccaagagtgctagcagcgataggataaatgcactacttggaagatgggaggggcattctgtgactaagcggagtggggtgtatggagcaacacttgttgaggcagatacagctattgttctcaagatggacagtaatggccaattaattcaggatactttatcaactaaattcggaactggaacaacaacggtcaactggacaggatcagcaaatgacaacttgcttcagtttgatggaggatatgaaataacattgctacctggtgggatgtacatgggatatccgtcagacattagcaaatctgttgcccaattagattcttttcatttggagttctgttggatggaatcacctggaaagaggcagcggcttgtccgaacttacgattcagctggtttggctgtttcgtcgacctatttttctgaaaccaaagtatgagtcacagtttcctcttacaaaatgtattgcaacgaattttgtaagtgatccaataatctcactaactatttttgttgttccgtg

SEQ ID NO: 90670 - DNA, 1353 bp, Zea Mays
atggacgaccggcgcgggcgcggcgacgcgttgggccagaggccgttcgcgtctgctgctcagagacaggaaagggtgttcgacggtggaggcggaggcggtggcggcggccatgggccagcgtttggcgacgagtttgatcaggggtcgtccctcatggcgcttctcagcgctggcgcacgtgcagtgagctcccagccaccgccgccgacgtggggcgtggaggaggtgaccgcggcgcctgccattaacctggtgcctcaatcgttctccatgtgtttcagtgcaattgacaataatatatacctcaaagatcacaatagtatgatatgtttcctctcaatgaaggcaaactacgcgccaccgccgccgtcctaccagtaccagcaaccgacctcattcgccccatcgccgctgggcggcagaatggatccctacgcgccgtaccttcacgtagaccagccgccgcaatggcctcctccccgagcgacggttgttggttcctccctgccgcactccaacttcaccgtcctcttccccagcaatccatacgagcatgacatgcagctgcgagcgaccgcgctattcggcggcggcggcggctcatactcatacacgctgccgccgccgccgccgctggccatcgagcagccagcgaaggacggttacacctggcgcaagtacgggcagaagcagctcaaggacgccgagtcaccacgaagctactataagtgcacccgcgacgggtgccccgtcaagaaggtcgtggagcgctccttcgacgggctcatcaaggagatcacctacaagggccgccacaaccacccgcgcccgcaggaaggcggcctcgccggcggtgggaacgatgccggcctcgctgccgccgaggaggacgcggaaggcccgagcgacgacgatgacgacgcgtcgatgcatgaggatgacgtcgagggtgctcctggcatgggcgcggacggcgtgggcgggcagagggtggtgaagaagcccaagatcatcatccaaacgcggagcgaggtggatctcctggacgacggctaccggtggcgcaagtacgggcagaaggtagtcaagggcaacccccggccgaggagctactacaagtgcaccgcggataactgcaacgtgcgcaagcagatcgagagggcgaccaccgaccccaggtgcgtcctgacgacgtacaccggccgccacaaccacgacccgcacccgccgggccggggcaacgaagccgctgccggcggctcttcggctgatccggccccttcatctgcgaacacggctactggaactgggggctcggcagctgatggaggagtgctagccgggaaatga

SEQ ID NO: 90671 - DNA, 2692 bp, Zea Mays
tccctccaaaagcgaactaaagatgtcatccatccctgcaccctgttcctctcttcaaagcctgagaccactttcctccctatgagaaaccaccaatcagttttgctacatactggtgcttctgatgccaacatcaacaaagatgaccagaagcatgcttgagtggaagagagtaccgatgttgatcatcctctccatccttggtatcactagcatagccagcaccaatgcaattgcatcacagaaggatccgtttgtacctcaggacaactatctcattagctgcggggcatccagttctgtgcagcttgatgatggcaggacattccgctctgatccagagtcggtatcttttctgtccaccccagtggacatcaagattaaagctaacaattctccaactgccgcttcatcattatccccactttacctgtctgcaagagttttctctgatgtttcgacttatagcttctttgtctcgcagcctggccgccattggatccgtctctacttcttgcctatccctgacaaacaatacaacctcacctcagcaacattctctgtgttcactgacaatatggttcttctccatgacttctccttcatagccaatcctcctaaccccgtccttaaggagtatcttgttgtaacacaaggagacaccttgaagatcattttcaccccaaagaaggactcaatagcattcatcaatgctattgaagttgtcttggcaccacccaccctaatcccaaataccaccattggcctgcctcctctagaacagtttgacatctccaacaatgcattgcaggtagtctacagactgaacatgggcggtgcacttgtgacagccttcaacgacacactgggcaggacctggttaccagatgcaccttttttgaagcttgaggcagcagcacaggtggcttgggttcctcctagaactatcaagtaccctgatgacaagacagtcacaccgctcattgctccagcaaatatatactcaacggcacagcagtcagcatcaacaaatacctcgcaagcaagattcaacataacttgggaaatggaagcagagccaggattcaagtacctcatccgcctacatttctgtgatattataagcaaggcactcaatagcctctacttcgatgtctacataaatggcatgatgggtgtatccaaccttgacctctcaagcttgacaatgggccttgcagtagcctactaccaggactttatcgtggactcatccagcatcatcaactccacccttctagtgcaggttggcccaagcacaaccgactccagcaatactgatgccatccttaatggccttgaagtcatgaaaataagcaaccaagcaaacagcttagatggcctattttcaccaaaaacaagctcacaacttggtaagaggatactaactggcataggtctttctttggcagtgattgcagctgcattggccatagtgatgtgctgcaggcgaaaccaaaggccagaatggcagaagacagacagcttccattcttggttccttcgcctcaactccagacagtccagcttcatgagcagctgcagcaggctctccagaagtcgctttggctccacaaggaccaagagtggtttttctagcctgtttgcatcgagtgcttatggactgggccgctatttcacctttgctgaaattcagaaagccacaaaaaactttgaagaaaaggatgtcattggtgtcggtggctttgggaaggtttatcttggtgttcttgaggatggtacaaagctagctatcaagagaggcaatccatcttctgatcaaggtatgaatgaattcttgactgaaattcaaatgttgtcaaagctgcgtcaccgccacctggtttcactcattggttgttgtgatgagaacaatgagatgatcctggtttatgagttcatgtcaaacggtccacttagggatcatctatatggtggtacaaacctaaagcctctatcttggaggcaacgcttggagattagcattggagcagcaaaaggcctgcattatcttcatacaggtgcagctcagggtataattcaccgtgatgtcaagactaccaacattctccttgacgaaaattttgtggccaaggttgctgattttggcctatcaaaagctgctccatcccttgagcaaacccatgtcagcactgctgtcaaaggaagttttggctaccttgatccagagtacttcagacgtcaacaactaacagataaatcagatgtgtactcattcggggtggtactctttgaggtgctgtgtgcaaggccagccatcaatccagcacttccaagagaccaggtgaatctcgccgaatgggcccttacatggtaccgcaagggagagctcaataaaataattgatcctcacattgcaggtcaactcaggcctgattcactagagatgtttgctgaggctgctgaaaaatgccttgctgactatggagtcgaccgtccatcaatgggggatgttttgtggaaacttgaatttgccttgcaacttcaagaaaaaggtgatgttgttgatgaaaccggcaatgggataccaatgaagcacttcaacgactcggtgtatgatgacatagagaaatctagcagtgcagggccatctgttgaaggaagataacaatatgatcacatcaccaagatt

SEQ ID NO: 90672 - DNA, 2463 bp, Zea Mays
ttgcagccttttgtatcgagcatgtactaaattggtcatggagaaatatcaacaagtatgccgacattagctcttgaaagatcccaacttaccaacattggtcagggtaaatttgtcaagttatcaattgatgtgtgcttggttattgatttccattagattgcagcatagcttgctcttcatctgaaagttttcgagggtaagtgtttatcatgcaccatggttgttggtaatgacatagtttacatggttgggtgctaaaaggacgagaagagtttgaataatcggtccgatgaacattctacttgagcttaagcacctcaagccctttagcatccctgcaaggcttgtcatctgtaaaggccttctgatagtgattgcccttattttgttgagagcaattgtgtctccttttcttgctatagattcatctgagaagaaagagttttacgagtcaacagcccctgacttgcttcctagaattagacgtgacaagtttcttgaggtcccacagatcatatgggggttgaacaatcaaaagattgcattcgccagagcatgcttgactgcaagattcctgaacagatcccttctcatgccaagcttgagtgcttctctcttctacaaagaggttgacttgcttcagcctatcaattttgacaaagtgtttgactttaacaagttcaatgcgcgttgccatggcttcgtaaggttagctcagtattcagaagtttcaaatcgaaccgagcctttcaaactccaaaaggggactggtagaaggtggacggcagacagagatttggatcaactgcagcaatccatagggagcaatgcggatgactctgaagtcattgaaattgttgggaaaaatccatttctgtggcctgaccactggccagtcaaagactatgccaaaatctttgattgccttgtcttagttcctgagatagaaaccgaagtggttaatgtgatatccaagattagagaggcaggccaaagagcaagacatgaagctgggagttctcatagtaagcagaggagagatagctcaacgaatccgcctgtaccgtatgttgctgttcacatgaggatagaaaaagattggatgatacattgcaagaagtgggagcaacggtccaagtcgcatgaaatctgcagtagtaaagaagagatcattcataaggtctcacagatcactgatctacatcggccggttgttgtttatcttgcggtagctgacagccttcttgaagatgattcaataaccagtgggtggagagtgggtatggttgcttacgagaagaagaagcttggtgttactgacgtctacgatcggcagccatatcttataaagtctgccatcgactttgaggtgtgctcaagagcagatgtgtttgttggcaatagcttctcaacattctccaacctcgtagtgctgtccagaacagaaaggctgtataacctaggaaaggcgagctcatgtggcgagaacatcgggctttcatcgtatgcatacaatgtcatgggcggcgatggtggaccgcagagatggatgacggatatgtcggatggaagcctgcagaggttaagttacggaacaaataacgtctcatgccactgactttgacgcatagcacttgcctgaacatgatgtatacgtgaggaagtccctgtccgatttcatttagggcttgttcgtttgtgtcggattgcacccggaatcgttccaactaatcaaagtttatataaattagagaaacaatccggttaggaatcgttccgacccatcaatccgacagaaacgaacaaggccttatcgacaaaggaaacaagtacgtgcagctaatttgctgtgcctctgtgtttgaagcacttgtgaaagactatggccaggagttgtctgttgatagttgtgcttaaaagccttgacagtgttgggcagtttgtagtttgtataaagctgaatgctgtgcgatggcttttacctgggacccctttgtttttatcgtttcagaatcagaccttaaacacattcatgtgaagtgtatttgttcacttgcagcgtgtgtgttttaagatggttctgagtttttttttgcccgcaatgcagtaacctccttgcaaaaaggaccagatgcttgctatttctctgagattgaaagggagtgagaaataggtgctggtggaaagataatttggtgattttgttttttcttctttcatcatattgtaatataacattttaatgaggatctctgatgattagcctgtgtagtggtgtcttattgagtcatcgggtcctgagtttaaagcagtcttttcgtatttacggggtgaagacaatgcagtgaagacttgctttggtttactgtaactaaatttctattcaccggttcaaatgtaaatgcagaagccatcttaccctgtttaatcctttttgaagtgtgtctggaaggtacagaa

SEQ ID NO: 90673 - DNA, 1338 bp, Zea Mays
cagaacagagctcaggcctcagagagacaccgcttcagcagcagaagaaggctactggctacaacaagtcaacaaggcgcgaaacttctttgacccaaacagagaaccccgataccgatcctctccccctgtggcctttgcatccaaaatcgcccaccctcccattgccacatccctccttgcttgtaactcgtcatctcctcctctgcagactgcagtggcagtagcgatgatggtgaaggaagaggagatgatggcagaggcaggaggaggacgaggctacatggacctgcttggcctcggcgaagaggactacctgctgtgcctgtcccctccctcctacttcactcccagtgtcgtctccgccacggccaccaccactgccgccgcgtcggcatcaacctgctgcgcggcctcctacctggacctggacctggctcccgcttaccaccacacgctgagcttcggtggccaggaccaggagcagcagcaccacggagacgacggcgccttgggcttccagcactacggcggcgatcacgcgatcccggcggcggcggcggctgttcagcagaagtccagcccgaccaccgagtgctcctcctccctctcgtccatgtcgccctcgccgcccgcgacagccgtctccgccgccgtctcctgccccaagccacaggctttcaagaagaagaaggcggggtcaaggagcagtgcgtctgccgccgctccagctgctacgaacaagaggcccagggtgaggagggagaggctcggggagaggatcgtagctctgcagcagctggtctctccgttcggaaagtctgatacggcttccgttctgcacgaggcgctggggtacatacgcttcctgcacgaccaggttcaggtcctgagcacgccgtacatgcagatgcagcgccagccggcctcggcgcacgtcccggagagcgcggcggggacggtggtggaggcgcaggagcagcccgacctgaggagccgaggcctgtgcctggtgcccgtctcctgcacggagcacatcgccggcaacgacagccacggcaacggcgccgacctctggtcgtccgtgctgctgccgctgccgctgccaggtggtggtagtcacccgagccaagggcgcttggcctagctgcccgcggacacgcttgctttacggattatgcttatgccagggtttagggctttcagtaggcgcttttggggctactaatctatccattcccggccgtactccgtctgtctaaaagtaaacttttggggagccgggtgctgctgctgctgcttttggtgggaaaaaaaaggcgcagggatccatattgc

SEQ ID NO: 90674 - DNA, 643 bp, Zea Mays
cagagagacaccgcttcagcagcagaagaaggctactggctacaacaagtcaacaaggcgcgaaacttctttgacccaaacagaggatcgtagctctgcagcagctggtctctccgttcggaaagtctgatacggcttccgttctgcacgaggcgctggggtacatacgcttcctgcacgaccaggttcaggtcctgagcacgccgtacatgcagatgcagcgccagccggcctcggcgcacgtcccggagagcgcggcggggacggtggtggaggcgcaggagcagcccgacctgaggagccgaggcctgtgcctggtgcccgtctcctgcacggagcacatcgccggcaacgacagccacggcaacggcgccgacctctggtcgtccgtgctgctgccgctgccgctgccaggtggtggtagtcacccgagccaagggcgcttggcctagctgcccgcggacacgcttgctttacggattatgcttatgccagggtttagggctttcagtaggcgcttttggggctactaatctatccattcccggccgtactccgtctgtctaaaagtaaacttttggggagccgggtgctgctgctgctgcttttggtgggaaaaaaaaggcgcagggatccatattgc

SEQ ID NO: 90675 - DNA, 3330 bp, Zea Mays
atggcaccgccgcaggatttgtgcgttaccgcctctgcaatggttgggccgccgtgggggagtcgagacgggtcagggttctttctggtctgtgttgaggttcgctacggcgacacgcgctcacgtcccagcgagctcacctcgtcggcggccaagggcatcatctgcacggagattgcaaggaatcgaagatgtctccgtgactccatcgtcatgagcagtgggcggccgcggcgacgagcgacaacagagcttcaaggaaaggtacgcgtcaagcctgtcgatgaacttcggagacggtgggcgtcaggttcgaattctactttttcccgtgatgaaactgctttgacagaagaactagatttggatgtagacagaatacaagatgaagtaaaactcaattggctcacaccagatattgctctacgtgttgatgctgatccccttaaggacctacgggtgaagggctccatctcacgtttttggggatatggcgatgagtgcaatgaggattatctgcaggagtctggatcagttgaaacaccatccaaatcattgattgtaaaaaaggcatatatggctggatactcctttcaggatttggttcaggcagatcgatatcttgacagctctactatcagtgcacaagtatctgccattgaaacaccatctgatttggggagcaaaggcaaattcgtcagaaacctactgacagaccttgttacaaacaaaaaaaagacaggtaaaccatggcaaggtccccttccggctccaaggatttctccacctttaacacttgcagactgtccgttccgtgttaatcatagattccaacgaattggtgagcagggatcaggtaacatggtgacaatcagtgaccagagctggggaaggaagagtgatgctgctcaaaatttgaaactccacgcgagatttcaggcttcagttacagaaggcagcacctcaaaaaaaggaaacaccaagttcaggccaaattgggcccttgcacgcctgttgaccagacggggcaagttttttggcaaagcccagcccacaaacgtttgccccaaaggtgtcataccctacgtaccaccactgcccagatttgcagccgccgtcaattctcctactctcccagttttgccttcacacaagccaccatacaaatcttacgccgaggttgtgagacgaggggttaaggcaatggaggacagaggcaaaactggattctctggatatggagcaggcagagctttgggtcacaatgaaggtgatcgaatggagcttcggctaggacaggtccaggggaacaacgctggctttgggcagggaagtggaccttttcagccggcaacaatgcttgggggtaattgccagcagattgctccaaattttggaggttcgttttttgggcaagggaatttggtgtttggtcagcgcttgcaaggttcgcagttagggttcaatcaaggatttggtggcagcactggaggcaatagggatttgtcttggacacatgggcgagatcatcgtgctcggtctgcgcatgcaccccgtgctgggaagttcagtgccaacaaacatgttgtagagggtgggaaattggagaattctctgcaacaccaggggcagcgcaccaataaaatgatgcagaacaatgctgaacctgaacctatgaagctgaatgcaaaacggataatggaagaaatggttgacaataggcatgacaaaaaaaggatggagaagcaagatgagaatgtaatagttcaggatgctataaagatcactccagggattgaggcaccaaaaggtaaaccaaaatggtgtttccggtgtagaactaaggggcatgctacaacagaatgtaccgcgatccttttctgcaatatatgtgagggaggtgatcatgtagcagccacttgccccatcaagaaaaaacctcgaccggtggctctctcagtcggttatgctgtggatggtttaggtttctttcatattccacatgggccgatttctactaccaaaaatgaaaagaatatggcactaatcaaagttataggaggtgcacttcaacaagcagatttggttgcccacttacagcggctggtgcctggaaagtttgaatgggatgcgcaactgcatgcaccaaataaatgggtaacatcctttccttcaaaagtagaattaaagcgaacagtgaattttggttctgctgatctaaagaatggcttagtgttaaaatttgaagaatttgaggaggaatactttggagtggaactgcctcgtgtgtggatgcgggtactgaatttacctaacgtacttcgaacatatgaggtgttgtgggctattggaacgatgattggagctactacaaaggtggatatgatcactactcgaaagagtaattttggtcgatttgaggtggctgttctaaacacatcaatagtgcctacacagatagatgttgtcattggcacaagatggtttgaattacaacttcaaattgagagcacaagttcttcttcagggacaagaacgactgaggataatggtaacgctaatggcgacaatcaggaaaaaggcaatgactcagaaatgaaggatgaagaagctggtgctaaggatcataagtcctctcattcaaatgtttctttttcagttaaaggagcagggacctctaaaggacagcaggttgatgatggttccattgaggatttagaggaagatggtttattggatgttggttgggaggtggcagatggtcctactactgatttaccctctgaattgtatctagataattatgtagtccaaaaagacaacaacaatattcaaattcagaaaaatatgggcaatgatgttgagcagatgcaaccccatgtacaggctaatttaaggaaaaatcgcttgttcacaatcagtgaaacacatgctgaatcacaacctacaacaatacaaacaaagcaaaaccagaaagaagatgatcgcggcatcgaagctactgcatcagatgccctaggtcctttgctagatagggccttgacagagcttaaagaaaggcagtttccacataatggcagcacagaggatggtcaagttctaactgacaaccagctacacactccaccataccaggtgaaaaaagctataatgctaggacaccgaagaggaggagtaaaaggagggaggactctgtcaacgaagattccatcgaacgtgctgaaaggttggtggcaaaaaggaatttggagaattctaaaggataataagacaaaattagatgaatctgatgaggacattgatttgaaacctctaagtcttgtgtggtga

SEQ ID NO: 90676 - DNA, 1713 bp, Zea Mays
tgcactagctcaagcagcctatgccacatttgcactcaagcaagtgagcagctcgcccgccctccagcaacatggagacggccaacgttgtcatcctctcgttcttcttcatctttgcaatccaccgcctcttcaaccgcctccatagcaggagcacgaagatgaagccgctgccaccgggccctctagccataccggtcctcggccacctatacctcctcctcgagaagaatatgcaccacttgttcacgcgcctcgccgcgcgctacgggcccgtgctctacctccgcctcggctcgcgtaacgccgtggtcgtgtcctctgtggactgcgccagggagtgcttcacggagcacgacgtgaccttcgcgaaccgcccgaccttccccacgctgcatctcatgacctacgggggcaccacggtcggcacctgcgcctacggcccgtactggcgccacatccgccgcgtcatcacggtgcacctcctgtccgctctccgggtgaggtccatggtccccgccatcgaagcagaggtgcgcgccatggcgcggagcatgtaccgtgcggccgcggccgctccatgcggcaccggcgccgccaaggtggagctgagggggaggctgttcgaggtcgcgctcagcgccctcatggaaaccgtcgcgcagagcaagacatcccgctcttccatgggcggtgccgcggacacgggcatgtcaccggaggcccaagagttcaaggagtccatggacgttatgattccgctcctcggcacggccaacatgtgggacttcctgcccgtgctacagaggttcgacgtgttcggcgtgaagaacaagatggcggccgcggtgagcggcagggacgcgttcttccggcggctcattgacgaggagcggcggaggctggacgacggcgtcgagagcgagaacaaaagtatgatggctgtgctgctcactctgcagaagtcagaaccggagaattacagtgatgacatgatcatgtctctgtgcttctccatgttctctgcgggaacggaaaccactgcgaccacggcggaatgggcgatgtcgctgctcctgaacaaccccgaggtcctgaagaaggcgcagggggaaatcgacgcgcatgtggggaattcccgcctgctaggcgccgacgacatgccgcacctcccctacctccagtgcgtcctcaccgagacgctccggctgtacccggttttcccgatgctgatcgcgcacgagtccaccgcagactgcaaggtcggcggccaccacgtgccaagcggcacgatgctgctcaccaacgcatacgccatccacagagaccctgcggcgtggacggaaccggacgccttcaggcctgaacgattcgaggatggcagcgccgaagggaagctcctgataccgttcgggatggggcggcgcaagtgtcccggagagaccatggcgctgcggactctagggctggtgctggggactctgatccagtgcttcgactgggccactgttggaggcgtccccaaagttgacatgaccgaagcgtccgggctcactctcccgagggccgttcccctcgaggccatgtgcaaaccgcgccaagccatgcttgatgtccttcagaacctgtgagtgcccttgcggaccgaagaagttgatgagcatcattatcaaatgttgccacgttgttgccttgctatcgttatacgtaggg

SEQ ID NO: 90677 - DNA, 1755 bp, Zea Mays
tgcactagctcaagcagcctatgccacatttgcactcaagcaagtgagcagctcccccgccctccagcaacatggagacggccaacgttgtcatcctctcgttcttcatctttgcaatccaccgcctcttcaaccgcctccatagcaggagcacgaagatgaagccgctgccaccgggccctctagccataccggtcctcggccacctatacctcctcctcgagaagaatattcaccacatgttcacgcgcctcgccgcgcgctacgggcccgtgctctacctccgcctcggctcacgtaacgccgtgatcgtgtcctctgtcgactgcgccagggagtgcttcacggagcacgacgtgaccttcgcgaaccgcccgaccttccccacgctgcatctcatgacctacgggggcaccacggtcggcacctgcgcctacggcccgtactggcgccacatccgccgcgtcatcacggtgcacctcctgtccgctctccgggtgaggtccatggtccccgccatcgaagcagaggtgcgcgccatggcgcggagcatgtaccgtgcggccgcggccgctccatgcggcaccggcgccgcgaaggtggagctgagggggaggctgttcgaggtcgcgctcagcgccctcatggaaaccgtcgcgcagagcaagacatcccgctcttccatgggcggtgccgcggacacgggcatgtcaccggaggcccaagagttcaaggagtccatggacgttatggttccgctcctcggcacggccaacatgtgggacttcctgcccgtgctacagaggttcgacgtgttcggcgtgaagaacaagatggcggccgctgtgagcggcagggacgcgttcttccggcggctcattgacgaggagcggcggaggctggacgacggcgtcgagagcgagaacaaaagtatgatggctgtgctgctcactctgcagaagtcagaaccggagaattacagtgatgacatgatcatgtctctgtgcttctccatgttctctgcgggaacggaaaccactgcgaccacggcggaatgggcgatgtcgctgctcctgaacaaccccgaggtcctgaagaaggcgcagggggaaatcgacgcgcacgtggggaattcccgcctgctaggcgccgacgacatgccgcacctcccctacctccagtgcgtcctcaccgagacgctccggctgtacccggttttcccgatgctgatcgcgcacgagtccaccgcagactgcaaggtcggcggccaccacgtgccaagcggcacgatgctgctcaccaacgcatacgccatccacagagaccctgcggcgtggacggaaccggacgccttcaggcctgaacgattcgaggacggcagcgccgaagggaagctcctgataccgttcgggatggggcggcgcaagtgtcccggagagaccatggcgctgcggactctagggctggtgctggggactctgatccagtgcttcgactgggccactgttggaggggtccccaaagttgacatgaccgaagcgtccgggctcactctcccgagggctgttccgctggaggccatgtgcaaaccgcgccaagccatgcttgatgtccttcagaagctgtgagcgccctaataatctacatactctgcccactgaagaaagttgatgagcatcatcatcaaatgtttccatgctgttcccttgctatcgttatacgtagggctatgttaatcccactttcaataacaga

SEQ ID NO: 90678 - DNA, 2149 bp, Zea Mays
ccactcaagcaagcgagcaagcttaagccccacctcctagcaacatggagacggcctacgttgtcgttctgtcgttcttcttcatcgttgctatccaccgccttctcaaccgcggcgaaagcaagaatatgagcaagcagccgctgccaccgggccctcgcgccatcccggttctcggccacttacacctcctcgagaagccgtaccacctggcgtttatgcgcctcgccgcgcgctacgggcctgtgttctccctccagctgggctcgcgcgccgccgtggtcgtgtccaccgcggactgcgccagggagtgcctcgcagagcacgacgcgacgttcgcgaaccggccgacctaccccacgctgcacctgatgacctacggcggcgccacgatcggccacagcgcctacggcgcgcactggcgccacgtccgccgcgtcgtatcgttgcacctcctgtccccgcaacgcgtgctgtcctccatggtccccaccatcaccgcggaggtgcgcgccatggcgcggaggatgtaccgcgccgccgcgggcggtgccgcgaggatcgagctcaaggggaggctgctcgagctctccctcagcaccctgatggagaccatcgcgcagaccaagacgtaccgtcccgcggacgacgcggacacggacatgtcgccggagacccaggagttcaagcagctgttggacgctatcatctcgcttctcgggctgaccaacgtgttggaattcctgccggtgctacagacgttcgacgttttgggactgaagaagaagatcgcggcggcggcgggcagaagggacgcgttcttccagcggctcattgacgcggagcggcgcaggctggacgacggcgtggagggccagaagaagagcatgctggccgtcctgctcgctctgcagaagtcggaaccggagaattacacggacgagaagatcatggctctatgcttctccatgttcattgccggaacggactccacggcgacggcgatggaatgggccatgtcgctgctgctgaaccaccccgaggtcttgaagaaagcgcgggaggaaatcgacgcgcacgtgggcagctcccggctgctgggagcggacgacgtgccgagcctcggctacctccactgcgtcctcaacgagacgctccggctgtacccggtggggccgacgctgatcccgcacgagtccacggcggactgcacggtcggcggctaccgcgtgccgagcggcacgatgctgctcgtcaacgtgtacgccatccacagggacccggcgacgtggccggaccctgacgtcttccggcccgagcggttcgaggacggcggcggcagcgccgaagggaggctcctgataccgttcgggatggggcggcgcaagtgccccggagagaccatggcgctgcagatcatggggctggccctggggaccatgatccagtgcttcgactggggcgcggtcggaggcggaggcgctcccaaagttgacatgacccaaggcggcgggctcactctcccgcgggccgttccgctggaggccatgtgcaaaccgcgccaagtcatgcttgatgtcctccagaagctgtgacacaatctacgtacgtactctgagcgcactactgaagaaagttgatgagtatcatcatcaaaagttgttgccttgctatcgttattaattcgtagggctatatgtatttgtgctccttccgtcgcttctagaaacaccgtacctgaatatcacagctagtaataatcaaataagataccttttccagttatataagatgcatgcatgcatccatgtaagtgccgctttcctttaatttgtcaggatatgatgaccgaatatatcacatgcatataattttccaatgcaagcgtgacttggggcatcacgattcacgcgacacgcgcggcacggaagcaaggaccaaaattattatatcgtcatgatctggtggaaaactgtggccgttcacgctgcacgttgacacgcaactcgacttctcggcgacttgccggtggtcggcccagtggcgaagttagagcaataacgtcgaagaaaaaaaaacagggtgagaaagaagacggagtagtattacgtaatggatgtgtatataagataaaaattacttattattc

SEQ ID NO: 90679 - DNA, 405 bp, Zea Mays
aaacacaaaagcaccacaattatatattcacaaaagcatcacaattataatatcattcacaattagaccatttacagatagctagctagatcattcacaaaagctccagagatgatcagtcacaaaagcaccacagcgacatcactccagcttgaagcagttcaaaagcccacaactacatcattaatgttgcatatcactccagctattgttcaaaagcccacaactacatcactctagctgctctagagctgatcagtcacaaaagcaccaaagctacactaatgcttcaagcagttcaaaagccttcagacaaccactccagcttcttgtatcctcatgttttaaggtacaagctttctttgtccagaacaccctccactagacggtgttgcagccttataa

SEQ ID NO: 90680 - DNA, 1521 bp, Zea Mays
atgcccaggctctcactcaccgtcactgacgccgtcgctgccatgccctttgcgcttcggcttggtggttccccagcgctccgcctgggctcgcagtccccatcgtggctgcgctttggcggcagggacggggcgcgaaaggcgctgttctgctccaccgaggacaccaggcggtgtggctcggacgatgatgcggaggcggaggagggtcggaggagaggcgggagccgcgtgccatcagataggaggataagggcgggaatgcggccgccgcgcttgttcccctgtgcgtgctcatatcataatgcaggtgatctgcagccaggtgataacgtccagataacaggaccggtcggcaaagaaatgttgatgcccaaagaccccaacgctaccattataatgcttgccaccggtacaggtatcgctccgttccgatcgttcctgtggaagatgttctttgagaagcatgacgagtacaagttcaaaggtctgggctggctcttcctgggtgttccaacgagcagctcgttgctctacaaggaggagttcaggaagatgaaggagagagcaccggagaacttccgggtcgactacgccatcagccgggagcagacgaacgcggcgggggagaggatgtacatccagacccggatggcggagtacaaagaggaattgtgggagctcttgaagaaggacaacacctacgtctacatgtgtgggttgaaaggcatggagaacggtatcgatgacattatggtgtcactggctgaaaaagacgatcttgaatacttcctttgtcaaagctttcacttgtctgaaggaagacgtcggccttctgcttctccatcaccatcgttatcatgcagcctgctggaatgccacagcgggacaagagcatggggatgagcaggcgcaagatgacaacaagtggcgccggatcccgacgttcggcgactggaacctgcgggacgacatgcccgtcacccaatacttgcaagcagagacttcttcatcgttgtgccgccggcagagaaggacgacgacgaggatctgttcaaggtgcccaagtgttccctgccaagccctacaactacaagaaggtgaaacaaaataggacgctgcattagtttctcttgccaattaattacagtcagggggaaaaagttttctttcaccagatctgaagatagtatcagttaacactgtttcatatctccatttccatatacattatacccagtcggcactagcgagcgatgagaaagatactgaacaattctatgatccaagcatggaattataatcattgaaactctgctgctactgttacttggttcataggctgatatatacatccaagctcgcccgcaccgccacctccacagtttatcatggtgcttttgaccctgcttgacagaaccaacattgatgtatatataggtcattttgcctaatttgcatgaatatgtcaatgtttagttgtaaggctgtataaatggtcgattggggctgttgatttat

SEQ ID NO: 90681 - DNA, 1895 bp, Zea Mays
atggtgccagcgccacatacaaacaccaaagcagcgatcgatcgatcaatcaaagctcgtgggccagaacatctcctgctccacgaccacgaccatggataaggcctacgtggccgtgctctccttcgccttcctcttcgtgatccactacctcgtgggacgtgctggccgcaagggcaatggcaagggcaagggaacgcagcggttgcctcccagccctccggccgtcccgttcctcggccacctccacctcgtcaagacgccgttccacgaggcgctggccggcctcgccgcgcgccacgggccggtgttctccatgcgcatggggtcccgccgcgcgctggtcgtgtcctcgcccgagtgcgccaaggagtgcttcacggagcacgacgtggtgttcgccaaccggccgaggttcgccacgcaggacctcgtgtccttcgggggcgccgcgctcgccgcggccagctacgggccctactggcgcaacctccggcgcgtggccaccgtgcagctcctctccgcgcaccgcgtcgcctgcatgtccgccgtcgtcgccgccgaggtgcgcgccatggcgcgccgcatgggccgcgcggccgcggcggcgcccggcggcgccgcgcgcgtccagctcaagcggaggctgttcgaggtctccctcagcgtgctcatggagaccatcgcgcgcaccaagacgtcccgcgccgaggcggacgccgactcggacatgtcgcccgaggcgcacgaattcaagcagatcgtcgacgagatcgtgccgcacctcggcacggccaacctgtgggactacctgccggtgctgcggtggctcgacgtgttcggcgtgaggaacaagatcacggccgctgtgggcaggagggacgcgttcctgcggcggctcatcgacgcggagcggcggaggctggacgacggcggcggcgacagcgacagcgacaagaagagcatgatagccgtgctgctctcgttgcagaagtcagagccggaggtgtacacggataccatgatcatggcactttgcgggaacttatttggcgccggaacggagaccacgtcgaccacgacagaatgggccatgtcgctcctcctgaaccacccggaggcgctgaagaaggcacaggcagagatcgacgcagtcgtgggcacctcccgcctactcgccgcagaggacgtgccccgactcggctacctgcaccgcgtcatcagcgagaccctgcgcatgtacccggccgccccgctgctcctgccgcacgagtcgtcggcggactgcaaggtcggcggctacgacgtggcccgcggcacgctgctcatcgtgaacgcgtacgccatccacagggacccgctggtgtgggaggacccggacgagttcaggccggagcggttcgaggacggcaaggccgaggggcggctcctgatgccgttcgggatggggcggcgcaagtgccctggggagaccctcgcgctgcggaccatcagcctggtgctcggcacgctgatccagtgcttcgactgggaccgagtcgacggcctcgagatcgacatggccgcgggcggcgggctcactctgcccagggccgtcccgttggaggccacgtgcaagcctcgtgcagctgtgcgccatcttcttctggagctctgaatctgatgctgtagtaacatcttggcatgcatatgatccctagtatgctttgcctgatggtgtgtgctaaactaaataagcttgagtgcgtaataccctcgtgcgtgttatcttctgtaaaatgtgttgtacagtcgtttgcgtgaacaatcaatcagtagttggttcacagtatggtttatagcaaattgtggtcttctgcaggttgtcctgtatactgttttttttttttttgaca

SEQ ID NO: 90682 - DNA, 198 bp, Zea Mays
ttgttttttgctttttatttatttgtgcctccgaaccaacgttggcaattcatggacctgcacgggtgacagcaaatcgggtttgcgcctcgcacgttcgctcgatgtttatcgtcagaggaaatataagttgttgatattagtatacacactgaaagttcatcaaagtaaactgatagcgtaacaaatacattcggc

SEQ ID NO: 90683 - DNA, 1707 bp, Zea Mays
caaatcgaatcgcacctattcctctctttggcggtagccgcgtagcgcccgctcagtcgccgccgaccacggcggagaaattgcggcttcacctcgcctgtgtgtcctgattacgcgaggactcgagcggctaagcttagcagcgatctcggtctcagcgaggtcggtgggtgccggaagagaaatgggtggcttccacttccaccacacctggttcaaggcacgcaaggtgtttgtaagaatgcttagcaatggaggcggtgccagcatggcctgtgatatctcggtggacgcctcggacctctccaagcgcctctgcaagctcatcatctcctgccggaaggcatccgccctcgagcacgagctcgaccatagcggcgtccgcgttacgccggagatcgcggagagcgtcctcaagcacctcgacaacgctggtatgctcgcgtaccgcttcttcgagtgggcgcgcaagcagaagcgtggggtgtgtgctcataccgtgcgttcctaccacacggtggttacgtccctagccaagatcaggcagtaccaactcatgtgggacgtcgtggccatcatgcgcaaggagggtgtggccaatgttgagacgttcgggatcatcatgcgcaaatatgccagggcacagaagttggatgaggcagtttacacgttcaacgtcatggagaaatatggtgttgcccacaacctcgctgccttcaacagcttgctcagtgcactatgcaaatctaagaacgtgcgcaaggcgcaggagatctttgataagatgaataatcggttcagtcctgatgccaagacctatagtatcttgcttgagggttgggggagagcgcccagcctcccaaagatgcgagaggtttacagtgatatgcttgccgctggttgccagcctgacattgtcacatatggtatcatggtcgatgcactctgcaagacaggccgagttgaagaggctgtctgtgtcgtgcaggacatgagctctaggggatgccaaccgacaaccttcatatacagcatcttagtgcatacttatggagttgatatgaggattgaggatgctgttgcagcatttttggatatggagaaggatgggattatgcctgatgttgttgtgtacaatgcgctcatcactgccttctgcaaagtgaagaagtttgagaatgccttcagagtcatggatgacatgcaaggccatggaatctccccaaattcaaggacctggaacatcatcctaaatactctgattagccttggaaaggatgatgaggcatatagggtcttccgcagcatgattaagcgctgcaaaccagactctgatacttacaccatgatgataaagatgttctgtgagaatgataagatagagatggcactgaaggtatggaagtatatgcgattgaagcagttcttgccgagcatgcacacattctctgtgctgatcaatggtctctgtgacaagggtgaagttagccaagcttgtgtcctgcttgaagatatgatcgagaagggcattagacctcctggttcaacttttggcaagctgaggcagctacttttaaaagaagggaggaaggatgtgcttgactttcttgtcgagaaaatgaagatcctcgctcaagaacctttgtttgattgacccttcacttctccattggtatgaatgcttactcctgtcatctatatggatac

SEQ ID NO: 90684 - DNA, 435 bp, Zea Mays
atggcgacctgctgcgatcgcagaggcgtgttgtgcagaaacaccccagttcatctcagttggtatacccaagtgattcaggctcaggcattgtggcttaccattgacgacatagctaccaagagggttgccactggctctggttattttgataggctcaaaagcgaactgttcacagcaatccatgctccatactatggaactgatgtcgactccatggatgtccttcctgattgctttgaagctgaggagagatcttctgaatttactccaaatgtttctataaatgtgaataaggattcaatatctatgaatcctgttgatatgaacatgcaagagatgcggtatgaaaatgatattcctgcaaaagatgcaaaatgccttcaaggacatttagttgcggatatttgggaaattagttgttactgtgactag

SEQ ID NO: 90685 - DNA, 741 bp, Zea Mays
caagagggcatcttggggaagaagcatggtgccaccaagagcgttgtcgttcggatgtttcgcgttgttgaccagtgtgtagaggatctcaagctatcagacacagttaatgcttaatccttagagctgcatataaccaagtggtgcttacctggatttgaggacctatgatgcttgtttatctcaagagtaatgtaggccagcgagtgctcgggcagatagaagagagagagagagagagagaggagatgcagcggctcacggggcgggacatgtgggacgtggaggagtgccagagcccgcgcatgggcagcgtcatcctcggcgtcggcggcaccagcaacaccgtctgcgtctgcatccccgccgccatgcccttcaacgaccccctccccgtcctctcccgcaccgtcgccggctactccaaccacaactccgtcggagaggacagggcaagggagacgctggagagggtgatgtcgcaggcgctgctcaaggcgcgccggcgacggtcaaatgtctgcgccgtctgcttggccgtagcaggcgtcaaccatccagtcgatcagcagagaatgctggactggctcagggacatatttccaagccatgtcaagctgttcgtggagaacgacgcggtggcggcgctggccagtggaaccatgggcaagctgcacggatgtgtgctgatcgcagggacagggaccatagcgtatgggttcaccagtgatggtagggaag

SEQ ID NO: 90686 - DNA, 410 bp, Zea Mays
atgctcagtaggatggtcaaccacgtgcacttcatcatcgctgtccgaatcccacaacatcgcaagaattgtgtcagcgcctccacccaactcgtcgctgtcctgcgcttgctgctagccgatagaacagatcaccaactgaaatgcatcaagctgtacaaaaaatacagtagtattatacctgtcttgtggagagctttctcgcgcacagcgcttccttcacacgagatggtagttgcggcagcgtgggagtcagagggtggaagctagcagcaaatttgtgggcgtcggactcttggagttggagaacagccacacggaagaagctagcagcaaatctgaccagcgctgggctgctggcgggatggagacaatctgcaaagctgcagcctgcccgtgaccgtgaagaa

SEQ ID NO: 90687 - DNA, 1395 bp, Zea Mays
ctgggcccaccgtaactgactgggtgttctttacagacacgtgacgtcgcgcaccgggcccgtctatcgagtattcggtcccattcgtcagtgctcggacacctgactaataacaaaagaactcgctccattcagagattcagagaagacccgcctctcccgtgaggccgtgacgcgacgccggatcgtcctcgtctcctagctcgtggaatgaagggaggtggcgtcatcagggccgccggcggaggtgccggcggtgcgggtctgttgcgaacgcgactgcggcttcccgtggtgctcctctcctgctccctcttcttcctcgccggcttcttcggctcgctcctcttcacccaggatccggaggaggcggatatgccggtgccgagagagcggctgttggaggcggcgtggccggagatgccttacggcgagtccggcgaggctgcgccgtccttgatcccataccagattttgagctggcagcctcgtgctttgtactttccacaatttgcgacatcagaacagtgtgaaaatatagtaaaaacggcaaaggagagacttaagccatcaacattagccctgaggaaaggagaaaccgcagagagtacaaaaggaatcaggacaagttcgggaacattccttagtgctaatgaagacccaactgaaacccttgcggaaatcgagaagaagattgcaagggctaccatgttacccagaaatcatggggagccatttaatgtcctgcggtataatattggacaaaggtatgcttcacattatgacgcatttgacccagctcagtatggtccacaaaaaaatcaaagggtggcatctttcttgctttatctcacggatgtcgaagaagggggagaaactatgttcccatacgagaacagtgagaatatggatataggctatgactatgagaagtgcattggcctaaaggtaaaaccaaggaagggtgacggactcttgttttactcccttatggtaaatgggaccattgaccggacttcacttcatggtagctgccccgtcatcaaaggcgagaaatgggtcgccaccaaatggatcagagacaatatagtgtagaaatcgaaaggctcaggtgtcatgtgccctccaaaaaaatagatcatgcgcacatatactgaccatatacttcagtgtttgttcaattgccatggacagttggaccaacggaaggaaagtgtaaccaatctatttgcatcgtgtcaatatatagcctacaacttacatgtggccaagtggcaagtggacattccatgatctctttccttttccgagatccctttttcttttccgaattcgtgctgtattgtcatacccttccatcggcactaaatagtagaaacgttcgattgcactgcc

SEQ ID NO: 90688 - DNA, 1611 bp, Zea Mays
gcgaaggcgtttcagggtattcatcatggatcgatcgatcatggtggagggggagacatcagaggaggcaaagaggaggcggacggggccactagaggcgcaggagttggaggagcgcttggagtctctcagggacaaaattgtggccgcaaggattgtcactggcagccgattcggcgaggagcagcgacagtccttgttgcaggagtggttgcgcctcgcatctgccaagttggatctagatctctcaggcatgagcgagttggaccgatcggcagaggcgctgccttggttgataccgccggaggaggcagacaagaggacgacgcacacacggcaagaggcacaggagttggaggagcgcatgacctgtctgctgttgctatttgaggacgtagcagatgacaggattctcgctaaagaggagcttggagcagcagccgacgagttccagctccgcttgacgatgcgtcaacgggccttgacgcgcgagtactcgcgcctcgccaacctgaagaggcctccggatctctccggcatgaccgacaccgactaggcggcagaggcggagaggctgagggaggagaagctgcagaaggcgcgtcaactacaggaccagggggacatgagcggtgcccgcgagtgtgaaggtctggcatgcatcatcgacttcgatgtcaagcagggtggcagatacctcaacaatatctgctgtgtcgacgacatctacaccttcgaccacaaagaggagtcgcccatcggtcagatgagatttaccaacaaaccctttcaagacacgatgtgtgtgaattgtgcgtcgataaacatcctatctatcaagattgcatcctcggatctcgacctccccatccaagtctatggcaccattgtcgccagggactgcatcgactacaagtgcgtttacctcttccgctgagataatgaccattgccaactcatcagctctaatgaagaatcattgatcttgactggcccaaaacgaggacttgcattgtcgtaatgtgctgattatgttcagactggtctctgggtcaagaatcgtcaagggcattgcaaacaattcaataagggaatcgtgaggatcccaggcacaacaaatcaagtgtttgacaaatatgagcctgaaagagtttctcttgctaccaggctcaatactgtggatgtgacgtatgacgttgtggaatgtgcgggtggaggcaaccgttgcagcagaagttacacaggggggattctatggagcaatgactgcccacaccaccagaagcaagaggaggattgttctgtttgatatcaaagtaggaggtgatagttgtcatggcgttgaatttactcttagatggaacggtggacaagaatttgtactcactttaggtgacgctatgatttgtgtgaaggttacttggtcgatgatagatccacgaccttagatgggttcgcatgttcgttgttaagcatcatcggtggaagtgtagtatgctcttgctctggtgtgttgtctgaggttgttggagtctagataagtataacaatgttcacactatcatgcccatccttttatatagtgaaccttaatttgtctaatgttgctac

SEQ ID NO: 90689 - DNA, 1495 bp, Zea Mays
gtcagcccttctcggtttcgtgctgctgttcgtcagagtcttttatatatatatatatatttcacgatcgacacttcatcaccttccttgggtcgggtgggtgtacaccccatgatgtatatatatccaccagttctgcaccaccgtagatatacagatagctagaagcctagaacacgatcgaggcatcgagctagtagcagggggcaacgggcaaccggtttagatggctttgccgtcggcaggcaaggcgttgccgctggtcgtcgtcctcgcggtcgccgtggtcgcgtcccttgcgcagcccggcgcggccgacctgaggccgaactactacgcgagcagttgccccaacgtggaggccatcgtgcgcggcgtggtgcagcagcggctgcaggccaccatccgcaccgtcggctccaccgtccgcctcttcttccacgactgcttcgtcgagggctgcgacggctcggtgctgatcgaatcgacgccccgcaaccaggccgagaaggacgcccccgacaacaggtccctcgcgcccgaaggcttcgacaccgtgcggagcgccaaggccgccgtcgaggccgcctgcccggacaccgtctcctgcgccgacgtgctcgccctcgccactcgggacgccatcttcatgagcggcgggcctttcttccaggtggagctgggcaggctggacggcctgagctccacggccagcagcgtgccggggcagctgccggagcccaaccagagcatggaccagctgctggcggtcttcaacgcacacgggctcggcatgtccgacctcgtcgcgctctcagcggcgcacagcgtggggctggcgcactgcagcaagttcgcgagccggctgtacagcttccggccggggcagccgacggacccgacgctgaacccccgctacgcgagcttcctggcgagcaagtgccccaacggcggcggggccgacagcctggtgctcatggaccaggccacgccctcgcgcttcgacaaccagtactaccgcaacctccaggacggcggcggcctgctggcctccgaccagctgctctacgccgacggccgcacgcgccccgcggtggactcgctggccaacagcaccgccgccttccaccgtgccttcgccgacgccatcgtcaggctcggccgcgtcggggccaagtccagcgcgcggggcaacatccgcaagcggtgcgacgtgttcaactgacggaggggaaaaaaattgcgtctgcatgcgtacgtgtgcgcgcgcacgaatttgcgtgtacatgttgacatgcatgttctgggagagggagaggggagtattttttgttttgttttgtttgtaataatacgtcgtctgtcctgtttgattcgttgaatgcgtggattgttgaagctgtgtgtaataataataaattaatgcgcataagatgtttccgaaattatttgtacaaaagtgacgaataaaacatgtacaagaataaggtactcg

SEQ ID NO: 90690 - DNA, 1532 bp, Zea Mays
aggagacttggcttgtactgcatcgcaaaccgcaatcgcacgcggcacttgccccccgcgatcataacctcaccgcccgccaccagctgcagccacaagcgcagcgctcgacagcctcaccagccgccatcactcgcggcagtacccggccgctgggactgcaagagtggggagtgagacgctgctgctgttgccgagcgcgaggagacactactactcactcaagagtcaagactcaacagcagcaggggcgaccgagctctgcgtgcgtggggagaaccggagaaggcagcagaggagggagggagggagcgcgtggaccaggctaggcgcagcagcatgggcgccgggatcagggtcctggcggcgctcttggcggcgctcgcggcagccaccgccggcgtgacggcgcagctgcggcaggactactacgcggcggtgtgcccggacctggagagcatcgtgcgcgccgcggtgtccaagaaggtgcaggcgcagcccgtcgccgtgggcgccaccatccgcctcttcttccacgactgcttcgtcgagggctgcgacgcgtcggtgatcctggtgtccacggggaacaacacggcggagaaggaccacccgagcaacctctccctggccggcgacggcttcgacaccgtcatccaggccaaggcggccgtggacgccgtgccggcgtgcgccaaccaggtgtcgtgcgccgacatcctggcgctggccacccgggacgtcattgagctggctggcgggccgtcgtacgcggtggagctggggaggctggacgggctggtgtccatgtccaccaacgtcgacggcaagctgccgccgccgtccttcaacctggaccagctgacgagcattttcgccctcaacaacctgtcgcaggccgacatgattgctttatctgcggcgcacacggtggggttcgcgcactgcagcacgttctcggaccggatccagccgcagtcggtggacccgacgatgaacgcgacgtacgcggaggacctgcaggcggcgtgcccggcgggggtggacggccgggggctcttcgcctccgaccaggtgctcttctccgacgcgcggtcgcagcccaccgtggtggcgtgggcgcagaacgccaccgccttcgagcaggccttcgtcgacgccatcaccaggctcggccgcgtcggcgtcaagaccgacccgtcgctgggggacgtccgccgcgactgcgccttcctcaactgaaaaaggatgataagcgctagctagtaggtgtaagcatcggctggcactcacctggaggaagaggccggcttttggtcagtggtgacatctgatggatgtccaatcacgcaggatgccaaaaggcccacgcctacgcatatgaacggtgaaatatagcgaactctaaatagcaaacactgctggagggctcttggacgctaagaaacgctacatcttctcgcaccttactttgttgttcttactttatagtttgatttgtggaatggaataagttaattcatcaatatttc

SEQ ID NO: 90691 - DNA, 742 bp, Zea Mays
aattcaggctatcatccagtcatccatcagcaggaggcggggagagtgacttggccgtggcccgggggagggggagagtgagagctgccaaggatcgcatcgaaggaagctaggagatcatccagccgccggcaagaaattaggcagcagcagtacgtcgaggaagatgtgcatggaccgagctgccgtgccggtgaagagggtctggctcggcatcgccgcgcgcctcggcctccgccgaaagaccggcctggggaagctgcggaaggaggtgcggacgtgcgagtaccgcgacgtgcacgtcatgtgggagatgctgcgggcgacggacgggctggtgccgctggcggagaaggaggccgccgcggccgcggccgtcgcggccgccgtcggcgccaggaagcgcaagaacgcgtggaggcgcttcgtctactactgctgcgcgttctgagatcgatcagtctgctggtgatcctagctcgctatagctcctgaaagatccaaggtcgcgaggttcatgaactcgcgcgtgaccaaaaaatcttcagcgcgtgaccggggttgtcgtcgctcgtcaggagacacgagagtacgagactgtcctgtccccgggataagattgactgattgagagacgatcgttcgttccagcgagagagcatgtgtacataggaagagatatttgaagcgcatatacaaaagctttgatcgaaatttgatcgaagtgtacccaaaaaaaaaa

SEQ ID NO: 90692 - DNA, 657 bp, Zea Mays
tatatatttatccaacagggttaaacttttatcttaattgcaagtgatcattgccataatctgaatacaatgtacaggagcaatgagccattgaaggcatcatttatgatcactgagaaaaatgattccatttaaatctaataaggggaaaatgctctattacaacgtcacaacaaatctctaaaagtactatcagaacatgttttttgagccaagagctgagggtatgtttgtcgacgagtttcttagcttggcctgaacatcagccaaccctatcgattcttcgatttattgacaacaggctagattcccaaggaagaaattatgctacactgtccattgcatctccctttgttcacctggtgggccttggtatctcctgcttgtgagcaacgcaatactcagattttgtagtcatggtgttggtctgccgtttcatttacttcaatgccagcaaacagcatctcctttagagaagttcatgttcatcagctataacaggccactatgtatcattctcctccaaatgacattgcctgtaccttctcgatttgtgtgggccaatttggaccaagcaaatgtggatcagattgcacagcaactgcaaaatcttgcatcgttgtacgctgaccctgatttagttgttgcaatgaattc

SEQ ID NO: 90693 - DNA, 2251 bp, Zea Mays
cctcaaaccccagagccccaaaaccaccgggagactccgcgagatctgaactccatggtggccgccggggcagcagcggccgcgccccggctgaacccgtcgccgtccccgcaccgccgccgagcttcctccgcgctctccccggcaaagtccaacgccaacgccaacaccaacgccggcgacgcgcggcccaagcccaaggctaaggtcgtctcctcccgctacctcgcgcccttctccaggtccacctccagctcgacctccacctccacctccaccaccaccaccacttcgagctccaactccacctcgacatcgtcgtccacgccctcccgccgcttcgcgtcgccgctgccgaggcgctcggtctccgtcgaccgcccgcgcccagccccggctggcaatgctgccgtcggggagactgggggacccaaagcgggcaccaccaccaccacgaggagcctctccgtggcgttccagggccggtccttctccttcgagacgagcaaggcgaagccggccacgtccccgtctccgtcgcggcgaccagtggcttcggcggcgggggccatcacgccggagaggactcgtccaactatggggacagtgccggagagggggaagggttttgagggggtccatgctcaccacaggtggccaatgtcggcgaggctgtcgcaggggtttgaggggaacccgcttaccaaaagcttggattgctctttgcacaagagggacgctgctgtacttgctgctgtccggtcgctgcggcagtccatggtgtttgaggagggggcacggcgatcctcgttcgacagtggggactacttgatgtcgtcggacacagagagtgtgtcatctgggagcaattcagggtctcaggatgcaggtatcggcatttcgcacagagcacgaccatccccaaagggtatgagtgtgccagcacggttcttgcaggatgctgcagtcagcaggtcacaaagattcacagatcctggcacaccatacttggcgtatacctctgggttggctgcatctccaaggacagcgccggttaagaagtcactgcaaaatggctttgtttcgtccccactgaaccggtcagtcaggcaatcttcaccaagtaagcttaccggcaatccatcgaggagggtgtcaagcccatcacggtcgagaaattgtgtggggtcgggcacttcatcttgggatcaccagggaagaaactcatctggatctggttatgctttgaatggtgaagtgaggaggaggtggcatgggggtagtaaggttgactgtgagcatctgttgagaattttatccaatcgacatttgcagtggcggtgtgtgaacgcacaggctgaagctgcactttctgcacaaaaaatgacagcagagaagtacttatctgatgcgtggattactaccctagggatgcgtaaatctgttgctcttaagaggttccagctacagttataccggaacaattggaagctcatgacagttctaaagggacagatggggtatctagaagaatggtctttgttagagagggactatgtggattctctatctgtaactgtggatgctctaactgccagcattttgtgccttcctgtcactgatggagcaaaggctgatatccaagatgtgaaaaatgctgttggttctgctgttgatatcatgcaaacaataggaagctcaatatgttcattattagctaagctggctggaacaagtattttggtttctgatctttccaaagttgctacccaagagcgcactctaatggagcagtccagagaattgctgtccacactcgcaacaatgcatgtcaaatactgtagcctacaagggcagagagtacaggcaactgacaggagctccatgcatccctagccagactactataaccccccactaaccgaagaatgtaggtgcaactgcaaattctggtggcttggctggtgcccacagagcaatcctgactcatccgaagatgctatctaggctaggctagttccagtggtcttggtggctatggcccccctagttctggttgctgatttgatgtatgctaaccaatgcagaacagatggcatgcgccatgtgtatagatgtacctcatttgttggttttagtcgaggattaggtcagatgctaactagaaagattgggttccttttgttcatcagcagatgactaacgactaccagggaaatgcaatataacttctagcggtacgttggattcc

SEQ ID NO: 90694 - DNA, 782 bp, Zea Mays
gtgcattgcttttgctctcgcagacgtgctcgcacgcggcggcgagcccgatagattgactgaattgagccctacgaccctcaatctcccccgcacgcccgcgccgcggtttctatggcctggggcgccctgcgcagccgtgtccttccgctcccggcacccgccgccaccgccgcgccccacggtctcttcctacgcttccttctctccaccgcggtcccgcaccacgggcaccaccaccggcgccgccgcctcgcccccacggcctacgccgccgccgcggcagctgcggctgaggcgccgctccccatgacgccgcgcttcgggcgggccacgcggcaacccggtggcgccgcctcggtggcgcgcgtctacgccgacgctaacgcccagcgccccaaggagtactgggactacgagtcgctcgacatccagtgggggaagcaggatgggtacgaggtgctgcggaaggtggggagggggaagtacagcgaggtgttcgaagggttccgggccgggagcgatgagagatgcgtcattaagatcctgaagcccgtgaagaagaagaagataaagagggaaataaagatacttcagaacttatatggagggcctaacattgtaaaactacttgatattgtcagagatgatgaatcaaagacacctagtctgatctttgaacatgtcaacaacactgacttcaaagtactctaccctgcgttatctgattatgatatcagatactatatttttgaattattgaaggcaagaatctgaacctc

SEQ ID NO: 90695 - DNA, 292 bp, Zea Mays
tttttttttccttctatttttttgcttagatttgtgtgacatcgtaacgattcatgtggatgtcttttatgatgattcagataaagagggaaataaagatacttcagaacttatatggagggcctaacattgtaaaactacttgatattgtcagagatgatgaatcaaagacacctagtctgatctttgaacatgtcaacaacactgacttcaaagtactctaccctgcgttatctgattatgatatcagatactatatttttgaattattgaaggcaagaatctgaacctc

SEQ ID NO: 90696 - DNA, 113 bp, Zea Mays
gttattttagctaatatagtttataaatataaggcatatcgtaacagaggtaaacctcttaatgccatgcaacttacttggtgtaacttgttagcccctttgatcttattgtg

SEQ ID NO: 90697 - DNA, 856 bp, Zea Mays
gttatttacagatgctacaagggtcctgaactacttgtggatttgttagattatgattactcattggatttgtggagtcttggttgcatgttcgcagcaatgatattccgagtggaccctttctttagtggccaggataattatgatcaattagtgaaaatagctgaggttcttggcacaggagacctgtataactaccttgaaaaatatggcctccagcttgacccacagcttgaaagacttattggaagacataataggaaaccatggcccaagtttgtgaatgctaggaacagacaccttgcaacacctgaggctattgatttggtagataaactcctccggtatgatcaccagaaaaggcctacagccaaggaaaccatggctcacccgtatttcaatccagtaagaagccccgaaagcaagacgaattcacaatagctaattagctataaggtgcacaaaggtgcacattttttttcacccccaagttgcctgcaaggcaaatgtggcatatttgacggtctttcccttttgaagtagagtgaaagatgtagagaaatacttgatactaaggttatgcttacccatcctcttacccatcctcttacccatatttaaattccattctgcgaacaataagtctacgttgcaaaatagtattttggatgaccatgagtgaactgctggcagttgcattctgaatgatgtcttggtcagcattacatttttttttggtgccagttattctcttcctgccgttctggtgcgaaaaaaatattttaccaatgggcttgaacacagcgtgactgatttatggccattaaattcctcaagtcacatttcaatgttaaca

SEQ ID NO: 90698 - DNA, 683 bp, Zea Mays
aacatccatccccgccccgcgacccgcatagaccggacgcccttccactttccccttcccttcccttgcattcgcgcgttttccacctcccatcacgacctcttcctgacgtttccccaattcctccgcgctaagcagagcaacagcgatggcgacgaagtacgctgccgccgcggctgatctggtcacgggccgtccgcggaagcgggcgaggcttggctgggacgtggcgtcggctgccgaggtaaatacccctcaccgactcctctcctctccgatatgttgtaattcaggatactgttcgcctctccatgcggcgattccgcatagaactatcatctatcccgttagatatcagtaccttgttatggtattcgtggatacattgatcttttagatctaggtcgtttatgtgttgtatttagagcccagatccacagaaattctattctatactggtcttgcaaaattagtatgacaatgttctcgatggtgctgtctacctttttagcctgattaatctgaccaggtttatataattatatttgacttagagcatgcatgcatgctttgtttttttcccgagagcacgattagagctgcagatagtttggtttaacatactgggaagtttggtctcaatacgtattagatttttttgtatgtgggccagcactcctttt

SEQ ID NO: 90699 - DNA, 281 bp, Zea Mays
gcgagccgccagctccacgcgtccgccgcagtgatgccgcgcgcgcgcccaccaccaagctcgccgcctaccaaacccgccagctccgcgcgagatccgccacagttatgccgcgcgagggagacgacgggatagccgccaggcagatccgcttgctcgccgcagtgctgccgcgcgatgaaggccgcgcgggggagacgctgggaaagccgcacctccacgcccccatcaatcccgcccaccaccaagctcgccgcctaccaaacccgccagctccgcgc

SEQ ID NO: 90700 - DNA, 348 bp, Zea Mays
atgacagcggggtccgagcttagtaggacagcagggaccgagcatcatgcgaccaagtcaagggagggtttcttgtttttgtcactaatggtgctgaaggaggtttcgcgtgaggaggagcgccttcgggctcttaacgctgagtgctccagtttgtctccggccatcaacctcatatgttgtcatctcagggtttcaaagtcgggggagatgtccgcacgatctcctcggatggcgctaatctctggctgcgttcgtgaactggatgccatcgcgctacagctcggggtcctgattgctccggtcgctactcggactctcggcgaggacttgttcaagaaggattga

SEQ ID NO: 90701 - DNA, 1224 bp, Zea Mays
atcaacggagcttagcctgggcagcagtgagcagccgccttcccctgtgctgcggatcgctacactacaccaccactcaccactcagttactcaccacacatccatccaactatccaagcccacagtgaggcagtgagcagcatcccctctcctgtagggggagtctgtagtagcaacctgttgtcgatcctactcatcagtcatcttccctgcgcaaagcctgcagctttaccaccgccgccgccgccgccgcctcctctccttcgaaagcgcgcctcctgctagctggctgtcctgagctcgggcctgtcccgcgcacgcaatcgcgccctgcctagcaagctagacaggcgccgccagttattgcaccgggtgcgatatcgcgctagccgcggagtgcggagtagtgggcggcggataggctgcgccgctactccttcgtgcgtgtgtggggaggattagtaactgtagaggaaggcaggcacgcaaaaggacgccctcgcctccgcctcccgcccgcgcactcacgtgattcatacttgcggccttctcgctcgctcccttcttcatcaccacccctctcgcgccgcagcgggcgggcaactactatatcaagcaccaaattaaacccacccagctcctctctcgccccttcgttcctgggagaccgtaccggccggccgcgggagatggtcgaggcgccggccgtcgtggtggtggtgcgggcgtacgacgccgcgcgcgaccgcgtcggcgtggaggaggtggagcgcgcgtgcgaggtcgggtgcagcggcggcggcaagatgtgcctcttcacggacctcctcggcgacccgctctgccgcattcgccactcgccggactccctcatgctggtacgtgtacacgtgcgtacgtgctgtgctcgcgcgctctctgtctgctctatacacccacgttgtggtcgtggctgcctgcggctaagcacaggcccagcggccggccggccagatgcagcaggtgtgagatgagccgctggggctggggctgggctcgcccgacctagcctaccacctgtcctgcgcccgtccccccatgcctcccgccctcgtctccttccgcctcgtcgtgtttcgttttcgtttcgtttcgtttcgtttcttctcgttccggttccggcgccccgtacgtagtacgacgtgggtcccggccggacggaggaaacaggaaggaactcaact

SEQ ID NO: 90702 - DNA, 2296 bp, Zea Mays
atcaacggagcttagcctgggcagcagtgagcagccgccttcccctgtgctgcggatcgctacactacaccaccactcaccactcagttactcaccacacatccatccaactatccaagcccacagtgaggcagtgagcagcatcccctctcctgtagggggagtctgtagtagcaacctgttgtcgatcctactcatcagtcatcttccctgcgcaaagcctgcagctttaccaccgccgccgccgccgccgcctcctctccttcgaaagcgcgcctcctgctagctggctgtcctgagctcgggcctgtcccgcgcacgcaatcgcgccctgcctagcaagctagacaggcgccgccagttattgcaccgggtgcgatatcgcgctagccgcggagtgcggagtagtgggcggcggataggctgcgccgctactccttcgtgcgtgtgtggggaggattagtaactgtagaggaaggcaggcacgcaaaaggacgccctcgcctccgcctcccgcccgcgcactcacgtgattcatacttgcggccttctcgctcgctcccttcttcatcaccacccctctcgcgccgcagcgggcgggcaactactatatcaagcaccaaattaaacccacccagctcctctctcgccccttcgttcctgggagaccgtaccggccggccgcgggagatggtcgaggcgccggccgtcgtggtggtggtgcgggcgtacgacgccgcgcgcgaccgcgtcggcgtggaggaggtggagcgcgcgtgcgaggtcgggtgcagcggcggcggcaagatgtgcctcttcacggacctcctcggcgacccgctctgccgcattcgccactcgccggactccctcatgctggtcgcagagacagcaaccggccccaacagcacggagatcgccggagtcgtccgcggctgcgtcaagaccgtcgtctctgctggcaccaccaccacccagcaggctaataaggacgaccccatctacaccaaggttggctacatcctcggcctccgcgtctcgcccagccaccggaggaaaggggtggggaagaagctggtggatcgtatggaggagtggttccggcaaaggggggccgagtactcgtacatggcgacggagcaggacaacgaggcgtcggtgcggctgttcacgggccgctgcggctacgccaagttccgcacgccgtccgtgctggtgcacccggtgttccggcacgccctgaggccgtcccggagcgcggccatcgtggccctggagccgcgggaggcggagctgctgtaccgctggcacttcgccggcgtggagttcttccccgccgacatcggcgccgtgctatccaacgcgctgtcgctgggcacgttcctggcgctgccgtcgtcgccggcgcggtgggagggcgcggaggcgttcgtggcggcgccgccggcgtcgtgggccgtgctgagcgtgtggaactgcatggacgccttccggctggaggtgcgcggggcgccgcgcctgatgcgcgccgcggcgggcgccacgcggctggtggaccgcgcggcgccgtggctcgggatcccctccatccccaacctgttcgcgccgttcgggctctacttcctctacggcctgggcggcgccgggcccgacgcgcccaggctcgcccgcgcgctgtgccgcagcgcgcacaacatggcgcgcgacggcgggtgcggcgtggtggccaccgaggtcggcgcctgcgagcccgtccgcgccggggtgccgcactgggcgcggctaggcgccgaggacctctggtgcatcaagcggctcgcggacggctacggctccggcccgctcggcgactggaccaaggcgccggccagacgctccatattcatcgacccgagggagttttaggctgataagtagtaaatacacttaggcctagctttagggtttttttttggttctccccgggtcgtcgtccgttggatcccgtatccgacggctcctagtagctagctctagagaaggtcccacccttttgtgtttcgtttcaaaacatgtggtaacgcgcgcttgcttaggcgtaatttctgctagcgaaccgaattagttaaccttttcgatcttttgattgatgcatgtgaaacacacagctgctacaccctttttagttgttgtaactcgttggtggaccagggtggagaccagggccagtaccttctcctttttgggtccatcagagattaagctgagaccgcgttgagacaacgatctggacaggagctgagaacatgatttccca

SEQ ID NO: 90703 - DNA, 3309 bp, Zea Mays
ccccatcctctctttctccctcgcgcttgactcccctgccaccccttcccgtctccaccccgacgccgaccgcactccgctccccgtccaccatcccagcgtgatggctgggaggaccgcgcctgccccctcccctccttctctctcacgccctactccctcgccgccccttcatcccagatctcgtcatgggcgctaccatgaccaacagttcggtggagcaggcgccgcacgctacgccatgggacggagcccgtccccacccgacaccgaccatctccaccccgagcccgtccgagaagtgagtgatttccatttcttcgattggatggcgtgcggtcgggcctccgcacctccctgtccccctcccctcctgcggcgatagcttcctcgaggagatgagcgtgccgcccccatgatcggtctacctccgccgcccccgcgcgcaccgcaaccaccacgcccctcgtgcaccttctcgcccgagactgcattggagaatggctacacaaagatcatgctgccaacatgtgcttctggaatagcatgccctatgctatctgcaactataaaggctaagctttaccagccgatgtcctgtatgtcgatgcacgatgggaggtacttgtggttcttcaacttcatggttgtctggcctagccgccatccgcccgcgcaaacgcggtacagctccactacagcagcaggaggcggtgacgtcgccaaaggctggcagatacttgatggctcttgataagaagcctattgcaactaaaggccaccacctttgttgtcctcaccctagccgaggacctcatctcccagattcagtggcgacaaaatggtccattagtggaaacaccaagcatcatggagagctgtttcgtcaggagcttcgaacgcgagccatagacggggagttgatgccactgggcttatgggctcttcttttgggcaccaaagcaaagagcagtggataatatttggaatggtcataagtcaaactagacttccctagcgacagcgattcaacgaataagaaccaggccaacatgtagtgagaccgagagcatgaggcttcagtacctgtctactaacatcagatgcattagttgatgtcttgattagttgtagcagggaaccagcttccagtgcctcttgtaccgatcatcagcaagggagtgctagaggaggaggttatggtgagttttgtcgcgactaatggtgagcccacgactacggccacatcaaagctggtctggtggaacctcgtggagcagatgacgatgacgccgacatcctgcacctctgctgcgacgctgccgaccaggacgcgggcccctccgtcgcgcgcgctctacaagtctggatccatcatcgtgctcggcaagactgacttccttaggccagacatggatcccataaccagatggacagccacaaagaaaagtggcctgattagctacaagaagctcttgttccatggactcgatctctggaccgcactatcgttgcctcaacccctaggtcgtgctgccctctggcctcctcatcgtacaattcaccaacatctccaacgtaagtgcagcaggttcagtaatgaactcaaaagtggcatcagaatactctaagagttttttgttctttttgcctggatatataccgagggcaatgcattcaaaactcctatagatgacgaatcccatctctccctcttttcccggacatcgatcccagtctcttcttcaagcaagagatggagctttccttggtcgggctccaaaatgctaggaaaacatcacttgcagcagctcgcagcgacacccccgcctcctcatcatggaagctacaagaacactttgagtaggtgaagaggatttgcgacactaccacattgtctttggccatgcatcatctcagtgataagataacaagccaactagatatttcaaaattgactgacaagctacagtaagggaaggtagactcaactgcattgacaccaaaggagaagtatgaaacttggaaggagattaaaattatgagtttcagaaaaatagtttctccaatgtgggcaatgacattgcttagcttgtatgttagagttcatgtcaccatattaggcagaatctgacgcctttaatgtaaatggacacaagaccttcgttgcaatggatgattatcttgtcactgacaaaatcactgcattcatagtgcaaacgcaacatgcagcaactgaagtccttaaagaaaagcaaccaaaagactgtatgaaatggaccaagtattgcagacaatattacaaatattggacacgttcatggctctttctgaagatactcatggagaaattatcttgtacctgagaatcccccttatttttgcacaattgatggttgtgtcctgtagtggctttgataattcatcactcctaaacgattttagaaagctataccaactaatgtgtggaggacctgggcaaggggtggtagtcgcgctggttcgctatccacggcggcaagccgcctactcgaagatcccacctccgaggacgccgctacggggaggacatgggcactaatcttgaactaaaactaggggggtgtctatgtaagttaatactttctctcacatttgcatcaaaatttgttttccgataatcaacagatcttgacatgtttctatgtactttctctcacattgagagttttttagattcagtgcaagccatctttatttgcttaatgagtcatcgatcttgacacatttttcatattcatcatagtttttactcattctttacatgtttttgtccttttcagattcagtacatgtaagctttctttgcttggacaatctatttctctttacttggatattttcttttagattaagataggccacctttatttgcttaacgtgtggttgatcttgacatgtttttcagattaatcatatttttattcattcttgacatgcttttgtctgtttttatattagtttttattcattcttgatatgctttcgtctgttttctcagattagtttttattcattcttgacatgcttttgacttttttgaaatttagatcagtacatgtaagctttctttgctcgtacacctgaccccacatgtgttagcagtctctaggtcatgttcatattattcatccatctctgttatatagatagtcgacacatccatttatatctttttatagggctaatcattgagatatctcttcctcttggtcctcgtgaattttttgttcgttctatgatgagaaatcacaaattcatatctttttt

SEQ ID NO: 90704 - DNA, 813 bp, Zea Mays
gccaggcgaaaacccggcaccggtgcgccagcccagccacaggctcccaaaccgaccgggcggcgatggtgttggtgtcggactcggagctggtggagcggctgcaggaggtgctgcggtcgtcggacctcaacaccacgaccaccgctgccctgcgccgccgcctcgaggaggacttcggcgccgacctctcccacaaaaaggccttcattcgggagcaggtcgacctcttcctcgccgaggtcgccgccaaggccgagccgcaggagcccaaggaggaggagcccgaggaggcgccggtgcctaaggaggaggagccagaggagctcgagggggtggaggaggagggcgagggggaggacgaagaagaagaagaggaggaggaggaggaggaggaatgcgaggatgagaatagcagcggcgcccggaagaagcagcggggtaatgatggcaaaaagaggggtggtggctttacaaaattatgcagtctttcaccggcacttcaagagtttgtcggcgcctctgagttagccaggacagaggttgtcaagaagctttgggcatatattcgagaaaataatcttcaagaccaaaacaataggaggaagattttgccggatgagagattgaagaagatcttcaatgtcaattccattgatatgtttcaaatgaataaagctttgaccaagcatatctggccattgaattctgagggtcctgtctctcctgatagatcaacacccaaagagaagccacaaaagagagacaggagtgaaggaaagaagcaaaagggtggctcttcaggagctggat

SEQ ID NO: 90705 - DNA, 887 bp, Zea Mays
gtgccccttcaactttcggatgatttagtaaaatttatcggcactggtgagagcatgttatcacgatctgatgtcgtgaagaaaatgtgggattacataaaagggaacaacctgcaggatccttctgaccggaggaaaataatctgcgatgagaagctgaaggacctatttggagtggaaacattcaccggctttactgtttcgaagctgcttgcccctcattttaccaagacgaagtagcaacctgccatccacatcttctaaaaccaaaaaggcttggtaattttgtttttgcagaatgtgtaatcatggaacagttaggagctatgtgggtggtgtgaatttttttttgtttacctatgggagtcgatggcactttttcgaacattaccagtaaagtaggctccttcctcaatgtctaatggaagttatcaactggtcactaaccatttcgcgctctccaaaaatgtagggacataaaattatctgtgcggtgtggcttctagtgcgttcttcccgagttcatggtccaccatttttcatgctcagggttgaggatgacattgctcggtctcctcagatgaccctagtggtcatggaaccgtaaagacaaggggggagcactagcgcttgtcgcctagggtttcagggttctccacttgccagtgaatctttcatcctttttagctcctgatatggatgaagtttgtagcactagcgcaaccgccttttgctgttccttcccactcacttggtaccggttgttcagaggacgccagtttatatttgtatggaccacctaaactgaagctgttttgtcatgtgggtggcatggcgaagtgggtcgatatcgcgacggttctgtaacgcgatcttgcgctgtttcc

SEQ ID NO: 90706 - DNA, 1518 bp, Zea Mays
agatcccctcacagtcatcctccacccaccccacccaccgcctccgcctctctctctttcgtttgttcgtctcggcttccggtcgccgattcttctctgcgcaaaagattcctggtggtggtgcccgtaccttgctccacgcctcgctcgcgtcgcgtgcatggggctggacgtcggcggcatcgggatgggcctggatctgggtctggacctcgggctgttcgccgcgcggagcgccggagggatggcggccgcggccaagggtgcgccggcggagatcgagtcctgcatcaggagcctcgaggaggagcgccggaagatcgaggtgttcaggcgcgagctcccgctctgcgtgcgtctcctcgccgatgtgatcgacgaattgaaggatgaggccgccaagagaggcggagacgcggaggccaaggccgacgacggcgataagcggaaatggatgagcaccgctcagctgtggctcgacagcgacgccaaatccgacgagtctgacaaagagcaactgagtgaaatcacttcgccggagcccaagttgctcggtggcgcacccatgcccataagggccgttgcggcggtgccacccctgccgcctccattcttcaggagagaagacagctctgccggcagtggtctgtcgctggtaccacccgcagctaagccgccgattcctcccatgtctgccagcgacaacgcgagcggcagattctgtgccactatgccaccgtctggctctggggccaacttgcactctcaggctcagcagcaagccaggaaggcgaggcggtgctggtcgccggagcttcaccggctgtttgttgccgccttgcatcaactcggcggccctcaagttgctactccgaagcagatcagggaggtgatgaaggtggacgggcttacaaacgatgaagtgaaaagccatctccagaagtaccggctgcacaacagaagatcccccggcgtcgtggctccggtgagccagtcggtcatgctggcgggcggcctctgggctcctcctcatcaggagcaaagcagctcgcagtccgggtctccccagggcccgcttcagttctctggatccggtgtagcggccaccgtcggcggcgatagcagcagcagcgacgaggacgacaagtccgaaggctacagccggaaatacgtgtaaaggccgcgttcgacggatgagagtgtagagatagcgtcgcggcttctgcttgcccgtctgtggcaataacagattcatcagtcttgagagaggttgtagtgcgtgcgcccaagagctcaactgatcatgggttggattgtttgtttgtcatgtacgtacatggaaagctgatggcttcctgacttttaatttctgggcaggtcccaaaattttcgccctgagaatgagatattatatagataacatacatacataccatattcgttgcccgcctgttgtcttgaatcgcgaatggttgcagcgttgttgaattgaatgaaataaatacatgcccttgtcag

SEQ ID NO: 90707 - DNA, 762 bp, Zea Mays
acccggtaaaacaactgcggcaaaactcaccaagcccccaaactgttaacaggtgataaagcttttctctctcttggccggccagtgacatcagacatcaccaactcgtcgacggtagagagagcaagctcttcggcgatttgagaagaatcgaggagcgagcgagcgagcgagcgagagaggaggaggaggagctggggcttgagcctgcgcccgggggccccgggtcacggaatcctaccattaccaaccctagccttcgttgatcgccgtctcaggtcatggcagggccggcgccggatcgggccgccctgactgtggggccgggcatggacatgccaatcatgcacgacagcgaccggtacgagctcgtgcgcgacatcggctccggcaacttcggcgttgcccgcctcatgcgcgaccgccgcaccagcgaactcgtcgccgtcaagtacatcgagcgcggcgagaagatagatgagaatgtccagcgtgagataattaaccatagatcattgaagcaccctaacattattaggtttaaagaggtgagttgggattgtgatgctgtttctccccagaattccattgttaaacatttttttattcttctttgtatgtctaggttattttaacaccgacccatcttgctattgtcatggaatatgcctctggcggtgagctttttgagaggatatgtaagaacgtgcgattcagtgaagatgaggtttgtgcttgccactttgttcatctttcttcttg

SEQ ID NO: 90708 - DNA, 1783 bp, Zea Mays
acccggtaaaacaactgcggcaaaactcaccaagcccccaaactgttaacaggtgataaagcttttctctctcttggccggccagtgacatcagacatcaccaactcgtcgacggtagagagagcaagctcttcggcgatttgagaagaatcgaggagcgagcgagcgagcgagcgagagaggaggaggaggagctggggcttgagcctgcgcccgggggccccgggtcacggaatcctaccattaccaaccctagccttcgttgatcgccgtctcaggtcatggcagggccggcgccggatcgggccgccctgactgtggggccgggcatggacatgccaatcatgcacgacagcgaccggtacgagctcgtgcgcgacatcggctccggcaacttcggcgttgcccgcctcatgcgcgaccgccgcaccagcgaactcgtcgccgtcaagtacatcgagcgcggcgagaagatagatgagaatgtccagcgtgagataattaaccatagatcattgaagcaccctaacattattaggtttaaagaggttattttaacaccgacccatcttgctattgtcatggaatatgcctctggcggtgagctttttgagaggatatgtaagaacgtgcgattcagtgaagatgaggctcgctacttcttccagcagcttatttcaggacaagtatgccaccgtgatttgaagttggagaacacacttctagatgggagtgacgctcctcgcttgaagatttgcgatttcggttattccaagtcatctgttcttcattcccagccgaagtccactgttggaacacctgcttatattgcacctgaagttttgttgaaaaaagaatatgatggcaagattgctgacgtttggtcatgtggtgtaaccctctatgtaatggttgttggcgcatatccttttgaagatccagaagagcctaagaacttccgcaagacaattcagcgtatcttgaatgttcagtacgcaattccagacaacgtgaacatatctccagagtgcaggcatctaatttcgaggatttttgttggcgatcctgctacgcgaataacaatccctgaaatccggaatcatagttggttcctgaagaaccttcctgctgatctgatggatgatgatagcatgagcaaccaatatgaggagcctgaccagccaatgcagaccatggatcagatcatgcagattttaacagaggccaccataccacctgcctgttctcgcagtataaatgtcctagctgatggactggacatggatgacgacatggatgatcttgattccgactcagatcttgatgttgacagcagcggtgagattgtgtacgcaatgtgagtaacatctcagcagccatctcagcagtcaaccaaggaaccaatcaggcatgggatgccctgttgtatactctggcaaagggcatgcttccttttgtgaaaaacatccatgtagttttctcaaggaatcgcaatgtgttctgtggaacacatatgttgtagtcaaactcgggttactcagcttgtaaaactagcctcctcttgcttcctggttactgggctttggatactctcaggcttcgacttgtgtgttgctgttaaatatgtataagaaacttctactcaggttgatctgtgaatctggattccggtagtggttttgctcagtgttgggtgtattcccgatttctgcatttcaaactctgatgattaggtcttgtatttaggcggtttctggatttcaaaatttgtgtttttttgtgc

SEQ ID NO: 90709 - DNA, 1804 bp, Zea Mays
acccggtaaaacaactgcggcaaaactcaccaagcccccaaactgttaacaggtgataaagcttttctctctcttggccggccagtgacatcagacatcaccaactcgtcgacggtagagagagcaagctcttcggcgatttgagaagaatcgaggagcgagcgagcgagcgagcgagagaggaggaggaggagctggggcttgagcctgcgcccgggggccccgggtcacggaatcctaccattaccaaccctagccttcgttgatcgccgtctcaggtcatggcagggccggcgccggatcgggccgccctgactgtggggccgggcatggacatgccaatcatgcacgacagcgaccggtacgagctcgtgcgcgacatcggctccggcaacttcggcgttgcccgcctcatgcgcgaccgccgcaccagcgaactcgtcgccgtcaagtacatcgagcgcggcgagaagatagatgagaatgtccagcgtgagataattaaccatagatcattgaagcaccctaacattattaggtttaaagaggttattttaacaccgacccatcttgctattgtcatggaatatgcctctggcggtgagctttttgagaggatatgtaagaacgtgcgattcagtgaagatgaggctcgctacttcttccagcagcttatttcaggagtaagctactgccattcaatgcaagtatgccaccgtgatttgaagttggagaacacacttctagatgggagtgacgctcctcgcttgaagatttgcgatttcggttattccaagtcatctgttcttcattcccagccgaagtccactgttggaacacctgcttatattgcacctgaagttttgttgaaaaaagaatatgatggcaagattgctgacgtttggtcatgtggtgtaaccctctatgtaatggttgttggcgcatatccttttgaagatccagaagagcctaagaacttccgcaagacaattcagcgtatcttgaatgttcagtacgcaattccagacaacgtgaacatatctccagagtgcaggcatctaatttcgaggatttttgttggcgatcctgctacgcgaataacaatccctgaaatccggaatcatagttggttcctgaagaaccttcctgctgatctgatggatgatgatagcatgagcaaccaatatgaggagcctgaccagccaatgcagaccatggatcagatcatgcagattttaacagaggccaccataccacctgcctgttctcgcagtataaatgtcctagctgatggactggacatggatgacgacatggatgatcttgattccgactcagatcttgatgttgacagcagcggtgagattgtgtacgcaatgtgagtaacatctcagcagccatctcagcagtcaaccaaggaaccaatcaggcatgggatgccctgttgtatactctggcaaagggcatgcttccttttgtgaaaaacatccatgtagttttctcaaggaatcgcaatgtgttctgtggaacacatatgttgtagtcaaactcgggttactcagcttgtaaaactagcctcctcttgcttcctggttactgggctttggatactctcaggcttcgacttgtgtgttgctgttaaatatgtataagaaacttctactcaggttgatctgtgaatctggattccggtagtggttttgctcagtgttgggtgtattcccgatttctgcatttcaaactctgatgattaggtcttgtatttaggcggtttctggatttcaaaatttgtgtttttttgtgc

SEQ ID NO: 90710 - DNA, 1548 bp, Zea Mays
ccttcgttgatcgccgtctcaggtcatggcagggccggcgccggatcgggccgccctgactgtggggccgggcatggacatgccaatcatgcacgacagcgaccggtacgagctcgtgcgcgacatcggctccggcaacttcggcgttgcccgcctcatgcgcgaccgccgcaccagcgaactcgtcgccgtcaagtacatcgagcgcggcgagaagatagatgagaatgtccagcgtgagataattaaccatagatcattgaagcaccctaacattattaggtttaaagaggttattttaacaccgacccatcttgctattgtcatggaatatgcctctggcggtgagctttttgagaggatatgtaagaacgtgcgattcagtgaagatgaggctcgctacttcttccagcagcttatttcaggagtaagctactgccattcaatgcaagtatgccaccgtgatttgaagttggagaacacacttctagatgggagtgacgctcctcgcttgaagatttgcgatttcggttattccaagtcatctgttcttcattcccagccgaagtccactgttggaacacctgcttatattgcacctgaagttttgttgaaaaaagaatatgatggcaagattgctgacgtttggtcatgtggtgtaaccctctatgtaatggttgttggcgcatatccttttgaagatccagaagagcctaagaacttccgcaagacaattcagcgtatcttgaatgttcagtacgcaattccagacaacgtgaacatatctccagagtgcaggcatctaatttcgaggatttttgttggcgatcctgctacgcgaataacaatccctgaaatccggaatcatagttggttcctgaagaaccttcctgctgatctgatggatgatgatagcatgagcaaccaatatgaggagcctgaccagccaatgcagaccatggatcagatcatgcagattttaacagaggccaccataccacctgcctgttctcgcagtataaatgtcctagctgatggactggacatggatgacgacatggatgatcttgattccgactcagatcttgatgttgacagcagcggtgagattgtgtacgcaatgtgagtaacatctcagcagccatctcagcagtcaaccaaggaaccaatcaggcatgggatgccctgttgtatactctggcaaagggcatgcttccttttgtgaaaaacatccatgtagttttctcaaggaatcgcaatgtgttctgtggaacacatatgttgtagtcaaactcgggttactcagcttgtaaaactagcctcctcttgcttcctggttactgggctttggatactctcaggcttcgacttgtgtgttgctgttaaatatgtataagaaacttctactcaggttgatctgtgaatctggattccggtagtggttttgctcagtgttgggtgtattcccgatttctgcatttcaaactctgatgattaggtcttgtatttaggcggtttctggatttcaaaatttgtgtttttttgtgc

SEQ ID NO: 90711 - DNA, 1458 bp, Zea Mays
attgtaagttaatgagttgaagttgtacagtgaaccatctcccacctttgacacttcgcgctccccatccaaacggtaccgatccgccggccgccgttctccatttcaaattgcaaacccgttctccttttccgcctcctcgacgcaactcgtcgccgtcttctccaactcgcacctcgttcctcgccccaccatttgccgctcccgcctacgatgccgacgagtgaggtgtggagcttgtccgattttgaaatcagcaagtacatcgctgagggcaggttcggcaaggtctacctcgcccgcgagaagcagagcgggtacgtggtggcgctcaaggtgatatttaaggcgaaactgaagaagcaccgcttccacgcgcacctgcggcgggagatcgagatccagcagagtctcgatcaccctaacgtgctccgcctcttcacctggttccacgacgaagagcgagtcgtcctcgtcctcgagtacgcggcccgtggcgagctctacaaggtccttcgcgctgctggccgcttcaccgagcgcacgtccgccacgtatgtagcgagtcttgctggtgcactggcatactgtcacaaaaagcaagtcattcatagggacatcaagcctgagaatttgctaatcgacatcgagggccggcttaaaattgcagattttggatgggcggctcgttcaaatgctaaacgccacacactctgtggcacaatcgattatctggcaccagagatggtagagaaaagagctcatgaccatgctgtggacaactggacattaggaatcctgtgctatgagttcttatatggttcacctccttttgaagctgatgaacaggatgataccttgagaaggatagttagggtggatttggcattcccttcatctccttgtgtatcttcagaggctaaggatctcatttccaaggtgacatctaaaagtagtggttatataagagattagtcaaaagtgatgggtgttgcctggactattgattgttaagtgtgattgtgtatgcagcttctagttaaggattcaagcaagaggctttgccttgaagacatcatgaagcatccatggataaagaagaatgcagacccttcaggcagttgcattaagcaaaaagatgtcacaagatcaaaggtaaaacgataagtgaatatgcaagatatcttctgagcaacagactagtgttcttgttccttggagataaccatggtgtttagtgtcagtagaagccagtctatgtactgtgatcttagttatggaccatgtgtcgaagttgctaaacttctgttgcttgcctcatctggggaggcaattaatcttagcttttgtgtgtatacagtagttccatatttttcagcccctctgtgatatatagatgtttggcgggtgggcgcttttattttgctattatggactcattgacattgtgcttgggta

SEQ ID NO: 90712 - DNA, 1462 bp, Zea Mays
attgtaagttaatgagttgaagttgtacagtgaaccatctcccacctttgacacttcgcgctccccatccaaacggtaccgatccgccggccgccgttctccatttcaaattgcaaacccgttctccttttccgcctcctcgacgcaactcgtcgccgtcttctccaactcgcacctcgttcctcgccccaccatttgccgctcccgcctacgatgccgacgagtgaggtgtggagcttgtccgattttgaaatcagcaagtacatcgctgagggcaggttcggcaaggtctacctcgcccgcgagaagcagagcgggtacgtggtggcgctcaaggtgatatttaaggcgaaactgaagaagcaccgcttccacgcgcacctgcggcgggagatcgagatccagcagagtctcgatcaccctaacgtgctccgcctcttcacctggttccacgacgaagagcgagtcgtcctcgtcctcgagtacgcggcccgtggcgagctctacaaggtccttcgcgctgctggccgcttcaccgagcgcacgtccgccacgcgagtcttgctggtgcactggcatactgtcacaaaaagcaagtcattcatagggacatcaagcctgagaatttgctaatcgacatcgagggccggcttaaaattgcagattttggatgggcggctcgttcaaatgctaaacgccacacactctgtggcacaatcgattatctggcaccagagatggtagagaaaagagctcatgaccatgctgtggacaactggacattaggaatcctgtgctatgagttcttatatggttcacctccttttgaagctgatgaacaggatgataccttgagaaggatagttagggtggatttggcattcccttcatctccttgtgtatcttcagaggctaaggatctcatttccaagcttctagttaaggattcaagcaagaggctttgccttgaagacatcatgaagcatccatggataaagaagaatgcagacccttcaggcagttgcattaagcaaaaagatgtcacaagatcaaagcttctgtaatatcagtacaacctgcttgccagtgggcaagaatcttctgatgtggtgccaaactcgtcactactggaggacaaatatgatgacatgtagttttaagttccgatagttctggagtggattggtgtgtgtgtccctgcaagctttctcctacaggctggagttctagttctgatgcagcgtttgtgtttcccttttgaactgtgtcgtgaaaccaatgttcactcgagaggaatgtagttttcaactgagttgttgaaccttcgcaaattggagggtcaatggtctgtggagactggagaggaacgtggctttcgctgtggcgatcgtattttgtaattgttgaatctgcagtattttggtctttagcaatgaaatatggagatgcacgtagtttttct

SEQ ID NO: 90713 - DNA, 1536 bp, Zea Mays
attgtaagttaatgagttgaagttgtacagtgaaccatctcccacctttgacacttcgcgctccccatccaaacggtaccgatccgccggccgccgttctccatttcaaattgcaaacccgttctccttttccgcctcctcgacgcaactcgtcgccgtcttctccaactcgcacctcgttcctcgccccaccatttgccgctcccgcctacgatgccgacgagtgaggtgtggagcttgtccgattttgaaatcagcaagtacatcgctgagggcaggttcggcaaggtctacctcgcccgcgagaagcagagcgggtacgtggtggcgctcaaggtgatatttaaggcgaaactgaagaagcaccgcttccacgcgcacctgcggcgggagatcgagatccagcagagtctcgatcaccctaacgtgctccgcctcttcacctggttccacgacgaagagcgagtcgtcctcgtcctcgagtacgcggcccgtggcgagctctacaaggtccttcgcgctgctggccgcttcaccgagcgcacgtccgccacgtatgtagcgagtcttgctggtgcactggcatactgtcacaaaaagcaagtcattcatagggacatcaagcctgagaatttgctaatcgacatcgagggccggcttaaaattgcagattttggatgggcggctcgttcaaatgctaaacgccacacactctgtggcacaatcgattatctggcaccagagatggtagagaaaagagctcatgaccatgctgtggacaactggacattaggaatcctgtgctatgagttcttatatggttcacctccttttgaagctgatgaacaggatgataccttgagaaggatagttagggtggatttggcattcccttcatctccttgtgtatcttcagaggctaaggatctcatttccaagcttctagttaaggattcaagcaagaggctttgccttgaagacatcatgaagcatccatggataaagaagaatgcagacccttcaggcagttgcattaagcaaaaagatgtcacaagatcaaagcttctgtaatatcagtacaacctgcttgccagtgggcaagaatcttctgatgtggtgccaaactcgtcactactggaggacaaatatgatgacatgtagttttaagttccgatagttctggagtggattggtgtgtgtgtccctgcaagctttctcctacaggctggagttctagttctgatgcagcgtttgtgtttcccttttgaactgtgtcgtgaaaccaatgttcactcgagaggaatgtagttttcaactgagttgttgaaccttcgcaaattggagggtcaatggtctgtggagactggagaggaacgtggctttcgctgtggcgatcgtattttgtaattgttgaatctgcagtattttggtctttagcaatgaaatatggagatgcacgtagtttttctatgacgcgaaaagggagggaaaaactggtaatttcaaatggccatatatctattattatgagtttaa

SEQ ID NO: 90714 - DNA, 511 bp, Zea Mays
gcgctctgcagtttatgactttattgccgtgaacccatacatttatacacaaaacatagagagaatgcatgacatctcttttaacatgacactgtctcagtctcaacttgtgatgatgccattattgccaagaacttgtgctgccattggcataccacaccctagagcatggtgtgtgtgtgtgtgtatgcaggtttccttctggtttgccattcttttgttagattgtgataaccatgaatcttatgtgttttagtatgtagcgagtcttgctggtgcactggcatactgtcacaaaaagcaagtcattcatagggacatcaagcctgagaatttgctaatcgacatcgagatggctttaaaaaaacttgacatgtgggggtaaaactgccacacgacattatattaagaagaccatctcagcaggtcgagaaaacccctgccccacccatacacggcgaaaccgtagcccatataagaacgaccgcgactcgggctagaccttagacct

SEQ ID NO: 90715 - DNA, 698 bp, Zea Mays
gtgacatctaaaagtagtggttatataagagattaatcaaaagtgatgggtgttgcctgaactattgattgttaagtgtgattgtgtatgcagcttctagttaaggattcaagcaagaggctttgccttgaagacatcatgaagcatccatggataaagaagaatgcagacccttcaggcagttgcattaagcaaaaagatgtcacaagatcaaagcttctgtaatatcagtacaacctgcttgccagtgggcaagaatcttctgatgtggtgccaaactcgtcactactggaggacaaatatgatgacatgttgtagttttaagttccgatagttctggagtggattggtgtgtgtccctgcaagctttctcctacaggctggagttctagttctgatgcagcgtttgtgtttcccttttgaactgagtcgtgaaaaccaatgttcactggagaggaatgtagttttctactgagttgttgaaccttcgcaaattggagggtcaatggtctgtggagactggagaggaacgtggctttcgctgtggcgatcgtattttgtaattgtcgaatctgcagtattttggcctttagcaatgatatatggaatggagatgcacgtagttttttctatgacgcgaaaagggagggaaaaactggtaatttcaaatggccatatatctattattatgagtttaa

SEQ ID NO: 90716 - DNA, 1605 bp, Zea Mays
ggcgtccatatccacggttatgcccctatcctccgcgatccccaagcgcgcaaatcccgtctctagcgcactcgtcgctcgcgagatctcgacgccgccgccgaggccccagcaccgatcgtggcagcagaggaagagagggaggtggtgggcttgtccagggcgacagcacctgcaccgatcgtggcagcaaatgatgaagggagggaggcggcgggcttgtccacggcgaaaatggccatctccggcatggtcgcccctagctctagagacggtgccgtggtagggtgggctgcgcgtggcggctgcccaggtgccgaggtgcggtcgtgatgctcgggagccgcaacagccagccgccacctcccccgtggccctgcccccaaacccgcgatcctctcgagccgcccccaccccgccccaccgttctctagcagtctggctccatccgcaagccccgcacgtctccatgattccacgccccccgccaccagctctacacccggtgctccgcctccatgccgcagatcgatcacgtccccactccccaaggctttggtttacaccggcaactattcgcccttccctactaaatctgcgatcatttcttctcgattgtgaccatggcgactcaggtatccctcgtcatgtggagggcggtcttctcagcgctaggcttgctcgtggtggccacgctggtgtacacattggccactgacggctcgctgttccatcctgagctggttacgccgtatttgtgagggattcgggttatatttgagttgtatgctgagaacaaggatgagactaaagaattctttcaaacaacagctggtgccatttttctctcttaattttcatgagcatccaacacataaaattgaacgtttcatctaagctgagcaggttcatcatttttattcttacatttaaaattgttcttttgaggagtaattcagaacatattagtgccttataacgtatgtcttctcttaaattcagaacatattaatgcctgaatgatggtcttctaccaatcgtgagttgatacatgtttatgccttttatggttttcttcaaaaggttggcagtgaatacaactttacaaatgtaatttctctcaaggagctattcaggcaactttgtattgttaattagaattttttggatcatgtagaggaatgtttctaactctaataatcacagggattagcatggggaggtatatgggacagggagtagtaatgtttgtctggttatgaatgcattcaagaaagaatatctaaaataactcccaaatccaaatagtatggcgagcattgtaaaatcattataacgaatttttgcttttaaagttctgctctctttgcaggtcaattttgctacttagcattcttttagatatcataacttgttgcattcttaatttgttcccacatgtataagttttaggcaaagaaggaaatggttatttgaagcttcccgttttgccttaaaatatgctctcttttcatttcctaaaattaaaccatctcttttattaaaactccatggcgttttagcctctctccaatatttaactcattcatttaactctgatgaatg

SEQ ID NO: 90717 - DNA, 138 bp, Zea Mays
atggcgactcaggtatccctcgtcatgtggagggcggtcttctcagcgctaggcttgctcgtggtggccacgctggtgtacacattggccactgacggctcgctgttccatcctgagctggttacgccgtatttgtga

SEQ ID NO: 90718 - DNA, 1314 bp, Zea Mays
ggaatttgtccgtatttgaaatcagaaaagaacataggggaaggcaggttcgacaaaggtgtaccttcgacccgcgagaagccagagcgggtacgtggtggcgctcaaggtgatatataaggcgaaactgcagaagtaccacttccacgcgcacctgcggcgggagatcgagatccagcagagtctcgaccaccctaacgtgctccgcctcttcacctggttccacgacgaagagcgagtcgtcctcgtcctcgagtacgcggcccgtggcgagctctacaaggtccttcgcgctgctggccgcttcaccgagcgcacgtccgccacatatgtagcgagtcttgctggtgcactggcatactgtcacaaaaagcaagtcattcatagggacatcaagcctgagaatttgctaatcgacatcgagggccggcttaaaattgcagattttggatgggcggctcgttcaaatgctaaacgccacacactctgtggcacaatcgattatctggcaccagagatggtagagaaaaaagctcatgaccatgctgtggacaactggacattaggaatcctgtgctatgagttcttatatggttcacctccttttgaagctgatgaacaggatgataccttgagaaggatagttagggtggatttggcattcccttcatctccttgtgtatcttcagaggctaaggatctcatttccaagcttctagttaaggattcaagcaagaggctttgccttgaagacatcatgaagcatccatggataaagaagaatgcagacccttcaggcagttgcattaagcaaaaagatgtcacaagatcaaagcttctgtaatatcagtacaacgtgcttgccagtgggcaagaaccttctgatgtggtgccaaactcgtcactactggaggacaaatataatgacctgttgtagttttaagttccgatagttctggagtggattggtgtgtgtgtgtatccctgcagctttctcctacaggctggagttctagttctgatacagcgtttgtgttacccttttgaactgagtggtgaaaccaatgttcactggagaggaatgtagttttcactgagttgttgaaccttcgcgaattggagggtcaatggtctgtggagattggagaggaacgtggctttcgctgtggcgatcgtattttgtaattgtcgaatctacagtattttggtctttagcaatgaaatatggagatgcccgtagtttttctatgacgcgaaaagggagggaaaaactggtaatttcaaatggccatatatctattattctgagtttaa

SEQ ID NO: 90719 - DNA, 549 bp, Zea Mays
accaaagtaaaacccagtgattttattcgatgttatgtacaaggaaattcattagtactccgtacttcagtacacagaacctcgaacaaaacatattctgaacactccaggtatttacagcataaaccgcacacaccggttttcattaataagtagaaaaggacaagtctaatctgcatagcagcataggtgcaacactaaaatattaccacataccataaaacgagcttcagcttcagattatcatgctgcaaaacttccaaaagggacacctggatggtagatgacttgattcagtcagtctcatgatcagggcgtggggtgtaccattcagggtatctacccatccttctcagcaaccttgtgtatggagactctggcatcaacgcctcctcttcttcggtgagctcttcctgtgttttcggtatcccatcaggcacggggaacggccttggctttgcagtttgcccctgggagcctgatggtactgaattacgagatttctctgctatcttcttccgcaaatctgagcgatgatggatgctctcg

SEQ ID NO: 90720 - DNA, 3539 bp, Zea Mays
tccggctgtccctttgctctctgctccgttccttgatccagattccgcggcggtgagggcacccagcccgatcgtccgtctctgtcgatctcccgaagccctaagtggaacccttctccgcgtcggattcgatcgcgggctgatttgatccagagaattcgcggggggcgccggcggcggggaataggatgctgtaggagggagagaggaaggaggaaacgtcccggatttctgggcgcgcgcgcgggcggccatgcatctgtcgctgtggaagccgctctcccactgcgccgcgctgctcttggacaagaaaaaccgcccgccgcggccgccgcaggcgggggcgggggcgggcgcggggtccggcggcgggcggcggctgcaggagagcaagctgcgggaggcgctggaggaggcgtccgaggacgggtccctcgccaagtcccgcgacgcggcgctcctcgatggaggggacggtgcggaggaggcgtccgtggggcggtcccgctcgctggcgcggctccacgcgcagcgggacttcctgcgcgcgacggccatggccgcagagcgcgcgttccagtcgccggacgcgctcccgatgctggaggaggcgctggccaggttcctcgccatgtaccccagctacgcgtccgcctcggacgtggaccgcctccgcgccgacgagtacccgcacctggacaaggtatgcctcgactactgcggctttggccttttctcctacctccaaagctgcaaccctgccgattcgtcggctgcgttcacgctctcggagatcaccgccaacctcagcaaccatgcgctctacggcgccgccgagaagggcaccgcggagcacgacatcaagaaccgcatcatggattacctcaacatccccgagtccgagtactgcctcgtcttcacggtcagccgcggctcggccttccggctgctcgctgagtgctaccccttcggcaccaacatgcgcctgctcaccatgttcgaccatgagtcccagtccgtgaactggatgacgcaggccgcgcgtgacaagggagccaaggcgtactccgcctggtttaagtggcccacgctcaagatctgcaccaccgagctccggaagctgatctccaccaagaagcggcggcgcaaggactccgccactggtctgttcgtgttccctgtgcagtcgagggtgacgggtgccaagtactcctaccagtggatggcattggctcagcaaaatcactggcatgtcctgctcgatgctggggctctggggcctaaggacatggactcgctggggctgtctctgttccggccagacttcatcatcacttcattttacagggtgtttggggctgaaccaactggttttggatgcttgctgatcaagaagtcggtaatggcatgcttgcagagcccgagcggtgggacgggggcagggatggtgcggattgtgccggtcttcccacagtatctcagtgattcagttgatgggtttgaaggtgtcctggatgggctggaggatgataatatcattcaaattgaggaggggtcggtgttgaacagtcaccatgcaccccatttgcctgcattctcaggtgcatattcatcagcgcaagtgagggaggttattgagagtgaaatggatcaggacagttcagatagagatggtgccagcaccatatatgaagagagcgagagtgtttctgttggagaggtgatgaagagccctgtgttcagtgaggatgagtcatcggagaactccttctgggttgatttgggacagagtccacttggttcagaccattcagagcaatcaagcaagggaaaattgggctctccattgccagcatcctggttttctggcaggaagagtgctaagaaggcgtcaccaaaggtgccatccaaactgtcaaggagtcctattcatgataaccatgttatgtcatttgatgcagccgtgaggtcggtatcacaagagccagggccggagaaaggggatctggatgaagataattcacatattaacatcaagaatactcctatcagcgagattgaagaagataataaagatgctaaagtaaataagaggtttgtaaaattttcttgtgccaacgacactgctgaaggtgaaggctgtgcaacctctgtttttgggagctgtaccacccgtgagaatggctccacatccgagattttctcagaaagtcaagcagaaaccaaagatagtgcaatcagaagagaaaatgaaggtgacttccgtctactgggaaggagggaagcatacaatggcagattcaatggtggaagattctttggagtagaagaatcggaacgagtgccaagtatggggcacaatgtatcattcactttggatgatagcaagctttgtcgtaatgcagatgctggggaaacatctgggtatggaatggcagatgacgatgacgacgacgacgatgcatacagtgactatgatgaggctctggatggcaggaaagaacctgaaattatctgcaaacatcttgatcatgtgaatatgcttggacttagcaagaccacacttagattacgatacctaatcaattggttggtgacctcattactgcagctccggttgcctgattcaggggatggcgagggggtaccccttgtttatatatatggtccaaagatcaaatatgaccgtggagcagcagttgcattcaatataaaggactgcaacactggaacctccctgataaatcctgaaactgtacagaaactggcagaaaaagaaggcctctccttgggcgtcgggttcctaagtcatatacgcctcatagacaaccagaaacatggtgcggttgatgtggggttaagttcttcctggccagcggcaaatggccgtcgtgaaaagaaaaatagcaagaatgctattattgggaccgaagtggtcactgcatctcttgggttccttacaaattttgaggatgtctacaggttgtgggcatttgctgcaaaatttcttgattcatcatttcttgagcaagagaggctatcatctattcctgaggatgcagaaagatagtattagatggttccagtttatggctattgcagctacttcataatagaggagggtggcaccagtgtaattgaaacgaggatagtagaagagatgtcatgttgcttctgcgtattgttttttaacgtctcagcatggagtcaaggggcaatacttggtagtgcggcttttatatttcttcattcttatttccatccttttctaggcatgcaacgtttttgtttgtagattttttttttggagatctatatgtaccagctaattattttgagcatcctttccatgtacttgcttgtaagttgtaaattggctccattggacatgaaatagatttgctcgcttgtatgattcttgcaacatgaatagcatgatgataggtgactgtacccttttcagttttgttgttgaatcctcagctgtcctaagatgttagtgtctgctatagttctgtcatgaatttgtctacttaagt

SEQ ID NO: 90721 - DNA, 894 bp, Zea Mays
acgcctcagacgaaaaacacaggcttgtgtggagcatccctggccaatcagcgtccctccctccgaccaccaaatggacctcctccatgtcaccaccaaggattgaaggataaactctcccttggccaccgcccattctccgccccgccttatcctcccctcatcccccgtacaaaaccgcgctccctcccgcccgcccgccgctcaagccacctacaccaccacctcgccggccacactcgtctttctcacgagccacagcccacaggcacaggcaggctctcgagctcagtccacccatcgcaggggatggcgtcgtcgttcgccgtggcaacggtcccgtcgctggcggccccggcggccaagaagcggtccggcggcgtcacgtacgtggagggcatgaacgcctacagcggcctcaaggggctcaacaaggtgaacatgctcggggtgcgcaagaccgccgactactccttcgccaaggtcgtggcgtcgctcagccccgcgggcaggaagcggcgcggcggcgcgttcggcgcccagatgaacgacgccgccgagatcttcaggatcgccgccaccatgaacggcctcgtgctcgtcggcgtcgccgtcgggttcgtgctgctccgggtggaggccgccgtcgaggagtccgagtagggtgcgtgggcctgccactgtcggctgtcgccccgggccgcagtctgcttcagaaaccgtgatatatatataaccagatgtacgctttcgaatcaatttactttggtatgtatccatgacaattggtgaatactgtggaaatatgtttttggagtcgaggcctgcaattgatcgatctccaggtgatcacatcaatgaccgagtgagaggaatgcaaccaaagtttttttt

SEQ ID NO: 90722 - DNA, 782 bp, Zea Mays
ctctctctccttttcacttgccactttgctcaaatccaccatccgcactcctcactctttctctttctcagtgactgcaccactgtcctgactttgccatctctctcttcgtctcctttcctttgctctctctctctctctctctctctctctctctctctctctctctcttcaatcttctttcctcttcttcgatcgccagccaggccaaccgcagatataactccttccgattctcccctccgtggactccgcttgattcgacaaaagtatatgaccactcgacgatcacaagaagtagcagattgctaggaacttggtgtgtccggccgtgctccattatttgatcgtggaagaacacagctgcaacaccgtggctttccgtttgcttgatcgtctcccaatgctgcgaaggaacctaccgaatctctccctccagataagcccgccggccgctgcggcatctgacgcaccggcgacgtattccgaaggaagcagcgacgaggtagggctcttcgcaaaccctagctccggcgcggagcccccgccgccgggcctcagcctggggctcgccacgccggcgcgtggcgacaacgacgacgcgaccggacgtcgaggtcacctccagccgccgcagggatgcgcgttcaagcgcgcggcggccggttcttcatccctgcccgccggatcgaaatcgaagcgtagcgcccgggcgccgcggatgcgctggaccaccgcgctccacgcgcgcttcgtgcacgccgtcgggctcctcggcggcc

SEQ ID NO: 90723 - DNA, 548 bp, Zea Mays
ttaacttgttgagcacacaggagcaggactgaccacgcgccagctgcagtgccggaaaaaggagttgcgattgccgactcgctgtcgttgcaccggtgtcagaaacacaatttctcaccggcagtgcttcaggatacccagcaggcggctcaagacgaagaggcaaataataataacggtcagctggccacgggacggctgcgcggaagtgttgaccccatggctacaaactgctcgagcccagcgagctcttcttctccctctcttgctagcctggagcagcagacggcggacgacatgtgcgcgccgagcctggagatctccctcgggaggcggcactggagcgcggaggagcgtccggaaggagttagcctaaaataaatgtgacgaataaagagaaaaaccgatcgggggtttcgtacgctgagagctaaccaattgattggtcaatattcatgaagtgctagctaataatctagctagctaggccttatatatgtgttcgttcgtcacggcatggaatgaaatgaaatggatctatgagagca

SEQ ID NO: 90724 - DNA, 895 bp, Zea Mays
gctaaagcagccaagtaaaaaaaaaatacaagagctagtaacagctcaagaaccttctttagagcgagtgcgtagagcgaagcgccgaagcgaggggacctgccagtgccacggcctcgagtgcagcagcagccagcagggatggctggcgcggtcgctgtgtggctgctgggggcgttcgccaagagtggacgcctgccggaggcgccggcgcaggctgctgccgatgcggaagacgcgcggcgccaccgcggagatgatggcgttggcgcggttgcgcgcgtcagcaacggtcgacgagtccaggagaagaggcggcgggatagcggcgcgctctccggctcggaggagaccgtcgtgtgcatgctcatggacctctacgccccggcgtgacgtacgtgtaacgtgcgggggacggcggtgttgtttctgggcgcgtagcggtacgtacgcacacaactacacaaggggcaggtatcttgaggacctggactgtgtaacgctgtggttaattaattagccgtgcgtgccagctgtatcgtatggtttttttttgttcgggttttttttactaggtgtgaaaaattgttctcgatcggttgattaacatctgggtcgtccgttctggattgggcgccgttgagatcctcctctctcctcgttcgggattttgggacttgttggttttttttttttttgtccatggccatgccttgtcgctcctgccactgccgttcgacgacggcggagactcatcgcttttatggtacgggtacaaagcacaggaagataatccatgtacctggagtcctggacagatagacttgcccgatccaatctttttatatgctattgttgggaacaaaataatggagatagtgcgtctgttacccgg

SEQ ID NO: 90725 - DNA, 1409 bp, Zea Mays
tcggagatacctaaaaaacgagcatagattttaatgcgcaatgctagaacaccaaaactattcgtggtttcaaaagatgggctcaaatttgccaggcttagttgggcctaaaaatttgctttcagctcgaatccacggtccaatctaacctgaaagattttctaaaaataaaactgacctgaaagagcgaaaggattctatactattgcttgagtgtcgccttgttcaacttctcgaccaaggcagagagagctttcatccggcagccgctgagcctgagatccctgcaccgcctcccgcccgcccgccggaatggagttcgccttagtcgagagtgaatcgttctctccttcctgccccacgcttatcatggtttgaaaccctaacgctgcgagctcccactgtttatttctggaatcgagtttttagtagttttaaccgatggcctacgattatgtttggtcttcggatcacccggccgcagccagcgctgtcgattggcaacgtggggcagctcgccgtcgaccttctcatatcctcgtcgagggcgaggcgggtggcctacctcgacgagccctccgtgctgccctgcgccggtaacgacgccttcggccctgacgccgtcggcgacctcgcactcgctctcgaagcttatgaatctacatctcataagctgggtttcattcagcaaaggtctccagttactacaggaatgatggtttcatttgcaaaaaatgttgctgatttcataaatagcatcgggaagaaccatattgtcattatatcaagtttagattctggaaagaggagagtgattgatgcatccagtgacatgcaggtgtattacctttcaagttgcaatgaagatggttctgatccagaatatgagaaattggggtggaaaaagcttgaggattatgatccatctcagaaacggtggaattgtcttgctagcctagttgagggtggtggtctttcagaagatctggatgatgatactgatgagatgacaataaatgattactatgcaagcctgccatttgcagcactattctctgcctgcaaggctaaaggcttgaaagtttcttgtgtactgtgctactgctcggaaggcgacaacatgccagaatctttccagttagctgaagcaatatgcaaacttctaggtcatggccctgagaaattccatggaaatgggtcaaatggatggatcgttcccttgtcatggaaatcagtatatggaccaccacctgatatgtctatcttttagtgttgaattatgatcagttttataggtgaagttgccatcacggaaaatgctgagtagaatcgaggatgttgaactcttaatttagacagtgtaccagaagtatccaggagggcaccatgatacttaacccttaaatgca

SEQ ID NO: 90726 - DNA, 1526 bp, Zea Mays
tcggagatacctaaaaaacgagcatagattttaatgcgcaatgctagaacaccaaaactattcgtggtttcaaaagatgggctcaaatttgccaggcttagttgggcctaaaaatttgctttcagctcgaatccacggtccaatctaacctgaaagattttctaaaaataaaactgacctgaaagagcgaaaggattctatactattgcttgagtgtcgccttgttcaacttctcgaccaaggcagagagagctttcatccggcagccgctgagcctgagatccctgcaccgcctcccgcccgcccgccggaatggagttcgccttagtcgagagtgaatcgttctctccttcctgccccacgcttatcatgccagcgctgtcgattggcaacgtggggcagctcgccgtcgaccttctcatatcctcgtcgagggcgaggcgggtggcctacctcgacgagccctccgtgctgccctgcgccggtaacgacgccttcggccctgacgccgtcggcgacctcgcactcgctctcgaagcttatgaatctacatctcataagctgggtttcattcagcaaaggtctccagttactacaggaatgatggtttcatttgcaaaaaatgttgctgatttcataaatagcatcgggaagaaccatattgtcattatatcaagtttagattctggaaagaggagagtgattgatgcatccagtgacatgcaggtgtattacctttcaagttgcaatgaagatggttctgatccagaatatgagaaattggggtggaaaaagcttgaggattatgatccatctcagaaacggtggaattgtcttgctagcctagttgagggtggtggtctttcagaagatctggatgatgatactgatgagatgacaataaatgattactatgcaagcctgccatttgcagcactattctctgcctgcaaggctaaaggcttgaaagtttcttgtgtactgtgctactgctcggaaggcgacaacatgccagaatctttccagttagctgaagcaatatgcaaacttctaggtcatggccctgagaaattccatggaaatgggtcaaatggatggatcgttcccttgtcatggaaatcagtatatggaccaccacctgatatgtctatcttttagtgttgaattatgatcaggtgaagttgccatcacggaaaatgctgagtagaatcgaggatgttgaactcttaatttagacagtgtaccagaagtatccaggagggtgagttgcagacgtttgtagtcagttggtaaaggattactaaacactcaaggatggaacttctgcaggcaccatgatacttaacccttaaatgcatgaatcagaatatttttgtaactggtactgtggctactaagagtcagatctttgtcaactcaggtctgctaggtgcttacgcatgttgcttaccatcataccatgtgccgtttccattctaaccatggaattccaagcttctcgtctgccgttttggcagttttgccca

SEQ ID NO: 90727 - DNA, 1467 bp, Zea Mays
tcggagatacctaaaaaacgagcatagattttaatgcgcaatgctagaacaccaaaactattcgtggtttcaaaagatgggctcaaatttgccaggcttagttgggcctaaaaatttgctttcagctcgaatccacggtccaatctaacctgaaagattttctaaaaataaaactgacctgaaagagcgaaaggattctatactattgcttgagtgtcgccttgttcaacttctcgaccaaggcagagagagctttcatccggcagccgctgagcctgagatccctgcaccgcctcccgcccgcccgccggaatggagttcgccttagtcgagagtgaatcgttctctccttcctgccccacgcttatcatgccagcgctgtcgattggcaacgtggggcagctcgccgtcgaccttctcatatcctcgtcgagggcgaggcgggtggcctacctcgacgagccctccgtgctgccctgcgccggtaacgacgccttcggccctgacgccgtcggcgacctcgcactcgctctcgaagggaatgatggtttcatttgcaaaaaatgttgctgatttcataaatagcatcgggaagaaccatattgtcattatatcaagtttagattctggaaagaggagagtgattgatgcatccagtgacatgcaggtgtattacctttcaagttgcaatgaagatggttctgatccagaatatgagaaattggggtggaaaaagcttgaggattatgatccatctcagaaacggtggaattgtcttgctagcctagttgagggtggtggtctttcagaagatctggatgatgatactgatgagatgacaataaatgattactatgcaagcctgccatttgcagcactattctctgcctgcaaggctaaaggcttgaaagtttcttgtgtactgtgctactgctcggaaggcgacaacatgccagaatctttccagttagctgaagcaatatgcaaacttctaggtcatggccctgagaaattccatggaaatgggtcaaatggatggatcgttcccttgtcatggaaatcagtatatggaccaccacctgatatgtctatcttttagtgttgaattatgatcaggtgaagttgccatcacggaaaatgctgagtagaatcgaggatgttgaactcttaatttagacagtgtaccagaagtatccaggagggtgagttgcagacgtttgtagtcagttggtaaaggattactaaacactcaaggatggaacttctgcaggcaccatgatacttaacccttaaatgcatgaatcagaatatttttgtaactggtactgtggctactaagagtcagatctttgtcaactcaggtctgctaggtgcttacgcatgttgcttaccatcataccatgtgccgtttccattctaaccatggaattccaagcttctcgtctgccgttttggcagttttgccca

SEQ ID NO: 90728 - DNA, 1457 bp, Zea Mays
aactgacctgaaagagcgaaaggattctatactattgcttgagtgtcgccttgttcaacttctcgaccaaggcagagagagctttcatccggcagccgctgagcctgagatccctgcaccgcctcccgcccgcccgccggaatggagttcgccttagtcgagagtgaatcgttctctccttcctgccccacgcttatcatggtttgaaaccctaacgctgcgagctcccactgtttatttctggaatcgagtttttagtagttttaaccgatggcctacgattatgtttggtcttcggatcacccggccgcagccagcgctgtcgattggcaacgtggggcagctcgccgtcgaccttctcatatcctcgtcgagggcgaggcgggtggcctacctcgacgagccctccgtgctgccctgcgccggtaacgacgccttcggccctgacgccgtcggcgacctcgcactcgctctcgaagcttatgaatctacatctcataagctgggtttcattcagcaaaggtctccagttactacaggaatgatggtttcatttgcaaaaaatgttgctgatttcataaatagcatcgggaagaaccatattgtcattatatcaagtttagattctggaaagaggagagtgattgatgcatccaggtgtattacctttcaagttgcaatgaagatggttctgatccagaatatgagaaattggggtggaaaaagcttgaggattatgatccatctcagaaacggtggaattgtcttgctagcctagttgagggtggtggtctttcagaagatctggatgatgatactgatgagatgacaataaatgattactatgcaagcctgccatttgcagcactattctctgcctgcaaggctaaaggcttgaaagtttcttgtgtactgtgctactgctcggaaggcgacaacatgccagaatctttccagttagctgaagcaatatgcaaacttctaggtcatggccctgagaaattccatggaaatgggtcaaatggatggatcgttcccttgtcatggaaatcagtatatggaccaccacctgatatgtctatcttttagtgttgaattatgatcaggtgaagttgccatcacggaaaatgctgagtagaatcgaggatgttgaactcttaatttagacagtgtaccagaagtatccaggagggtgagttgcagacgtttgtagtcagttggtaaaggattactaaacactcaaggatggaacttctgcaggcaccatgatacttaacccttaaatgcatgaatcagaatatttttgtaactggtactgtggctactaagagtcagatctttgtcaactcaggtctgctaggtgcttacgcatgttgcttaccatcataccatgtgccgtttccattctaaccatggaattccaagcttctcgtctgccgttttggcagttttgccca

SEQ ID NO: 90729 - DNA, 372 bp, Zea Mays
atggtcttgccagttaaactagaaccactgctgcccccacataaacaactgctagccatgactcctggcatcagcaacttggtgaactttcctagactcagcgctcgagaactgaccgaccactcgtgcatcgggtacactgggattaccagaagcgagcgcaaccacgttgtcaaggaaatactgctttggaagtctcccaacaacattgccttcctcatttccttccttatccagaaaggcaaagtggggaatgccttccaccccgatctcgtcgagctcctgttcccactttgtgctgtcaacattcagcattacgaaattgacacggtccctgttcatatggaaccgcattggctgcaacatctttaa

SEQ ID NO: 90730 - DNA, 567 bp, Zea Mays
agagatcagaaagaggccagaggcccaaccttatatccagtgtctcgtgtgtttcttctgtcgtgcttaagggaagggagacgagttctctacatcttcttgtgcctctactgctgacgggagggaagggagcggatctggtgatccgtggtaacgtaattctcaacacttttcacactcctcgatgtgtgtttgctgccaatcatccaccctctgtctcgcgcggtacgcccttgcatcaatggacgagcctcgagccctcgaccgacgagttgaaccaggcggtccaggcggaggcgggcgaccagccctctccgcgcggacgtctccggtcggggacgaccatctctggaccggatccgacgccgcatcgtcctccgccgatgcgggcagggcccagaatgtgtggtcgtcgtgattccagttaataatgtatcgccatgtatgttttaagtttattatcaatgccacgttggtgtatgagtctatatcgaccgtgatttcttgattatccaattaagtcggtcacgtacttgtttaaaagaaatcgtattacgacagttagaa

SEQ ID NO: 90731 - DNA, 1302 bp, Zea Mays
taacgtgttgcatcgctggcctagaatcgtctggatccagcgtgccacgcgctcacgccagttcatgcacatccacacttacagagttacagttacagccaaccaaccacatcgcatatcaaagaccagaaagctcaaaccaagaccggcgtgcgcggacgaagcacagatccatcggagtgacagcgagcgagagcgagagagacagagagattgtccgcgcgtcagcgactcccggcgaagacgatggggaaggggttcgcatcctacctggcgatgaagacggggccggagggcggcgacgcggcggcggcgcagcaggctctgatcgacgcggacctgcgggagctcggcgtcgccgcgcggaagctcgccaaccacgcattcgtcctcggcggcgggctggggttcggcacctccttcctcaaatggctggccttcctcgccgcagtgtatctcttgatattggatcgcacaaattggaagaccaacatgctgacagctctcttggttccttacattttcttcaccctgcctaatgtgctgttttctctgatcagaggagaggtggggaaatggattgcgattattgctgttattctgcgtctattctttccacgacacttcccagattggttagagcttcctggttccatcatcctgctcacagtggtcgcccctagcctgttcgcggacagcttcaggggagacctcgttggtgtcttcatatgccttgtgatcggatgctacctgctccaagaacacatcaaggcgtcaggtggattcaggaacgccttcaggaagggcaatggtgtgtccaactccatcggcatcctcctgctcttcatctaccctgtctgggccggtgtgctgcaagtcctgtaggcaccattgcctcagtgtttcccctgtgcggtccagctccgttcccgttcgtgcccgtgcaaatgttccctctatggtgatccgtgatcctgtgtcacgagtaggtgatgtttttatgtgtgcttgagttgatcggttgggcatgttgccatgttggtggacagttttgtttatctcatttgttgtagttcgatgtcagcatttggttcgttcgagtacataaacgccaataaaatcagtagccgtggcttgatgtagattgagatgttggtcatattatctcgtgtaaatccctgcgtctcttctgttatagtgttatgcaagctagaggacgcatgtttatatgtcaactaattattttctatatcaacagcatcatccggtgttatttctgaatatggtgccaactagtgacaa

SEQ ID NO: 90732 - DNA, 2478 bp, Zea Mays
agcatttcgcggaaaagaaagaatcaccccgtcgtccctgcagtctgcaggtgcggtagcggtgccccgtctccatccatcgcaaagcccccgggctttcgatcccgtcccctgcttttgttcccgcccgccagattccttccaacatcccggctgcactgcactgcaccacgactccacgagctgaggtgaaaagcaagcgagaaacgcgccgccccggggaggaggcgaggggtgagtcgggtcgggtgtgccgtgcgcgcgcgtatgggaatggcatgatcgtccggcggcgcgtggactccgtggatggataacggggacaggtcgggcgctggcgcgggcgccgtcggcagcgccggcagcctcggtctccgcgtcgggcaggcggtcttctcgtcggcgtcgctgctgttcatgtcggtcggtgtcgagttcttcagctacaccgccttctgcttcctggtgacgatcatggggctggtcatcccctggagctgcacgctggccatgatcgacgtgtactccgtgttcgtgggatgccctctgcgcgtgccgggcgtcatggtcatcgtcgtggtaggagactgcgccctgtcgatagtctcgttcgccgccgcctgctcgagcgccgcggtgatcgacctcctcctccagctccatggatcccacagctccccgacgttctgcgggaggtaccagctgtctgccatgatggcgttcttgtcctggctcctcatggccgcctctgccaccttcaacctctggttcgtcgcctcacggtggtaaagctgcagcaggccacttttttttttgtttcgtagatagcgcacataatttggctttggagagcgtatgtgttagctactggatgctactgggattcgagggagagaagatcagagaagagagtagcgtgtgggagagtgggagagaatgacaggaagatggcgatagatgtattcctttacccaaattcttcttgtcctgattattacagactcagtacttatactaccctgggacgcagcccatactcatttggtacactctggccatgaacacgcttgttcggacgacgcatacgactggacgcgtcttttcttctcccgcgtcttcagtatcagtagcttcactcaccggactgctaacattccctaccgcttgaaatgcggcttgcccccaagccgctgatagtgtagacaatgattgatgactctacttcagctttcagggattagcactgattaccccatagtttgggtgagtgagagacaagggcagtactgatgctggccttacaggagaaactcagcagccttgagttgttggttgggtacctttagaagctatgtctcccaatctgagaagatgacctggtgtgaaatgagcaaagattgtgtgagtaatactgaactggtgcccttttgtcaagaccgtagccaatatcatcaacagcactggccttctcgttagccaagagcaggctattgacactcgtgagccatgagttgcaaatcaagagaaggttagcaccgtcttgaccaccattttctttagatggacaaaaagaatgctccacggctaaatcactcaagtctgctcctgcaatgatattcttttcaagatcaaccagaagcatgacatccttttcttaagcacgacttgaatattgcaggatgggtccattcacggccagtgatttaatccaccacacccaagctgcataacagtaaaaagatggccatggcataggtctgacttgaacaccatcaccgaggagcaccgactgcacatgtggtggccatggttgcttgtacgacacgacatcccacccacactcggatggataccagatgttgcactgtgtaatcgtgtcctgtatcgtaaactgcataggtggcggccatggtggctttatatgcattagatccaaagcaaaaaaataataattctcagacactttcgaaacagcatgtgtggcattggttgcagaacagaaccaaacaatcgcatcatcaattgaggttgcattggtgagattagcagtgaaaaaccttggccggatatggtccacaatattctgggatacgacgatgactgagtgaaactcattgctgacagcaaagaggccatcacccaagttgtcagctaccagcacaaacccctttccaacagggtagtagccacaggcaacgttgatgtgctggaagaggatgttctctttcacctgattaaaactccaaagataaggctgcaactttgctgcaaatgtggttggaccaaccaattgcccctggtaaactttctcgactgtttcagcagccgcactgacctttaggatggcatcactagagaaacttgattcaacatcatactcagaagcgcgccattggggcaaacgtccatcagcagctgaaaatgtctttgcatatggaagcatgtgtgataaacttgatgtcagggtcctatccaggt

SEQ ID NO: 90733 - DNA, 549 bp, Zea Mays
atgggcatctgcgtgtcgtgcgacgcggcggacgagggcgccgcgacggcgagggtggtgctccccagcggcgagctccgggagtacgccccgccggccacggccgggacggcgctgcaggcggccggcggcgagggcccctggctcctctgcgacgccgacgggatggcgttcgagggccccgtcgccgtcgcggcggtcgcccccggcgaggagctccaggccgggcagatctacttcgtgctccccgccgagatgcggcgccgccgcctcacccgcgaggaggtcgccgcgctcgccgtcagggccagctcggcgctcgtcaaggccgcggcggccgcgcaaccgtcctcgccctgccgccggctccggcgcggcgcggtggcgccgctcgtgttcccggtccccgaggaggagtacgcggcggcggacgcggtctcgcccgtcgcggcgaagccgcaccagaagcggagggtggcgtgccggggcgggagggcgtccaggttctcccccgacctgaccgcgatcccggagaccgagagcgagtag

SEQ ID NO: 90734 - DNA, 2303 bp, Zea Mays
agaagctgccccccgcccccccttttgcgccctttttctttctttccgttgcccttttcccgttccctgccccttcttctccgtctttctccggtcggctttggagaaagaggtgatgtgaggttcccatcactcacgcctggctgggtacctagatgctcccgggccgtctttattacggctgtcgccgggctgggctgcggtcggcggcggaagggagtcttctggcggagatatgagaggattgttttagtgaggtctatgagctggtaccagaactgctcataatattcaggggaaaaaaaaggcaacatggcggaatcgaaggtcgcaagtctggatgcccgaacgacgaagatcagaaacgtccccatcgcagtgaccccagaagggttctggtgctgcccgtcgcaagccgtgctccagaagacggcgaagagccaaaacccgcaggcgaagacgaagcccaaagggggtgcctcgcctctcgcaccaaaggcggcaccaccaatccagagggcacccacaatctcgtccgagagaaggacgcactcgactccgaccagggctaagaccaactcagaggagcagaggtgcttgccgccggcagaggacgctgcggctaataataatgccactaatccgccgaaggcggtgaacgagaggccacagaagcagcacaaggtatctgtggggttcggccagctcgagacgagtgacttgaaggtggtgctgtatggcaaggacggcgttgcggtgaagatgagcgtccacaagaacaccctagctggaaacagtaccttctttgctgacaagctctccgggcagtctccggcgtcgagtatagaagtgactgactgtgaggatgtggagatttatgtcgagacagttgggttgatgtactgcagtgatgtcaagcagaggcttatcaagcaaaccgttcctcgtgttcttcgagtcttgaaggttgcagagctgctgggtttcccagcatgtgtcatgtcatgcttagactacttggaagcggtcccttgggtcggggaagaagaggagaatgtggtctcgtctgtccggaacctgcagagcgagagctatggcgtcagtcctgtgctgaagagggtagcaccatctgatcgaacaaccccaccaaacgatacgttttcacatatcatcgaactggtcttgagaagcagcgaggacagggggcggcgcgagatgaaatctctggtgcagaagcttctgaaggagagtagcactggctgcatgagtgggtcttccgacctgtgttctgcggtcctctacagatcatgccggaactgcctggattccttactaatcctgtttcagcaagcaaccgacagtgatttcgctgagcaggctcttaataccaaagaaccagttttccgacaagttgctctagaagcagataacctgctctggttagctgagatcttggctgacaggaatgccgctgacgagttcgcggtcatatgggctagccaacgtgagctggctgggctgcactctaggttgccagtcaagtcgcgccaccttgtcagctgtgtcacggcgaggctgttcgtgggcatcgggaaaggggagatgcttccttcgaaggacacgaggcggcttctcttggacgtctggttgcagcctctcatggatgactacaactggttgcagcacggctgcaggtcgttcgaccggaaagtggtggaggaaggtgttgggcggaccatcctgacgctccctttggaggatcagcagacgatcctgctctcgtggcttgggagcttcctgaaggttggggacagctgccccaatctccagaaggcctttgaggtttggtggaggagaactttcgtaaggccctatgctgagcagcaaggtaatcgatcgcaatcaggtcggagttgagatgtcaattggttgcagaagaagatagtcttgtttcctagtgtagtatatttgatgagaagttagggtggcggtttcttcttgcgtggtagcccgcgtgggagatccccagtatgtggaggaaatgcggttagtactcttgacctgcgtgaggcttgaggaagttcgcgttgtgcttgtgatgcttcgtatgtatgtcaagatctctgaattctgggtgcagaatttgtatcgtcaggcatctgttttgatgctctgttctgcttctcacaacgttgcacgatgttaattaaggatctgttatgtaaaagaactcgacgccttcaatgcaactgtaaagattttgcagaatgtgttcttctaaagtggagacatatcggtttcta

SEQ ID NO: 90735 - DNA, 786 bp, Zea Mays
gataaaccacagagccaccccactaactactttcaccattgtttccagaaaaatctccgcgcataatatttctctagagcaaacgctctgtcatcacacaacactagttcgtccgcacgacactcccgcagttcctcgacaggggagaggtttccattccaggcggttgcggttgcggttggcggcggagatgagccgggggagcaagctccggtggctgtggcgcgcgccggcgcgggcgctgggggcgggcgcgggacctgtacgtgcgggggctgacggggtgcgcgcgccacgtcccctccgacgccgcgttcgggtaccccgtgttcgtgccggcgccgctgtccaggagccacagcgccgtcggctggggcgccgggtcgtccgaggccgacgaggacctgcgcgaggtggtccgcgccgcgtcgcagcgccgcgtggagcagcgccgcgccgagctgcaggccgtggcccggagccagagcatggccgcctcgctctccatggcgcgcatcgacgaggacgcgccgtgcgacttcggggcgcccggggcgctgtgcccgaggagccagagctgtgtcggcgacgccgcggggaggaggcccccaccgccgcggccacgggaaggtggcggccttgctctgacggagtcggagctgctgtccggccgccgccgtcggtggcacagtgtgtgagaatagcgatcgtgtcacgccatgtcttctgttcaaagtttgatcatgtcattactcgaaatgatggatgtttttgctgtccgccgaa

SEQ ID NO: 90736 - DNA, 378 bp, Zea Mays
atgagccgggggagcaagctccggtggctgtggcgcgcgccggcgcgggcgctgggggcgggcgcgggacctgccgacgaggacctgcgcgaggtggtccgcgccgcgtcgcagcgccgcgtggagcagcgccgcgccgagctgcaggccgtggcccggagccagagcatggccgcctcgctctccatggcgcgcatcgacgaggacgcgccgtgcgacttcggggcgcccggggcgctgtgcccgaggagccagagctgtgtcggcgacgccgcggggaggaggcccccaccgccgcggccacgggaaggtggcggccttgctctgacggagtcggagctgctgtccggccgccgccgtcggtggcacagtgtgtga

SEQ ID NO: 90737 - DNA, 1618 bp, Zea Mays
acctcccacgtggcctcgccaatcgccatctaccctattccccgggcatcggagaccgggacgcccaaggatggaccgcctcgtcctcttctcccgccgccgccgccgctggatcctcctcaccgcggccggtgcagcggcggctgtcggcgcgtacaagatctaccaccatccggtcgtcgcggagcgccgccaccgcctcgtgcgccttgccgccgccgtcgcggccatcgccgacgccgccacgtcgtccgccgacgcggcggccctggtggtctccgatctcgccgacttcgtccggtccgacgcggacgaggtcccccgcagcgtcaagcagctggccaagctcgctgcctcccccgaggtctccgccaccgtctccaccctatccgaggcagtaacctccgggatgttccgcggggcgggatcctctagctccgggcccggatccggcggtaccgtggccctctccgatcgtttcgtagacaagctcttctctgattcaggcgagcgtctcgcgtccgcggttgccggaagcttcgctcgccatctcgtgctcgcctattactccgctccttcacctcagggggaggcgtcctcctccccgacggtgtgggtcaacgtggtcgcgactggaaagtgccggaaggcgataagcacctgggttgaggtcttcgtgggcaccgcggttagggagttcattgacaagaccatccacatcaacacctacgaacagatcttcgaagggctcaccaatccgaaacatgatgccaaggtcaaggaattgcttgtttcagtgtgcaatagtgcggttgagactttggtgaagaccactcaccatgccctgtacaatactaatgacaacttggatgcaaatgatagttgtagtggcagtggcaatggcaatggagttggggaaggttgggtggagagggtgtcgagcacattggcagttcctagcaacaggaagtttgtgcttgatgttacagggagggtcacatttgagacggtgaggtcatttctggagtttgttctttggaagctacaagatggggcaaggaagggtggtgactctatggttgacagtgggctgcgtgtcgtgaggtatatgagcgataagtcaatggttatcgctacgatctgcattacattgtgcttgcatgtgttgaatgggactaggctcttggtagcagcttaaagagcgtaatcgtttgcctttcctatttttgcacattgtttgtataaaactgtaggaaccatacttaaactgtaaatcagaaaagagtggaaagaagatcaattatgcagcataagtctgttatgcatgtatacttgagattggtctgcacgactttagtgagcgagatgttgatctgtagtactgcctgggattaattggcatttagatgcctgctgttattgaagcctttttttttaaaaaaaacaagtatagcattactaatattgtggggggtcaagttggaccactaaattatgtgcttttgtatcttgtcaccaatgatgtaaaaagcttgccttttcacgccattattgaattatgtaagatctcaagtttgttttcaatgatacgagttatttactcgcttggggtttaagt

SEQ ID NO: 90738 - DNA, 106 bp, Zea Mays
ttaaagatagtggctttcagtagttcctggagcatggtgatgactgctgttaactcagaagcaaacactttatttgttaatcaccggccggcggcggctttgattg

SEQ ID NO: 90739 - DNA, 953 bp, Zea Mays
cccttttccccgattctctactcgcctcacctagttttctggaattgcgggtacgtcttgctctcgtagagtcgtagatcgtagtgcaaccgtgggggagaaggagaaggagatgctgtctgtgcaggaagcacttgaccttgcgtcgtccagctgcggcacgatggacattaccacgtgcgggttcacaccgtgggggcccgagtcgtgccctagcctggagcaggtgatggcgtcgaggccggccgcgtcgtccacggcggcgctggccgaggccgaggccgaggcggcgagggacgcggacccggaggacgaggagcggctccggcgtcagcgccgcaaggtgtcgaaccggctctcggcgcagcggtcgcgcgcgcggaagcagcagcggctggaggagctccgcgaggcggcggcgcggctccgcgccgagaagcagcagctggaggcccggctgcaggccctggcgcggcacgacctcgccgtgcgctgccagaacgcgcggctcggcgccgaggcctccgcgctcgcgcgccgcttccgcgaggcgcgcaggctcctcgcgctgcgccgcctcgcgttcgccgccctgcagccgcggcccggcgtcgctcccgcgcccgcgccgccggcgcccctgctgggactggcctcgctcatgacgtaggtggcttgggggggacgtgctgccctgcccgatggaacgaactcatgtcacagggtgaagtttttggcacggacggacgcgggccgcatgctatggtgaactggaacatgggggcacactgaggctagtaaggtgcatgctatgctggtatctgccgctagcactacaccactactactactgcctgaggggagggtcccggttggcgtgtaaattgcataatcaagtgctacatgtagctcgatgtgaattaaagtgaagaaaaaaaacatatatttatcta

SEQ ID NO: 90740 - DNA, 2275 bp, Zea Mays
tccccctcggcttcgtcgctcggaggtgtgcacacacacaaaccgaagcccttgccctcccatccccctccaaacgcgcgcaaccatggagagtggcggcatcattgcgccgtgtactccccaatgattgatctctcatcgtctcttcttccaaccacctcctcgtcctcgcactcgcactcgcactcgcccttctctcttccctgcccggctgcccgcttgtctccccaaaatgaccagcaacagcagccagaacatgagcagctgcagcaccggcggaagcgacgcggcggtcggcggcggcagctggctcggcttctcgctgtcgcctcacatggcggcgaccatggacggcgcggccgacggcgttccggtgcagcaccaccaccacgaaggcctcttctaccctcccgtcgtcagctcctcgcccgcgcccttctgctacgctctcggcggcggccaagatggcctcgccacggcggccgccaatggtggcggggggttctaccccgggctctcctctatgccgctcaagtccgacggctccctatgcatcctggaggccctccacaggagcgagcaagaacggcacggggtggtggtgtcgtcgtcgtcgcccaaactggaggatttcttgggcgcgagcgcgagcacggcgatggcgctgagcttggacagctccagcttctactacggctgcggccacggccacggccacgaccaaggcgggtacctgcagccaatgcagtgcgcggtgatgcccggctcgggcgggcacgacgtgtacggcggcgggcacgcgcagatggtggacgagcagtccgccgcggcaatggcggcgagctggttctccgcccgcggcaatggcggctacgacgtcgacggcgccggcgccggcgccatcgtgccgttgcagggccacccgcacccgctcgccctctccatgagctccgggacggggtcccagtccagcagcgtcaccatgcaagtcggcagcgcccacgccgacgccgtcaccgagtacatcgccatggacgggagcaagaagcgcggcgccggcaacggcgctagtgccgggcagaagcagcccaccatccaccgcaagaccatcgacacattcgggcagcgcacgtcgcagtaccgcggcgtcaccaggcataggtggacggggaggtatgaggcgcacctctgggacaacagctgcaggaaggaagggcagacccggaaaggccggcaagtttatctcggcgggtatgacgtggaggagaaggccgcgagggcatatgacctggcggcgctcaagtactgggggacgtccacgcacgtgaatttcccggtggaggactacagggaagagctggaggagatgaagaacatgaccagacaggagtacgtcgctcacctgagaaggaaaagcagcggcttctcgcgcggcgcttcgatctaccggggagtcaccaggcatcaccagcacgggcggtggcaggcgcgcatcggccgcgtctcgggcaacaaggacctctacctcggaacgttcagcacccaggaggaggcggcggaggcgtacgacgtggccgcgatcaagttccgcggcctcagcgcggtcaccaacttcgacatcacgcggtacgacgtggacaagatcatggagagcagcacgctgctcccgggcgagcaggtccggcgcaggaaggaaggcgccgacgccgcggtctcggaggccgccgccgcgctggtgcaggccggcaactgcatgacggacacctggaagatccaggcggcgctgccggctgccgcgcgggccgacgagcgcggcgccggccagcagcagcgtcaggacttgctgtcgagcgaggccttctcgctgctccacgacatcgtgtccgtcgacgccgctgctggtacagggacagggggcatgtcgaacgcgtcctcgtcgctggcccccagcgtgagcaactcccgggagcagagcccggaccggggcggcgccagcctcgccatgctcttcgccaagcccgccgcggcgcccaagctggcttgcccgctgccgctggggtcctgggtgtcgccgtccgcggtgtccgccaggccgcccggcgtgtcaatcgcgcacctgccggtgttcgccgcgtggaccgacgcatgaacaaacatccgtgtcattaccagggtacggttcttttggtttgcttagagcgtgctttttagctgggtaaggttagctgcgtagcggtggtctgatcagcatatgtgagaggaactagccatgcgt

SEQ ID NO: 90741 - DNA, 1308 bp, Zea Mays
gtctcactcaacctgcgcccatgggattggcttaacttctgggacgtactccatccactacggcaactcccccctgcactgcagtttatctcggcgggtatgacgtggaggagaaggccgcgagggcatatgacctggcggcgctcaagtactgggggacgtccacgcacgtgaatttcccggtggaggactacagggaagagctggaggagatgaagaacatgaccagacaggagtacgtcgctcacctgagaaggaaaagcagcggcttctcgcgcggcgcttcgatctaccggggagtcaccaggcatcaccagcacgggcggtggcaggcgcgcatcggccgcgtctcgggcaacaaggacctctacctcggaacgttcagcacccaggaggaggcggcggaggcgtacgacgtggccgcgatcaagttccgcggcctcagcgcggtcaccaacttcgacatcacgcggtacgacgtggacaagatcatggagagcagcacgctgctcccgggcgagcaggtccggcgcaggaaggaaggcgccgacgccgcggtctcggaggccgccgccgcgctggtgcaggccggcaactgcatgacggacacctggaagatccaggcggcgctgccggctgccgcgcgggccgacgagcgcggcgccggccagcagcagcgtcaggacttgctgtcgagcgaggccttctcgctgctccacgacatcgtgtccgtcgacgccgctgctggtacagggacagggggcatgtcgaacgcgtcctcgtcgctggcccccagcgtgagcaactcccgggagcagagcccggaccggggcggcgccagcctcgccatgctcttcgccaagcccgccgcggcgcccaagctggcttgcccgctgccgctggggtcctgggtgtcgccgtccgcggtgtccgccaggccgcccggcgtgtcaatcgcgcacctgccggtgttcgccgcgtggaccgacgcatgaacaaacatccgtgtcattaccagggtacggttcttttggtttgcttagagcgtgctttttagctgggtaaggttagctgcgtagcggtggtctgatcagcatatgtgagaggaactagccatgcgtgtctgctttggcctcctgcgattcctcctccagttgcgttgcgaggaggtttctttttgtaataccggggctagatagcacagcatggatctcctcctgtagccaacactaatttggagtaggatggttagtgttgatctcctaacttcaattaggaaaaatatgccaagtaagataagtttaaacc

SEQ ID NO: 90742 - DNA, 115 bp, Zea Mays
tttttttattttggccaccaaactttttgtcttatgttcctacactatgtagacctacatgtaccattttgggacaattataacagtgttttctatagctagtagatttagttcg

SEQ ID NO: 90743 - DNA, 1617 bp, Zea Mays
aaaaataaaagttctgctcgacagaaagaaccagtttgaccagctgctggaagtaatcttgatccacaatgattacggggcatatgaaggagacacagatcttccaatcatgtgacaccgcgctcgacaactcccagctttccccagcgtgggacggggggcaggtacaacaaacacgtatggacgagcgcgggatctggatctctactccctacttgtgcgcacaagtggagcagcaagcaacagatcagcgtccagcagcaagtacacgggcgtctccctaatccagcggcgactctctgtttaccttcaccattcgtacaggcgaacaggcccacacacatgaaaaaacaagagaaaactgtatctacacctccgtacaggcggaggaggttgctctctcacgtgtgggataccatgccgtgcagccaggacagatccgggaaggctcaaccgcacaacgcatgttccgaatctcagccaagaagcgcccaagagctgctgccatgccatgccatgccgccgtgccatggcagccagccagaaataacacatccccctcctctcccagcacttccatccatggtgactcaccgtttttttttccccacacctatcaatttcctgttttacacatttcactcgacctgctcgcctatgaggtcaaggcctactagcaagaaggacacgccctggaacaggaggaagtagaagtgtatgccctgcttcgacagcaggctccgggcggccgcggtcaggagcagcatcgacagcgccagctccttcttgtatatccggttgtgcttctccttcttcttcgcggcggcgtccttcctcgacgccgccagctgctgctgctgttgctcctccttggcgacggcgtcgaggttcggcgcggagcccgtcctcgtcgcgtgcttcacaggctccttgggcggggccagcgcgatgaggtcgccctccgacgagcggcccgacttcttggtcaccacccactcgtacgcgctccccagctggaacagcccggagatcatcgcgttgaacttggtcacggacatggtgttctcgaagagcaggtacgggatgatgaaggggaacgacttgggggacggcaggatgttcagcagggacatcagggccgggacgtagcacaccacccagtcggggagctcggcctccggcacgaacatcgtcatcgggaggatgatgcagaacagcgtgaaggagtagaaaggcagtatgagcttccggagcaggaagaaaaggaatatcaggttcgccttcttccaaaatgcaatctgcgtccaagtgaaagagagagtggacagcacattagaggtccggtatggtaaattggatccatacattcagatcaagagcatgatacataaaacatctagcttttccatgcgttcattagcatgtagccaaagaaaacaaagcattacaaagatatattttattagtgataattcgatcttactgaacattatatgttaattgaacagaatatgccaagcatgctattcagagttgacgttacacaacgctgttaaaagaagcaaaaatgaggccttaaaaaaatttcgagatatccagcaaagcaacaaatttaaa

SEQ ID NO: 90744 - DNA, 291 bp, Zea Mays
atgtggcacagtgcgcttcagaaagtcgggatgaggttggaagtctgcgtcaaagatggcaacaaactcgtactccttcacatagctgcagctcatggccgacttgaggtttccagccttgtaaccatccctcagcacacggtgcctgtacacaatccgggcaccctgctgttgccatttggccacctcttctctgatcagagtctgtgtgagtgggtcgtccgagtcatccaacacctggaccaagaagttggatttgggccagtcaaggttgcacacggccgcgattga

SEQ ID NO: 90745 - DNA, 246 bp, Zea Mays
atggcgtgtcgataccgtgtagggcaccccggccccgagtcacgtgcgcgcgagccaccagggatgcatgctgctgcggcgtcgcggctgatcagatcagctattcagctgagcggcgaggagccacacgaaacgcagcgcgctcgatcgaatcgattactacccgcaatcaatccgagatccgtggcactgttcaccggatcaccggctgcgcggctcgaccggccgtgcccacggctgcattga

SEQ ID NO: 90746 - DNA, 549 bp, Zea Mays
ccaagcttcatgcctaatatcagtgttcaatgacgttttgtggaagatggtgcctaatgatgaagaaaaaaccaatattagcaagcaaacagatgattacgagagatccgaaggcgattgcttctcaaagccattagcaataagagatagaaacaaaaaaacctagtaagtaactaagtatctaagtagttgcctattttccttcttccttgatcactttgtttttggtaacgtagcactaattagtttggaattgtactgtagttcttttgtggggttcatatggtggcctagcttatgagctccaaagtttagggaacattttttagcctttgatgtgcaacatctggatgggagcgtaattggagtgcctttgctgatatccataccaagaaaagaaactggttagagcataaaaggttaaataagttggactattgtagctacaaccggaaaatgcaaaacaggtttaaaaaaattaaagagcttggttccaagagaaagaaatgcaatccactgttgcttgaagaattttgatggaaaaaatgg

SEQ ID NO: 90747 - DNA, 1516 bp, Zea Mays
caaagccagccaccagcccacacacgcatatcattcactcatgtacacctttcttcctcctctcttcatctcctatcccaaatatctatctcaaccatctacatggctttatctcctccttattgttccagtcgtccgatccatttgctatcttagccttagctagctagggtttcttgagtcgccttggcctcagcagcttcctacttcgtctgtcttctgattattaacacagtagaaataaagaagctagctatagcgacgccatggatagcttcggggatcttggcggaggtgggagcagttcctccagagctgcttctgctcccttcttgcagctcccgctgccggcatcaacgtcatcagcacaacaacaggtgttatttccgctgccggacgggccgcagcagcagcaccatcaccacagctcgcgcatcccgttgcgacagttactgttactggccgacccgtcgtcggcagcgcagcatagcgctagccatcggacgaaggacatggcaacagtgcagggagagatgtcgtcgccggcggtggatggggatgccgacgccatcaaggccaggatcatgtcgcacccccagtactcggccctcctcgccgcctacttagactgccaaaaggtcggcgcgccgccggatgtgtcggataggctctcggccatggcggcggcgaatctggacgcgcagccggggccaataagccggcggcgcggcccgacgacgacgcgagctgatgacccggagctcgaccagttcatggaggcttactgcaacatgctggtgaagttccacgaggagatggcgcggccgatccaggaggcaacggagttcttcaacagcatggagaggcagctcggctcgacgatctccgacagtaactgtgaggtcgccgggtcgtccgaggatgagcaggacgcgagctggcctgaggagatcgatccctgcgccgaggacaaggagctcaagcaccagcttctgaggaagtacggcggctacctgggcggccttcgccaggagttctccaagaggaagaagaaagggaagctccccaaggaggcgaggcagaagttgctgcactggtgggagctgcactacaagtggccctacccttctgagacggagaagatggcgctcgcagagacgaccgggctggacccgaagcagatcaacaactggttcatcaaccagcggaagcggcactggaagccggcgtcggaggacatgccgttcgcggtgatggagggcgggttccacgtcgcgcagggcaccgcagcgctgtatatggacaggccggcggtgccgccgttcatggcggacggcgggatgtaccggctggggtcgtgagggccggcatgcacggtaaaagctaagcacgtgtgccagcacgacggtgattgttgaggtgtagtagtgattgaactgattgctccttctcatccgtaaatatacagtttcgggttgacacgtttttctcgatctgcaaggtaggcatcatgttg

SEQ ID NO: 90748 - DNA, 868 bp, Zea Mays
gatcctgcggcgaaggtctaacacaagtagtatctaggtatgaggagcagagttttgttagagaagtgagtgtcaaaatggcacattatttcatttttagtttcatggagatacccagtttgagcagtatctaggtatgaggagttacaaatttgtttatgttatgtattgtcctcttgcgtcatactgataagagaaccatgatgacaaaatccacctgttttggtgtttaccttgagccttttaaaggttttcattaacatttcatcatgcttcacaatcagatgcgtttcattttcaaggaaaatgactacattacaaatttacattgattgtgaactgaatcagaagtgaatgtttgtgtcactgattttctgatgtgcaaacaattcaataggagagctcttggtgaaggaagcatggcaattccttggctgttcggcagaaatgtcacgggttcgattcatctggacgctggaaatgttcatgtaataccatgtaggcaaaaccttagcttactattcttggaaatccaatttggttgtagattttttcgtgactcaaatctgggaaggacataacttggataggtgaagctgagttcggaattacggtgggttgatcagttttgcctatgttggctacagtgcagtgctccccctttgcctatgttgttgttgtctgaatatagccgccctaaagcctaggtaaaggacggcgttgcgatataccaagcgagttagcgcttgacaacctataatcacagtgggcgagcctgcaaggctgcaaccatcacactacacatcattaaaaccatgaaaagggcaggctaggctaggttgcgagaaaagagaagcagagttgtgtt

SEQ ID NO: 90749 - DNA, 1541 bp, Zea Mays
ctccagccgaagaactggccgtgataacagcgccctctctgtctctctcctagtgttgtctccatcgtcctcctccccctttgcctccctcccaagttccaacgccgtgttcgccgccctctccctctaccggcctccacaccgtctccatcggccggcccgccccattgcccacacgacgacagttctcagctcgtctaacgcttagccgctgaagccattggagaggcgatatgggaagcccccggtgacgatgcggctaccgcagcacacggagcgtgcgggttcgccgaaaacctgcagcatcttccaagcgtggctgccccgtcaccttcgctgtcccggtcctgtctcgcagctgctggtcctgtgcgctgtccctggatgcccacgccgtcgatgccacggacacctcataggtaatcatgatccctaatcctacttgccttttgtgcgggccactggttcataagtatttagctgattcgtacactatggagggtctgagtcctgtgcggctcttgattactagatggatgcagatcacttgctgcttgtgaggataccagtgtccagcaacacatccccgatagatttagacccgttggacattgtggaaacctacatatcgtggcctccaattttgttattttttgatgaacgcgatagccctcagttctgatgatgcacatggtcttaggttcacgaaatgtgccatgatctgaactttaaatctggtttgattttctgaaggcctttggtagtatttgctgcaaccagtgtcctgtttgaccttttacagagccgcgttgtacacaacattttttgcatttgttcagttcttcttcttcccggtatgctgatttagaaccacatggaataaggacgtcgacacattctacactgaataatgaacctatcatttgtttgtatcagcaggccataaactgcttcatcccaatcatggaccgtcgtttctttaaacatattgatggccaccttttgtttttttaagaagaatttgaagaacatgctcccgtctgcagcactgttcctaaacggtataaaagcacctgtactggtcttcaccaagcaagcacctcagacaccaacatctacacacaatcacagtcacaatggaggccggagggttagtcagggtcagggaggccggctgggccaggttcgacttgctaccccatggctaggagccggaggtcgtagcgcagctgctctgcacccagcatgagttgccttggtccgatcaaagcttcttccgtacagtgacaacaacatgccacatattcttttggcaatttgtattgcttttaaaaaaaatctacttctttcactaaaaacttccttatccatgtgatatccgatgtattctacataactccaaaattgctaccgggcaatactcacccttacctattcttttaactgatatgtccaccttttcaggttattttggctattcattttaatgattgtatgtatgtgcctatgtatgataaaaaaaataatgtcgtttttttacc

SEQ ID NO: 90750 - DNA, 787 bp, Zea Mays
ctcccaagttccaacgccgtgttcgccgccctctccctctaccggcctccacaccgtctccatcggccggcccgccccattgcccacacgacgacagttctcagctcgtctaacgcttagccgctgaagccattggagaggcgatatgggaagcccccggtgacgatgcggctaccgcagcacacggagcgtgcgggttcgccgaaaacctgcagcatcttccaagcgtggctgccccgtcaccttcgctgtcccggtcctgtctcgcagctgctggtcctgtgcgctgtccctggatgcccacgccgtcgatgccacggacacctcatagaacgcgtagcttccagactttcctcgagcatactttgttaccagcctggcaaattgaaaagccaacatgaatcaaacgtcggcgcgcggtggatctgaagcctgtgtgggggcgcggtcggcgaggagctggggcgcgcgtccccgcccagctcccccgtcgtggcactggaccgccacgcctgcgtccaccaagagacgtccgcaccaccctcgtccacgagcagctccaacgacctcatcgccgcattgcgcctgctcctgcgctgcaggctccggttaccgtcggtgcccacaccgaggaaggcgtaatccacgccaagcaacccagttactgagctactgagctgcaacctccgatatcgcgcacgtgtccaggagcattgaggaggcttggtacgattgcttggcgatgagcgagtcggatgtcgaagacgatttccaatgtgcaagatgg

SEQ ID NO: 90751 - DNA, 165 bp, Zea Mays
ccatttcacagccaactggtcgccgtggcagaggagattcgcaaaagatcggccggtcggatcaccgccagtagtctgagcttgccggccacgattcgccgccggtctctatccgcccgggttcctcttcacagtcacaggcgtccacatcgtgacatcgccagc

SEQ ID NO: 90752 - DNA, 2327 bp, Zea Mays
agagcgcgattgcactgcaagcgcagatctcaattaggagtacacaacaagtggagttcgacggatgtgaagtgaattgcggcctttcttggttgccgtcttgctgctatggttgacttgcggtccctactcgtcgccggcgtcgtcctcctcgccggactggccgtcctcgtccacggcgccggggacgagcagttcgtctactcgggcttcaccggcgcgccgctcgcgctggacggcacggccaccatcacgccgtcggggctgctggagctcaccaacggcacggcgcagctcaagggccacgccgtgcacccggcgccgatgcggttccagcggacacccggcgggcccgtgcgctccttctcggcgtccttcgtgttcggcatcatcccgccctactccgacctcagcggccacggcatcgtcttcttcgtcggcagggacagcttcgccaccgcgctgcccagccagtacctgggcttcctcaactccagcaacaacggcaacttcaccaaccacgtcttcggcgtcgagctcgacaccatccagagcaccgagttcaaggaccccgataacaaccacgtcggcatcgacgtcaacagcctcacgtccgccaacgccagcaccgccggctactacgacgacggcaccggcgcgttccacgacctgaccctgatcagcgccaagcccatgcaggtctggttggactacgacggcgagacggcgcaggtcaacgtgttcctggctcccctcaggacacccaagcctaccaggcctctggtgtcggccgcgcagaacctgtcgggagtggtcgtggacccggcgtacgtgggcttctcgtccgccactggcacggtgaggtcggagcactacgtgctcggctggagcttcgccatggacggccctgctccggacatcgacatcgccagcctgcccaagctaccacggttcggccccaatccgcggtccaaggtcttggaggtcgtgctgccgatcgccaccgcggcgtccgtcctcggcgtggtggcggtcgtggttgcgctcgtccgacggcggctcaagtacgccgagctgcgggaggactgggaggtcgagttcgggccgcaccgcttcacgtacaaggacctgttccgcgcgacggagggattcaagaccaagatgcttctcggcgccgggggattcgggagagtgtacaggggagtgctcccgaaatccaagcgggaggttgccgtcaagaaggtgtctcacgaatcgaggcagggcataaaggagttcgtcgccgaggtggtcagcatcggccgtctccgacaccggaacatcgtccagttgctcggctactgccggcggaaaggcgagcttctcctggtgtacgactacatgcccaacggcagccttgacaagtacctctacggcaaggacgacaaggccacggcgacgctggattgggcgcagaggttccggatcatcaaaggcgtggcgtcagggttgctgtacatccacgaggactgggagcaggtggtcatccaccgagacatcaaggccagcaacgtcttgctcgacagcgacatgaacggacggctgggggactttggtctcgcgaggctgtacgaccatggagccgacccgcaaacaacccatgtcgttggcaccatggggtacctcgcgccagagctggcgcggtcagggaaagcgtcccctctcaccgacgtgttcgccttcggggcattcatcctcgaagtcgtctgtggccggagacccgtggagcagagcatgaccgacagccggctcatgctggtggactgggtgctcgagcactggcagaacggaaccctcgccgacgtgatcgacgcgaagctcaaggggagttgcgacgaggaggaggccatgctggcgttgaagctagggctgctgtgctcgcacccgttgcccgctgcgaggcccagcatgcggcaggtcatgcagtatctcgacggcgacatgcccttccctgagctcacgccgtcgcacctcagctttagcatgctggccctcatgcggagcgaagggttcgattcctttatcctgtcggcgtcgacgacgcagccgttgtcgtccacggcgatgagtatagggactatgactggcctctctgatgggagatgacgagcgcgctgtcttgctggagcatgtacattggatggcgccagtacgtaccagtagtatgctatgctgtagagttgccaattttacaatttcttgaagctggaggagcaactctagtactctaccaataacatgtaacatcccgccgattcccggaccggcgctattttctggtgacaacc

SEQ ID NO: 90753 - DNA, 662 bp, Zea Mays
gaaggcactagccgaagccacgctccccggaacgaacgacgcagcccaacccgttcccaccaaaccagcggcaccacccatggcttcggcggcggcgagatccggtctccggtcgctggcggtgcgcgccggcccgttgaggcgccgcatgtcctcctccgtccacgacgacgcctatgagacggccaagtgggagaagatcacctacgccgggatcgtgacctgcaccctcctggcggcgtacaacctgtccaagggccaccccccacttcgatgagccgccggcgtacccctatctgcacatccgcaacaaggagttcccatggggtatggactgtatacctcatcaattcgatttggctgcttgtttgattttatgttatttgctccgttcccttttgttgaaagaaatgcgtcaggattaatacttgctttggtgatatgccatcggattaatctgtaatactttgtgtactagaggcctctgtatgacattatagcctagtatttagttgacagagttctctatttgcgtataggattatcgtcttggttaactaattgtatgcatctgtctgatagctctacaaataatattaagggtgcacattggtatcttatatttttcccttattcttggttgttttgttttgcacaaatat

SEQ ID NO: 90754 - DNA, 453 bp, Zea Mays
gatctcactcttgagttctcggaatatctgattagatttggcctgagtctaaaatgttttttgttgttgttgcaggcgtacccctatctgcacatccgcaacaaggagttcccatggggtatggactgtatacctcatcaattcgatttggctgcttgtttgattttatgttatttgctccgttcccttttgttgaaagaaatgcgtcaggattaatacttgctttggtgatatgccatcggattaatctgtaatactttgtgtactagaggcctctgtatgacattatagcctagtatttagttgacagagttctctatttgcgtataggattatcgtcttggttaactaattgtatgcatctgtctgatagctctacaaataatattaagggtgcacattggtatcttatatttttcccttattcttggttgttttgttttgcacaaatat

SEQ ID NO: 90755 - DNA, 788 bp, Zea Mays
aagactcaaagcaaagcatgccaaatctaattgaatcaaatttataacggaggaagtagctccgtacgtgccttctctggtcggcatgcattcatggtgtcttgctggtcttcgtcctctcccaaaccgagacagggcgcacagagtcagtaaaggcctggagcatcaactcgtgaagcaggcggttggttccactccagtttctctcggtcgcagtgactttgccaggaagccaagctttccagcgcttcttccttcctcttcgggaggagtacagagccagcacctgaagtgatcctcatccaccgaacgaaaggaaacgagccgagcccaccatgctgaggcaactgtcaagcaggagccatagaagcaagaagctccgggcaagccacggtttccaggccttcctgctggtcgccgtcgccgtctggatcgtgtaccagctcacgcatccgttcggcgagcgacggcggcacgtggccgtggaggagaccagcggcagcagcaacgacgacgacgccgagccggcgcggcgccggctgggcaggatgcgcttcgtccgcttcccgggccacgcgtccgtcgatgacaatgacattgctgctggggccaggagctggagcggcggctcgtcggatgatgatttgagcggcaaggctggcgacgccgaaggcggcgatgagggaccggaggccgatggagatgacgcggacgatggacttgccgttgccgctgatgaagaggatgatggcatggatttccagtcacgagacggcagacgcgactag

SEQ ID NO: 90756 - DNA, 2409 bp, Zea Mays
tcatgtcggtctaatcgttgctcattcaatttgaataacaagaactgggaaccatagttcatacgatcacaaaaaaaatctctaagggggtgtttggtttaaagaatcacttcatccaaaatatggtggtgcatcatgggtccattcttcaaatttggtgggatgacctcattcctcatattagtactaactaaataactataaggaatgaggtgatgatggatcaactcaatccattccacaaaccaaacaaaaaatagaggagtgaggagacgatggactagatcattcctcaaaccaaacagcttataaattacggagatccgtaaaagcggacaccctacatggctaaagcgaagcaaccaaccaaaaaatcacaccacacaaaggcattcagcgctcacaagaaaaggtgaccacgatcaactagttgatcaccggaatcgaactactacaacaaagcacacgtctgcctcaactacttctgtacaattcgctcgtgattcgcggttgccgccggtccggtgggtcaccggagtaggtcggcctgcaggtgcgagagctccttcctcagccggtgggagaagagcctgcacgcgtccatgctcaggtccacggccgccgcgagggctacgaacgccgccgcgtcctcggcgcacccgatgtgcgccaccccgacctccaccgtcggcttgctgcaccggccctcgccctggaccgcggcggacatgacgaagccgcggtagttccccaggggccagttgctcaggtcgccgctgcctctcgggctgcaccccggcgtgccgccccggctcagcggctgcgcggcggtcaggtcgatgacgaacttgccgccgttggacgaggggatggaggagtcggctagggcgacggcgtggtccgcgccggggacgaggagggcgaagtggtagcccaggctgtcggacgcgccggcgccgccgcgctcgcgccagcactcgagccgcgcccagggctcccaggcgccgtcgcccgcggggcggaggatgagccacgcgcccgggttggaccggctcacgcggtccgtgcccggcgagggcacgaagggcgtgaccatggacgccatcgccacggcggagcccttcaggtcgtgcaccgtcaccgaccaccccttgcgctccttggccgacgcggcgtcgcgctccggctgcatccccggcctgcgcaggtcgctgttgctgcggcatccgaacttgcaggtgaacatgggctgcttcatgctgccgcgcacctgcagcacctgcgggctgcactccggctcgccgtcgaactcgaaaacgaatcgcgggtccggctccgcgcggacggtgaggctgagctccgtcgccgcggtgctgcccttcccggatcgcttcccgatggagatccagccgctgtgcagcacggcgggcttggcctcggcgcccttgaggtcgagcgcgatcgtagccttcccaagcagccgcccggagctgacgccgcaggcactccccttccggccagcgtagaccgacaccttcaggctggcctccccgcgcgacgagaagagcgacggcttcccgttgaaccactccaggtcagccttggacagatggaacgcggcggcgagggccccggacgccggcgtctgctccccgccgtcggagaccacgagcggcgccgggacgctctggaccggcatcttccccagccggatcttgcagtagcacggcgacgtggacgggtggacgcccgcgccagcaccggcggccggcggcgccaccggcattctgagcgcgaggttgccgaccagcacccgcacgaacgggcacgggtccatggcgcgcttcctctgctgctcccgtcacacctccactcccctcccacactgaaaatccgcgcgaaactcgacctggtctgctgagattggaggcgatgcgggcaatgcggagcgagcgagggcgatgcgtgacgacggagataaggaggggacgagttggtataagaatcgggtgaggaacgagaacgacggagccgtggaattggaggagccaggctggatcctggtgtgccgtggctgtgagacaccaatcccgcacccacttgcgcggttgcgccttggctcgggtatcccgtcactcgcccgcgggcccgggttccgaggcccggatgtcagtgacggcgcgtgggcttcatgttaggcgcggtggtggccgtggcccgtggggacgcgagctggagccgagacggatccgaacgggttcggcgcgggcgcgctgcgctgtgggctgtggccagggcgtggcgtcgggtctgggttgttcgcttcgtatggatctagcctaagacgtctccaatgtatcgtcatgtaactaaaatctaaatataaacagtttagcacttcactttcct

SEQ ID NO: 90757 - DNA, 528 bp, Zea Mays
cggccctctctctcttccaccagcagcagggcgccgccaccgccgccgcctcgcgggtgcgcaagccgctgccacgcgggcgcacaggcaggccacagcgcggcctcgcgcggtgctcgagcctgagcagccgagcgcttcggccccggcgacgggccagacccggccatggcgcggtctcattgcggctggcgcagcccccagccccggctcgccagcgggtggcccggccaggagcggcgggcgcggcctccttccccggcctcggccaggcgcgcgcgggccctagccccgactcgccggtggtcggcccgaccaggagcggtcacggtctcgcccctggcggctccggcggtgcaggcagccaggcgggtgcgtggcacccagcctcggcaccggaggcgacgcggcccccagcctcggcggcgggcgcggtgaggcagccccgacggcggtccgggctcggctgcacggggcacagccccctggcagcgcaggcgcgcgggcaccggcctaggccccgatctg

SEQ ID NO: 90758 - DNA, 1131 bp, Zea Mays
tgacagaactgttgtctttattacagagttacttgcttatatacaagtggatacagagtctcccaaggggtgtgtcccttgggggaaaagtgtcaggggagggggttgatcacatgttatacatattttgtaacatgaagaatccaatgcgctatagcgtggcagctcagctggtgccctcatccactaaaccaacctttctttaaatactggagctaatccagggtgtccgagggccggatccgtcatgtgacagccacagagggccggattcgtcacgagacagagacgcacgggcgcggactcggctgactcagcgggagaacgccaccagcgggccactgcccactgctggagtggacgtgcagtgaacagcgcgcactgcatggcgatgactcatcgctgatctcgaaaacaaatgtatttttatctttgtactttgtactagtaccgagagaaaaagaaaaaggccgacgctgtgctgtccagcagccgcagctccgtccacggcgggcctgcacgtatggtatccgccacctcaattataaaaacacgccgcgttaattccattccccggctgccgttaactaatccggtccggtcagccagctcggcgtcgcccacagagaccagagcacccgcctgtggcccccacgaggcagcgaaggatgagaggcgtgcgctgttacgcgagagaggacggagcggagtgcgagtgtccatgtcctggactcctggtgtccgtccgtactccgtccaggctgggcacagctaatggggccgggcgggacgggacccacgtggctcgtactagtactgcagtgcaagttgtgcgccatcgcccaccggctcggattccagccacagccagagcaggtccctcccaatcgcggcgattagacggatcgcgccgggctggctggcgcgcgcacgtgccctgccgctgcgctggagcaggcgagcggcagtggtgtgccaggcaggcagagcagaggcaggccagggccagccgagccgagccgtgcaggcgcagcaaagcgctccagctgtgccgggcgcctggcctggccgcatctatctgcctgcgagtcgctgcgtctgcgtgcgaacggagaagcttctttcttttca

SEQ ID NO: 90759 - DNA, 364 bp, Zea Mays
gtttgaaaatgcataaatcacgatggtgtcataggacacttgttttgttcacagtatatcaaaatataaagtacaacgatattttgccaatattgttgcaatcatacacgatttttttgacatgacaaaaaacgaggagctagccaagtctttggtacttcagacacttggaaccattagcctttagcttggtcgtggtccgaaatggaagcatcgctgctcggctcttgtcaaaacatgtctgtgtaagcctcttgcagaaaccagagcacaaatgtttcctttactacctaaaaaggcctattactgaaaggatcatcatgaacacaatgaaacaggcgacaccaatagagattctggctac

SEQ ID NO: 90760 - DNA, 234 bp, Zea Mays
tttctcgggccttttggctaagatcaagtgtagtatctgttcttatcaatttaatatatgatatgtaggccatgtgtccactttgatattaaattatttttttgtggggaagggtccactacactggcttgccattggggcccttatgtgtcgctcgggcgttgcactattgattgagcctggcgcaccctaaccaaatcaaagaaaaaactattaataaagtgaaacattata

SEQ ID NO: 90761 - DNA, 222 bp, Zea Mays
aatatctttctcgaccttttggctaagatcaagtgtagtatatgttcttatcagtttaatatatgatatgtaggccatgtgtctacttcaatattaaattattttgttgtggggaaggttccactacagtggcttgccattgaggcctttatgtgtcgctcgggcgttgcactattgcttcagcctggcgcaccctaacgaaatcaaagaaaaaactattaa

SEQ ID NO: 90762 - DNA, 390 bp, Zea Mays
atgtccgcatacaggacccgcaccgactccgatggacccgcccctttcctcgtcgtcgcgccgcaaccagactccaaaccacctccacctatctactcggcaacttcgcagcaaccgcggacaacgaccaacgacgaggaacagtcagatacgggaagccgtggatcactccacatatggggcggggaaaggactcacgagcgaagggagagcagatggggagcatcgttggatcgtgtggggtggacaccatacatgacatcttcaaacaaaattgagtttgcgaggcttaacttcccgtgctcgggctcgagtctgactgtcccaccagagcctgaaggcaaaacgagtcaccgatgtcctggaccagctgatccagcgtcgggttaa

SEQ ID NO: 90763 - DNA, 312 bp, Zea Mays
atgggccgtgacgctgtccgcagtccgggctggcctcgggaatcccgggtcaggcgtgcacggcggcccaactgccggatgggttcatccttcgtgccggtggccgtggatgtcaccgtaccgcacgagcgcgaccttgcccgcgacgtcgaccccgcgggaggcgaggttcttgacaaataccagcttcatgaagctgtccaggagaaagaacgaggagtagagtcgcttggtaggactccttgctacaaagtttccctagagggtgaaacatcgtgggatgcaggccccaaggaacaacagatattttga

SEQ ID NO: 90764 - DNA, 4023 bp, Zea Mays
ctccacccttcctcagttcctctctcgtctctcatctcatccactcccgtcccagaatctccgtacacgcttcctcctcgccgtcgtgccaccccaccaaaccacgcctgaactgccatttcccccgttttttcccctctcgcgcaaggcgtaaccggtgcgtcgtggggggtagtttcggccgagggaagcgcggcgcgggaccgggcgcgtttcagaattcagaccggccggccggccgcggggagggcgccgcgagatcgcattgtggcggacgcggccgggtcaccgcggcattccgctccgggggtgtccgtggctgctcgaggcttttgcttgtttgtctcttacctcttgcgttgcgtcgggcggcggggctcgaggttggtggccggccaggcgcagcgtctccttttcgcggtcgcctttccggagcggctgccgccgctgctggtgcctggtggggacgcgcttcgcctttccgccgcctcggcgtggcgtgattccgaagcgttgccggggttgtactggttgctggtagatagaaaaacaccgcatcttttttggagggctcgtctcggctggcacgaaggttcctcgcggacaatgccgagcatccgagctccggcgtccaagcagacggccacgctacaggtggctgtcaagtgcaggccattgaccgacaccgagcagcggcgttcgcggcatattatacaggtcattgatgacaagactgtggtcgtgctggaccctgatctgtcaaaggattatctggacctcatccagaaccggaccaaggaaaggagctataccttcgatcatgtgtacgcgcctgggtgctccaattcggacgtgtataagaatatatcctctacaattgctggtgtagtccaaggccttaacgcgacagtctttgcttatggttctactggaagtggcaaaacttacactatggttggaacccatagcgatcctggtctgatggttcttagcttccgtacaatttttgagctgataaaaaaggacgacagtaaggatacgtttgaagtttcatgttcatatctggaagtgtacaatgaggttatctatgatttgcttgagagatcctctggacacctggagcttcgagaagatcctgagcatggcataatagttgctggattgagaagcattaaggttcattccgcagataggattcttgagctgttgaacataggcaacagtaggcgcaagacagagagtacagaagcaaatgctacttcttcacggtcacatgctgtacttgagattaccgtaaagcgaaagcagaaaggccaatatggtaaccaagttcttcgtggaaagcttgccttggttgatcttgcgggcagtgagagggcctctgaaacaaacaacttcggtcaaaagcttagagatggagccaacatcaaccgatcactcctagcattagcaaactgcatcaatgccctaggcaagcaaaataagaaaggtcttgcctatgttccctatcgcaacagtaaattaactcgtattcttaaggatgggctctctggcaattctcgaaccgttatggttgctacaatatcaccagctgatgatcagtatcatcacacaacgaatacactcaagtacgcagaccgtgctaaagagataaaaacacatgtccataaaaatattggaacacttgacactcatgttgaagactatcagaggatgatcgacaatcttcaggttgaggtttctcagttgaaaaaggaattagctgagaaggagcatcagttaagtgtaaagcctactgaaaaaactgcagatagtgagctatcttggttaaatgtcttgagccaggaaactggtgagaatgttcaagaacgcataaatcttcagaaggctctgtttgaactcgaagaaaccaataagcgaaaccgcatggaactccagcatcttgatgattctattgcaaggcatcaggtgaaagaaatggactctaccattctccaagctttaacatcaaggagacaagttattcttgacaacatccgtgataatgacgaagctggttctggatatagaaaggacatcgaaatgaatgagagtcgcaggcgacaactccaggatatgattgaagaggccatcagtaacaatggcaataaaacctacctgcacattctcagccagtacagactacttggaatgactaacgctgagcttcaaattgagatggctatgcgggatcaagttatacataatcagagggaagctctaaggagcctgtggaacattctctatggaacagggctaaaccagaagcagattcttaaattggctgcaaagcaagggttaaccgtagaaggctgtcctttgcctagctcaagcccagacgttaccacgccaccttcctgtcaacctcataggtttccatcgtttatgccatttcctggtccgcagtcagagccttattctccatctgcttgctttttccaacatggtttcagcactatgtctttgctgaaaaatcagcatgagacgcccacaatatgtaggcaggagcacctcagttcttactacatgatgtctggctgctcgccttactctggtgatggaaaacagtggtcaagtggaagacctacggcattcttttctactccagaaaaacctaaggaggctcagtcccaacacaacaaggaacattctggcagccatgatttcagtctgcacagaaaggatctgtggtccacggaaaggaaatgacgggcctcgagatccttctggtacttaaaaacacctgtgatggctacaatgcggcctgtctgatgttcctaacctcggtcgctgtgtgcaccatcttctgtctaccaccgacgttcccggggttcctgagatctgaagatatggtagtggtagatttcgcgggagctgttgccttgcccacgtccattttggttgatcctgctgggcgttgcccactccgtccaccatgtacagtagatgcaagtcctctcagtttttttgggggaaggggggtggatatctgatttctggaccaagaacagtgtaaatttgccgcggttctcgccctccttcagtaaatccaccggtaaagctttccggattggtcttcaaatcgggcgggtgacgacgatcaggatgggagttgggtgactgatgaacagtctaagggctacagtagcatgtggtaggaataggatctcatcagtcatctctctagatcattgaataagccctggtgaggctcacctgccctggagaccacattgaagcaggagcagcgctgggcatgatggtccctccctcacattcatgtttctgcgcaacagttgtgctgaatgctacgctggagcagccgaggccgcacggcacgcacatcgcagtcgcgttccacatgcccggcgcagccaaagggctggctggctggcttccgtctgacattccgttccggttcctatattgctacggtggattcatctttgtatatacatctgcgcggttgcccagctctggaggagtggccattgctactgtggcgtgacaatgggagtggcacctgcttcacatttgtatagaggagtggccatgcatggctgcctgtacacgtcaggtgagacgcaaggatctggcacgcaactagcctggtccattgcgttgcgtctggcgggcgtgccggtgcctgcgtcggcagcgagacgactttggtgggtgagggcgtcaggaacagaagaaggcgtgcaagccgtgacctacagacgacaggcctgcaactgcatacgggcctgggggcatgcagctgccaatgctttcctgccctgcactgccggagtctacaggactgcactgacacctcgtggggcaactcgcagcgcttttatctgttgctaatgctaatggcgcatcaagctgccattagagaattaaaagaggtcgtcgtttctacggtctcacgtgaaggtggtttcatgcgtacaacaataaggccaggccttgtgttttaagttgttcctaagattg

SEQ ID NO: 90765 - DNA, 3632 bp, Zea Mays
ctcccgtggacggcctagctcctgggaaactgcattctcgctgcttaactgctagcattgctcatcgtgtgcgcaattgtaatcgtgacgatgcattccgactgcaggtggctgtcaagtgcaggccattgaccgacaccgagcagcggcgttcgcggcatattatacaggtcattgatgacaagactgtggtcgtgctggaccctgatctgtcaaaggattatctggacctcatccagaaccggaccaaggaaaggagctataccttcgatcatgtgtacgcgcctgggtgctccaattcggcgtgtctcgtgctctggacagttgttgaaacaatactacggagtactgacatgtacaaactactggttgctggtactagcctactggctactaggggtatcccgtgcctgtacagttggagcaatactactggcatctaaagggccaatgagcaggacgtgtataagaatatatcctctacaattgctggtgtagtccaaggccttaacgcgacagtctttgcttatggttctactggaagtggcaaaacttacactatggttggaacccatagcgatcctggtctgatggttcttagcttccgtacaatttttgagctgataaaaaaggacgacagtaaggatacgtttgaagtttcatgttcatatctggaagtgtacaatgaggttatctatgatttgcttgagagatcctctggacacctggagcttcgagaagatcctgagcatggcataatagttgctggattgagaagcattaaggttcattccgcagataggattcttgagctgttgaacataggcaacagtaggcgcaagacagagagtacagaagcaaatgctacttcttcacggtcacatgctgtacttgagattaccgtaaagcgaaagcagaaaggccaatatggtaaccaagttcttcgtggaaagcttgccttggttgatcttgcgggcagtgagagggcctctgaaacaaacaacttcggtcaaaagcttagagatggagccaacatcaaccgatcactcctagcattagcaaactgcatcaatgccctaggcaagcaaaataagaaaggtcttgcctatgttccctatcgcaacagtaaattaactcgtattcttaaggatgggctctctggcaattctcgaaccgttatggttgctacaatatcaccagctgatgatcagtatcatcacacaacgaatacactcaagtacgcagaccgtgctaaagagataaaaacacatgtccataaaaatattggaacacttgacactcatgttgaagactatcagaggatgatcgacaatcttcaggttgaggtttctcagttgaaaaaggaattagctgagaaggagcatcagttaagtgtaaagcctactgaaaaaactgcagatagtgagctatcttggttaaatgtcttgagccaggaaactggtgagaatgttcaagaacgcataaatcttcagaaggctctgtttgaactcgaagaaaccaataagcgaaaccgcatggaactccagcatcttgatgattctattgcaaggcatcaggtgaaagaaatggactctaccattctccaagctttaacatcaaggagacaagttattcttgacaacatccgtgataatgacgaagctggttctggatatagaaaggacatcgaaatgaatgagagtcgcaggcgacaactccaggatatgattgaagaggccatcagtaacaatggcaataaaacctacctgcacattctcagccagtacagactacttggaatgactaacgctgagcttcaaattgagatggctatgcgggatcaagttatacataatcagagggaagctctaaggagcctgtggaacattctctatggaacagggctaaaccagaagcagattcttaaattggctgcaaagcaagggttaaccgtagaaggctgtcctttgcctagctcaagcccagacgttaccacgccaccttcctgtcaacctcataggtttccatcgtttatgccatttcctggtccgcagtcagagccttattctccatctgcttgctttttccaacatggtttcagcactatgtctttgctgaaaaatcagcatgagacgcccacaatatgtaggcaggagcacctcagttcttactacatgatgtctggctgctcgccttactctggtgatggaaaacagtggtcaagtggaagacctacggcattcttttctactccagaaaaacctaaggaggctcagtcccaacacaacaaggaacattctggcagccatgatttcagtctgcacagaaaggatctgtggtccacggaaaggaaatgacgggcctcgagatccttctggtacttaaaaacacctgtgatggctacaatgcggcctgtctgatgttcctaacctcggtcgctgtgtgcaccatcttctgtctaccaccgacgttcccggggttcctgagatctgaagatatggtagtggtagatttcgcgggagctgttgccttgcccacgtccattttggttgatcctgctgggcgttgcccactccgtccaccatgtacagtagatgcaagtcctctcagtttttttgggggaaggggggtggatatctgatttctggaccaagaacagtgtaaatttgccgcggttctcgccctccttcagtaaatccaccggtaaagctttccggattggtcttcaaatcgggcgggtgacgacgatcaggatgggagttgggtgactgatgaacagtctaagggctacagtagcatgtggtaggaataggatctcatcagtcatctctctagatcattgaataagccctggtgaggctcacctgccctggagaccacattgaagcaggagcagcgctgggcatgatggtccctccctcacattcatgtttctgcgcaacagttgtgctgaatgctacgctggagcagccgaggccgcacggcacgcacatcgcagtcgcgttccacatgcccggcgcagccaaagggctggctggctggcttccgtctgacattccgttccggttcctatattgctacggtggattcatctttgtatatacatctgcgcggttgcccagctctggaggagtggccattgctactgtggcgtgacaatgggagtggcacctgcttcacatttgtatagaggagtggccatgcatggctgcctgtacacgtcaggtgagacgcaaggatctggcacgcaactagcctggtccattgcgttgcgtctggcgggcgtgccggtgcctgcgtcggcagcgagacgactttggtgggtgagggcgtcaggaacagaagaaggcgtgcaagccgtgacctacagacgacaggcctgcaactgcatacgggcctgggggcatgcagctgccaatgctttcctgccctgcactgccggagtctacaggactgcactgacacctcgtggggcaactcgcagcgcttttatctgttgctaatgctaatggcgcatcaagctgccattagagaattaaaagaggtcgtcgtttctacggtctcacgtgaaggtggtttcatgcgtacaacaataaggccaggccttgtgttttaagttgttcctaagattg

SEQ ID NO: 90766 - DNA, 3880 bp, Zea Mays
gttgttagccaaaagtcaaaattgcccatgtccatccatccgctcgataagatcacgttataaaagcagcccaatcccccagaaacccacacaccgccccaaaagaataaaaaaaatcattttgctcttttgattgattgatatgctatagctggagttcaaaccaacaggccacaggctacaggccacagctagcacacccttctcgccacgctcttgtccgcactctactcgccgagagtgtgagtcgagacgcctctctcgccctctcttctcctccctccactccgccgccgcgcccgagaaaagagagttccaatgcgcctcctcccgctgctcctgctcctgtccctcgccgctgtcgcggccggcacggacgcggacgcggacgcgctgctggccgcgaaggccgcgctctccgaccccactggggcgctcgcgtcctgggacgcggcctcctccgaccattgcgcgtgggtgggggtcacctgcgcgccccgcggctccggcggaggcgtcgtcgtcgggctcgacgtctccgggctcaacctgtccggcgcgctcccgccggcgctgtcgcggctccgcggcctgcagcgcctctccgtcgccgccaacggcttctacgggcccatcccgccgtccctcgcgcgcctgcagctcctcgtccacctcaacctctccaacaacgccttcaacggctccttcccgcctgcgctcgcgcggctccgcgcactccgggtgctcgacctctacaacaacaacctcaccagcgccacgttgccgctcgaggtcacgcacatgcccatgctccgtcacctgcacctcggcggcaacttcttctccggggagataccgccggagtacggccggtggcctaggctgcagtaccttgcggtctccgggaacgagctctccggcaagataccgcccgagctggggaacctcaccagcctcagggagctctacattggctactacaacagttacaccggtggccttccgccggagctggggaacctgaccgagctcgtccgcctcgacgccgccaactgtgggctctccggcgaaatcccgccggagctcgggaggctgcagaatctggacacgctcttcttgcaggtgaatggcctcaccggcagcataccgtcggagctgggctacctcaggagcctcagttctttggacctgtcgaacaatgcgctcaccggtgagatacctgcgagtttctccgagctcaagaacctgacgctgcttaacctgttccggaacaagttgcgcggcgacatccccggcttcgtcggcgacctgcccagcctcgaggtgctgcagctgtgggagaataacttcaccggcggtgtgccacgccgcctcggccgcaacggccgcctccagctgctcgacctctcgtcgaacaagctcaccggcacgcttccgccggagctctgtgcggggggcaagctgcagacgctaatcgccctcggcaacttcttgttcggtgccatcccagactcactcggccagtgcaagtccttgagccgtgtccgtctcggggagaactacctgaatggctcaattccgaagggtctattcgaattgccgaagctgactcaagttgagttgcaagataacctcctcactggcaatttcccggctgtgatcggtgctgcggctcctaaccttggtgagattagcctgtccaacaaccagcttacgggtgcattgcctgcatctcttgggaacttctctggtgttcagaagttgctgcttgatcagaacgcgttctctggtgccatacctccggagattgggcggctgcagcagctctccaaggctgaccttagcagcaacaagtttgagggaggtgtgccaccggaggtcgggaaatgccggcttctcacttacttggacatgagccaaaacaacctctctgggaagatacctccggccatctctggaatgcgaatactgaactacctgaacctgtccaggaaccatcttgatggagagatacctccatccattgcaaccatgcagagcttgacggcggtggacttctcgtataacaacttgtctgggcttgtgccagggactggccagttcagctacttcaatgccacatcttttgttggcaatccaggcctgtgtggaccatacctcggtccatgtggtgcaggcataggtggcgccgaccactctgtccatggccatggctggttgaccaatacggtcaagctgctcattgtccttggcttgttgatctgctccattgcattcgctgtggcggcgattctgaaggctcggtcattgaagaaagctagtgaagctcgagtatggaaactcactgcattccagcgcctagacttcaccagcgatgatgtgctggattgcttgaaagaggagcacattattggcaaaggtggtgctgggattgtgtataagggggcgatgccgaatggtgaacttgtggctgtgaagagactcccagcaatgggccgtggctcatcacatgatcatgggttctcggcagagatacaaacacttggtagaattcgacaccgtcatattgtgcgcctgctaggcttctgctcaaacaatgagactaacctgttggtttatgagtatatgcccaatggcagccttggggagatgctccatggcaagaagggagggcacctccactgggatacccgatacagcattgctattgaggcagccaaggggctttgctacttgcaccatgactgttcacctttgatacttcaccgggatgtcaagtcaaataatatacttcttgactccaactttgaagctcatgtggccgactttgggctagcaaaattcttgcaggactcgggggcatctgaatgcatgtctgccatcgctggctcatatggctacatagcgccagaatacgcatacacattgaaggtggacgagaagagtgatgtctacagcttcggcgtggtgcttctggagcttgtcacaggaaggaagcccgtaggcgagttcggcgacggcgtcgacatcgtccagtgggcgaagatgacgacgaactcaaacaaggaacaagtgatgaaggtcctggacccaaggctctcgaccgtcccgctgcacgaggtgacgcacgtcttctacgtcgcgttgctgtgcaccgaggagcaaagcgtgcagcgcccgacgatgagggaggtggtgcagatcctgagcgagcttccaaaaccgccatctaccaagcagggagaggagaattctaccaagcaaggagaggaggttccgaattccggcgacggctctgcgcccagccctctacactcagcaccagttgggaccaacgaagcaccagccgtcgaagcgagagaccaccagcagcagacaagctctccgtcgtcgccaccgcctccagatctcatcagcatctgagtaaccggaatcgaaaacgttaccgttcctcgcaaaaatccccgcttcagtgtagcaagcttaggtcgtaattttaggtttgcaataagtttatttggcctcctgtgctgtacatatccgagtttgtttgttggttggttgtgtccggtctgtcatgtttcatttgctggtgcggtgtggtaggagtctgtagcgagttgagtttgagtgagccacgttgctagagcctttgatttcccttctctaatactagtgcactctctcttgtcaaatttggcgccagaatctttgttgtggaaccaaaaaccttaaagtgctttctacttctgtgtaaacggtgggagtgggccataggcccatagctaaaggcctcgaaatcaccagaccttaggctgtattggttggtcccaaagagaaagcctgcttgcaaggtgaattgattgattggtacacccta

SEQ ID NO: 90767 - DNA, 331 bp, Zea Mays
agtttgctcaactgccaaaacgaagagagaaaaaaaaactcgaactctcaattgaatcgcaaaaacaaatcctcagctgcaaagacggagcaaaagaacacgaagaccacgtgaaatgccccgaacagagaaaatttaaaaaccttcagcagaagtgaaaaaaattcttttgctttcattgagagtcgaactcaagacctcccgcttactaaacgggtgctctaaccaactgagctatgaaagcttttgtttaaaacaataaacttataaaatatatccaaatataaatacaaataaataaatacttcaagactatacaatttaaaaaaaa

SEQ ID NO: 90768 - DNA, 711 bp, Zea Mays
gaaacaagaatgtgaacattcacgaaatcagtgaagccctgagcacaatgtcctgtttcattgtatataaaataaaggtctgactgaaaacagctcagtgctccagtccagaaggaactttcccattaaagaaaactcggtgccacttttagcaaggtaatgaacataacagacagacggtgccgaggtaaaataacatggtacctggtatctaagttatgatatatcgtttatacttattcatcaggtagttgagcaaaatatggaaaatgggagaacacagtatatcaaccacaatgaaagacagattcagcgataaaggctctcagatctcaagttctcagcaatctcagtttcccagcggtcaccattctcgagcaatttctccttgtcgtacagtagttcctgcatcgaagcatcaaactcaaagttaggcccctcaacaatagcatcgactgggcaagcctcttggcagaacccacagtaaatgcatttggtcatgtcaatatcatacctgtgaggagataaaagcaacagaaattcagattaaagtttaattgcagaacacagtgggtaaatcatagttctattgacaaaaaagagagaaaaaccttcattttgattaccttgtggttcggcgactgccgtcttcacgttcttcagcctcaattgtaattgcctgagctgggcatatctggacatcgtttatac

SEQ ID NO: 90769 - DNA, 495 bp, Zea Mays
atggccacggttgccggagtgctggagctcgtgggggcaggggcgactccggtagcgctcgtgcaggggcggccgcggctccggtcggcggtcgcgctcggccgctcgagcaggccgcaagggcgcagggacgcagggcgcagaggcggctccggtagcgctcgcgcaggggaggtcgcggctccggtcgccggtcgcgctcggccgctcgcgcgggccgcactgccgcaggggcgcactgccgcactgccgcactcgtcggtcgcgctccggtcagcggtcggcggtcgcgctggagcctggctggccgccttggagatgggaatcgggatggagatgggagtcgccgagttgggatcgggacacagccacacgagacgggaaagacggcggccgccggctggtcacggactcacgggagtaggacgtagggtttcaggtttccatttggcaattagcatttggcaacagcaacaccgggcaacagcactttag

SEQ ID NO: 90770 - DNA, 943 bp, Zea Mays
aggcccacgcacagaggaagcgcaatcccaccccacccggcacccgttgaccgctgttcgcctagcaatgagcgccatccactcacccgccgcgccgccggcgaggccgcctttccggcgcagcacgacgggagtagcgtctcccctccgggaaccctcacagccgcaaccgacgccaccggcgcctccgagcctcacctcccgccgcgccggtctcgtcgcactcctcgtggcagcggtggcgccggaacgccctgccgccgccgccgccttctcgctcggcattcctgggcccaaggagctgctgcgggagcagaagaagaagtcggcgtccttcctcctcgcgcccatcgccgcctcccgggacaccctcgtcaaagcccacgcgcttctggcttcgccgagtgcgtctactgaggacgccgaggaggtgaaggggcggatccttgcggcaggaagggactgcgtgccgcggcagaggaactcgattgtcgcgctccagtcgcggactggcgttgaggtgtgcacattcagcttgatactgaagaacgccgcgtcgctgctcgccaataaggattccctcaaggttgaagctgatactaggctcgaggagctcataaagtcattctctgaactgggaactctggtggagaacagtaattttgagctcgcagatgataggcgagtaatgccagcacacatatttttatttatttaaatcctggatatgagaaacatgtgtgacctattaatattctggcctcttactagtagcaacttgatgtttcctgtgacagcattttatgtctatctttttatttatgtaatgttgtcatcttttttttatctccagttaggatatttaaaattttgtatacggacagccaattctttctcttgttgattttgtaaataaaggagttgtatatcttatatcatcatc

SEQ ID NO: 90771 - DNA, 951 bp, Zea Mays
aggcccacgcacagaggaagcgcaatcccaccccacccggcacccgttgaccgctgttcgcctagcaatgagcgccatccactcacccgccgcgccgccggcgaggccgcctttccggcgcagcacgacgggagtagcgtctcccctccgggaaccctcacagccgcaaccgacgccaccggcgcctccgagcctcacctcccgccgcgccggtctcgtcgcactcctcgtggcagcggtggcgccggaacgccctgccgccgccgccgccttctcgctcggcattcctgggcccaaggagctgctgcgggagcagaagaagaagtcggcgtccttcctcctcgcgcccatcgccgcctcccgggacaccctcgtcaaagcccacgcgcttctggcttcgccgagtgcgtctactgaggacgccgaggaggtgaaggggcggatccttgcggcaggaagggactgcgtgccgcggcagaggaactcgattgtcgcgctccagtcgcggactggcgttgaggtgtgcacattcagcttgatactgaagaacgccgcgtcgctgctcgccaataaggattccctcaaggttgaagctgatactaggctcgaggagctcataaagtcattctctgaactgggaactctggtggagaacagtaattttgagctcgcagatgatagagagaagataaaagatggcttactgagcagtgtctctgccctggacaaatttgagcagagtgttaaagactgtttaggtgtttagacttttttgtgccagatcggatcacattttttcaaagcattttaaattgacttacttattgtttttatttttcttctatcgttgaggtaaggtttcatttgcctttgctcattagggacttctgttgtacaaatgatctgttcatttgatctgatatatgatatttatggtacaagaatgcttgt

SEQ ID NO: 90772 - DNA, 1563 bp, Zea Mays
aggcccacgcacagaggaagcgcaatcccaccccacccggcacccgttgaccgctgttcgcctagcaatgagcgccatccactcacccgccgcgccgccggcgaggccgcctttccggcgcagcacgacgggagtagcgtctcccctccgggaaccctcacagccgcaaccgacgccaccggcgcctccgagcctcacctcccgccgcgccggtctcgtcgcactcctcgtggcagcggtggcgccggaacgccctgccgccgccgccgccttctcgctcggcattcctgggcccaaggagctgctgcgggagcagaagaagaagtcggcgtccttcctcctcgcgcccatcgccgcctcccgggacaccctcgtcaaagcccacgcgcttctgggtaactccatgtcctcgggagccctcgaccttgtctaatctggtcggatgtccaggaaacccttagcaaccgtggctgtgcgatgcaatgtagcttcgccgagtgcgtctactgaggacgccgaggaggtgaaggggcggatccttgcggcaggaagggactgcgtgccgcggcagaggaactcgattgtcgcgctccagtcgcggactggcgttgaggtgtgcacattcagcttgatactgaagaacgccgcgtcgctgctcgccaataaggattccctcaaggttgaagctgatactaggctcgaggagctcataaagtcattctctgaactgggaactctggtggagaacagtaattttgagctcgcagatgataggcgagtaatgccagcacacatatttttatttatttaaatcctggatatgagaaacatgtgtgacctattaatattctggcctcttactagtagcaacttgatgtttcctgtgacagcattttatgtctatctttttatttatgtaatgttgtcatcttttttttatctccagttaggatatttaaaattttgtatacggacagccaattctttctcttgttgattttgtaaataaaggagttgtatatcttatatcatcatctcaccataggagtttaaataaactgctgtaatattgtcggacctcatagtctggattgtcttctaacgtgaaatgaatggatctgtacaaattttattgaatgctctgtataagttcaaataaataagccttgtctttctatgatattgtttcaaaatatacgaatttagtaaatgctggcattgatcaattttgtcctgcagagagaagataaaagatggcttactgagcagtgtctctgccctggacaaatttgagcagagtgttaaagactgtttaggtgtttagacttttttgtgccagatcggatcacattttttcaaagcattttaaattgacttacttattgtttttatttttcttctatcgttgaggtaaggtttcatttgcctttgctcattagggacttctgttgtacaaatgatctgttcatttgatctgatatatgatatttatggtacaagaatgcttgtctgtaaacaaaaactagatttaaattgccagaagttcaaagcgtagtagctgtc

SEQ ID NO: 90773 - DNA, 2810 bp, Zea Mays
tagctccgctgtcccactcccgagtcccaagtcccaactgccagtgccacgctcggctctgctgcttctctcccagcctccacggctctgcctccgcctccagagtccacgccaaccactagcaccgacagccccgccccaccaacccaccggtccactgcccgccgccgcatgacggtggcccgcggtccgcccggccgcccctcttccgggctcctgggctgctggcgccgccgcccggcgctgggcttcggcgccaaggtcggcatcgccatcgcgcttggcctctccttcgccatcatctggacctcggtctccccgacttcctcctcccagcagatctctactgagcgctcatccttcgcagctgaagttgccgcaccgccaaccgcctcccacaatcgcgccgccgccggcggcgacagcggcagcggcgggcacgctcaccggaagccccgtcccgtcccgcacagccacaagaagcgccaccctgctccttctggatcccattcccatccccacccctccaatgtcacctcctcgccggataccaccgcagcaaaggacgatcactccgagccggctctggtaactgacccggaaccaaaggaggaacaggagccagacatggagatggaaccggaacaggaagcggaactgcccatgcccgagcagggcggggacaattcggggaaggcccctgcggaggaggatgaggagaagccgccgcagctggaattggaagacgagcccaatgaggttgacggcgaggaagatgatcccgaggcggcgaagaggaaggctccaagtaagaagaggaagctcccgcctctgtttagcccgggtgcacgttaccactggaagctttgcggcgccaatagcggctaccactatatcccctgtgtggatttcgatggggatgggaggcagaggcaccatgaacgcagctgccaaaggtctcctgtgacatgtttggtgtcactccccaaggaatataaacaacctgctccatggcccgagaggaaggacaaggtttggtatgggaatgttgggcatcctaggttgtcaaattatgttaagggccacaattggctgaaccacagtggcgagtacttgatgttcccaccagatgaatgggagttcaaaggtagcgcaagacattatgttgaatcaattgacgagatggctcctgacatcgactggggtaaaaatatacgcataatattggatgtcggatgcaaaagcgctggctttggtattgctctactcgagaaagatgtgataacactatctttaggccttacaaatgaccaaacagaccttgcgcaagttgcccttgaacgtggcatccctgcaacagttggcagtctgggatcgcgaagattacccttccctagtggtgcatttgatgctattcactgtggtgaatgcaatataccatggcattctaatggtggaaaacttctcctagagataaatagaattcttcgtccaggaggatacttcatcatctcaagcagaagtgctgacctggagagtgaagaaggaatatcagcttcaatgaccgcactttgttggaatgcaatagcttacaatagtgacgatgtcagcgaggctggagtaaagatatttcagcgaccagtctcaaatgaggtatatgatctgagagcaaaaaaggatcctccattttgcaaggaagagcagaacaaagctagtgcatggtatactaatatcaaacattgcctgcacaaagcacctgttggtatcgaagaaagaggcagtgactggcctgaggagtggcccaagaggctcgagagtttccctgagtggcttggggaaacagaaacaagggtggcttctgatcataaccattggaaggctgttgttgagaaatcttatctggatggattgggcattgactggtcaaatatccgtaacataatggatatgagggctgtatatggaggatttgcagctgcactggcatctaaaaaggtttgggtcatgaatgttgttcctgtgcatgctgcagacaccctacccataatctacgagcgtggcctgatcggtgtgtatcatgattggtgtgaaccatttagtacatatccaaggtcctatgatcttttacatgctgaccatttattctcacgcctgaagatcagatgtaagcaacctgtctcaattgttgttgagatggaccgtattttgaggcctggaggttgggctatcatccgtgataaactcgagatccttgacccattggagacaatcttgaaatcactgcattgggaaattgtcatgaccttcagaaaggacaaggagggtatcatgtctgtaaagaaaacaacatggcgtccataaactgagctcagattcacaaggctccagcataccattttttgcactatactgctgtcgatttccccggattgtgagacagccattttgtgaatctggggtagatgtacaatatttgttcattcatctcatgacaatatgctcgccgcatctctgtcgggtagtttaagcccagttggatggttggttgtggttagcgttacattgatcaattctttgaagcagcatccaagacgaccagctctagtttcagaaaaagagggcccttcgattccataaacagggttgtacgagatacaagattgtttcttgttgtttaaaaatgtaacaatatagatatatgtaaaggttgtcactgaattaactgcttggtgatgttgtaagttgcaacaatccgtgaagattcaatgcatgaattttcttattgcaaattgtgagcaaacagcaaaaga

SEQ ID NO: 90774 - DNA, 2306 bp, Zea Mays
ctcgcacgcaccaccccggtccgccgcgatgcctcccttcccggcggcgaccaccacctcccacctcgccctcctcgtgctcttctcatcttcctcccttttcttcctctacaaatccctccgcctccgccgcaaaccgtcccccgcccgcactgccactcctacccttctcttcgcctctgtaaccggcacctccaaaaccctcgctgcgcgtctctccgcccgactgaccgccgatgccggtttccccgtccgcgccaccgacgctgccaccttcgaccccgacgaccttccttcagtccatctcctcctgctcgtaatccccacccacgacggcggtgcgacgcccccttctgcggccttcctttcgcgctggcttgaggagtccgccgctgacttccgcgcgggtgcactcctcctttccggtctccgcttcgccgtcttcggggttggttcccgggcctatggggagaccttcaacgctgccgcgaggaacttctcgcggtggttgcgcgcgctcggcgccgttgaagtggttcctctcggggagggcgacatcgatagcggggatctcgaagcggtgttcgaggagtggaataggagggtgctgagggtggtgaagggcgaggaggttggttatggggctaatgaaaaaaacaatggtcttgacgagttggagttggaaggggaggattgggatgacgacgatgaggagatggtggatgcggaggttgacatggaagatattgctgggaaagcaccggcgaggaggaagaacgggaatttggagggtgttctagctaatggagtgcataacggtgtaaaggacatggtcacaccaatcattaggacgagtttggagaagcaaggttacaaaattattggttctcatagcggagtgaagatttgcagatggactaagtcgcagctgcgaggtcgtggagggtgttataagcactcattttacggcatagaaagtcacagatgcatggaagcaactccaagtttggcttgtgcaaataaatgtgtattttgttggagacatcacacaaatcctgttggaaagagctggaaatggaagatggatgaccctcttgacattgtgaatgctgcaattgaccagcatactaagatggttaagcaaatgaagggcgtaccaggagtaaagccagaaaaacttgacgaaggtctgtcacctagacattgtgcgttatctctggttggtgaaccaattatgtaccctgagataaatgctcttgtggatgagctacaccgaagacacatatctacgtttctggttacaaatgctcaatttcctgaaaagattaaggcattaaaaccaatcactcagctgtatgtcagtgtggatgcagctacaaaggagagcttgaaggctgttgataggccactattttcagacttctgggagcgtttcctggattcactcaagtcactgcatgaaaaagatcaaagaacggtttaccgactaacactggttaaaggctggaatgcagaagagatagatgcatatgcgaaactgctagatcttggccagcccgatttcattgaaatcaagggtgtaacatactgtggctcgtcagcaacttcaaagttgactatggaaaatgtaccttggcactctgatgtaaaggaattctccgaggtgttggcatcgaaaagcggtggtgtatacgaagtagcgtgtgagcatgctcattcatgttgtgtcctacttgcaaaggtagataaattcaagatcaacggcaaatggcatacctggatagattatgaccgtttccatgaactggtgacatctggaaagcctttcaatagccgagattacatggccatgacgccctcatgggctgtctatggtgcagaggaaggtggattcgatccggatcaatctcgtttcaagaaggaaaggcgccatggaactgctgccctcagaagttgaagttgatcttattgagaagacatggacctgctactcccgaacactgacctatgttactgctttttagaggcaaaaactttggaagcaaggatttttgaaatgttagcttccaagccatacattttctgtttgtcgtgtgaatcagtttccgaaagttcattttttgatagtttttattggaacatgtattttgttctcttgaatcctctgatgtagtgacggggcgagtttacgactgaaattctggggacctgcgcacgaaatatgtagcataacaagtacaccctccgttgtcttgaagagtgttagggcatctcgttaactcgctcgactcgattcaatagtgact

SEQ ID NO: 90775 - DNA, 1095 bp, Zea Mays
aaccttttcactgatccagcgaaggcatactgccgccgccgtttctgcatctcccatcttcgcaacgccggcgctccatcttgcgctccctccctcactcgctctcggtacgcaggcggcggcggcggcggcggtggcggctctcagattcgggctctcagcgacggcgtcagcagcttccactcccgcctctcgccagttgcctcgcgccctcgcctccggtcctccgcacaccgccggttacccttctaaaacacctcatccccaaatgaagcacatattcaagattgctgcaatactggtagcaatctctgctatctggattgctctccttgaaacctccactgttcctcgaagttatacttggctggtcagtgtcactgatttttgctagtaaatatcttaaaaaatagtgtgaagtagtagttcgtttatgaattggttatttctgtttcagcttcccatctacttggtagtggctcttggatgctatggcctttttatggttggatttggacttatgttcttcccaacttgtcctcgagaagctgtactactgcaacaggttagctattttaatgtgaggctaaactgcagaaccctcgaaacttcttgagctgtatttgcagtacatctcatggatcatacagatcatgacaaagaaatcaatgccaaatgatattctttttttttgggggctgtttgagtatgatcataccctggtttattctcatttgtccaagattggcgtattatgcaggatattgtggaggcaaaggaattcttaggaaagaggggtgttgatgtgggctctgagtgagatcaattttaagtggttgacatacatgtctgttttgaaggatcaccattctgttccttggaataggttgcttttttgggtactgtagataggaaacatataattccactatgttcagctattactaacacggtttttgtgagttggcatgttatagttctgcttttgtcaatgatggggctcacattgacttgccggtgtttttcaagttttaaagactgaactgttctaggaatatttggtttctatcttgatttcccgtcagtggaccattt

SEQ ID NO: 90776 - DNA, 955 bp, Zea Mays
aaccttttcactgatccagcgaaggcatactgccgccgccgtttctgcatctcccatcttcgcaacgccggcgctccatcttgcgctccctccctcactcgctctcggtacgcaggcggcggcggcggcggcggtggcggctctcagattcgggctctcagcgacggcgtcagcagcttccactcccgcctctcgccagttgcctcgcgccctcgcctccggtcctccgcacaccgccggttacccttctaaaacacctcatccccaaatgaagcacatattcaagattgctgcaatactggtagcaatctctgctatctggattgctctccttgaaacctccactgttcctcgaagttatacttggctgcttcccatctacttggtagtggctcttggatgctatggcctttttatggttggatttggacttatgttcttcccaacttgtcctcgagaagctgtactactgcaacaggatattgtggaggcaaaggaattcttaggaaagaggggtgttgatgtgggctctgagtgagatcaattttaagtggttgacatacatgtctgttttgaaggatcaccattctgttccttggaataggttgcttttttgggtactgtagataggaaacatataattccactatgttcagctattactaacacggtttttgtgagttggcatgttatagttctgcttttgtcaatgatggggctcacattgacttgccggtgtttttcaagttttaaagactgaactgttctaggaatatttggtttctatcttgatttcccgtcagtggaccatttaccaattctgctgttcagtatgtcaccttatgcgttatgacatcacttgtactcgcaagtcccttcgaggattcagtgtttgaatttctctgcagtacttgcaaagtttctttcattcaatatggcatgttacaaactacag

SEQ ID NO: 90777 - DNA, 1484 bp, Zea Mays
gccgccgtttctgcatctcccatcttcgcaacgccggcgctccatcttgcgctccctccctcactcgctctcggtacgcaggcggcggcggcggcggcggtggcggctctcagattcgggctctcagcgacggcgtcagcagcttccactcccgcctctcgccagttgcctcgcgccctcgcctccggtcctccgcacaccgccggttacccttcgtgcgtgcctctctctctctcctcccgcctccggtggatcgtcaacggcgcccagccccggcggctgcgccgcgcgcggcctgagggcagcgggagccagcaaccgctgccccaccaaggcggtcgcgccgctttgggagcgcatatgccccaaagcgaaagcaaaacgttacccgttcgcttagcgcttcagcgtgcgcttaccgccgcttgttgaaccctgctcattctcaaaggtctatacagtttgcccagcaatcaatctagagtacctgtgttcaaccaaacccaccagcagcagcatgaagatggcccaaaatcaacctttataacggcttatatgttaggatctatgttttggagaaatttgcaatttcgccacctagagtgttgctctcttgctattatgccatgccacctgtgtctatgatctgtggacctgtctgtctatgatttgtggatccgatggcaaattagcgatgcccagcgttttgagtggaaaaattgcaaatgcctctatgttttgcttttcatcttgttattttttttcttttttatgacagtaaaacacctcatccccaaatgaagcacatattcaagattgctgcaatactggtagcaatctctgctatctggattgctctccttgaaacctccactgttcctcgaagttatacttggctgcttcccatctacttggtagtggctcttggatgctatggcctttttatggttggatttggacttatgttcttcccaacttgtcctcgagaagctgtactactgcaacaggatattgtggaggcaaaggaattcttaggaaagaggggtgttgatgtgggctctgagtgagatcaattttaagtggttgacatacatgtctgttttgaaggatcaccattctgttccttggaataggttgcttttttgggtactgtagataggaaacatataattccactatgttcagctattactaacacggtttttgtgagttggcatgttatagttctgcttttgtcaatgatggggctcacattgacttgccggtgtttttcaagttttaaagactgaactgttctaggaatatttggtttctatcttgatttcccgtcagtggaccatttaccaattctgctgttcagtatgtcaccttatgcgttatgacatcacttgtactcgcaagtcccttcgaggattcagtgtttgaatttctctgcagtacttgcaaagtttctttcattcaatatggcatgttacaaactacag

SEQ ID NO: 90778 - DNA, 2474 bp, Zea Mays
gccggtcgccgcaactcgggaaagtgcaccaatgattgagacccgactcgtcgtcgtcggtcctctccccacattccttagctctgccctccgcccctcccaaatccattcactaccgccggcgccggatccaataggaggaggaggaagatgactgtgggcatgatcaacgcaaacccggtggtgcacgagcggccggagcgcgcctcgcacccccacgccgccgatgtgctcgaccctctcgatgtctttgatacggtgcgggacatcaaggacccggagcacccgtactccctggagcagctcagcgtgctgtcggaggagtccgtctccgttgacgagacgctcggacgcatccagataaccttcactccaactgtgcagcactgcagtatggccacagtcattggcctgtgcctccgacttaagttgatgcagaacttccctccacatttcaaggttgacatcaaagttgctccaggatctcttgctaatgaagaatcaggtgtgtacagtgacaagtttctaaggctaatatctaagaagtaatattatgtggcgcagacactattcagaagcccacataattactttcatataatattgttttctttttcagaaatctgcttttgatgtatcaaaatatgatatctgctctttgttcctaaacttggaagccaaactaagcattagagcatctccaaaagttcccaaaaattcttcccagaaccattgtgtttccaagtcgccaaaaagtattggggcaccaaagcagagtttctcgaacagttttaaaaaacactcctaaaatagcaaaaacttggaacatggtaggcggcagtggcagccacgggtcttgggtacatttcgatcacaacgtccatggtgccattgggcgccaggagcagccccgacgagcctgaaggagatgtacaccaccgacttggccggcttggtgtccagccaactgaggtaggagtacctgctcttgtcgtggtcaaagacattgcaaggaggtggggcgcacctgccatcatccgcctcatgctggaacgacagcatgtgcccaaagacaaagatgtccatgtgtggcctcagcgacgcgagagcgttggcctccatggcatcacagatgttggcgaggacgtatgtcgggggctttgaggagccatcatctcgtttgagcgcgtcgacgagctcgtgaaactccggtagcacgaacgcaaatgggttgtcctcggaggtgacggcgaggaatgacggcaggtcgtggacgtggagcgacaggatgctcgggagctgcatctcggtgatgcagttctccggacaccacgacggccacgatggcattccggtggccgcgggagtagtggatacgggtgaccacgagtgcgtatttttccacacgggaggctcggttttttagtgttgggagctatggctgggagtcgttggagatgtgtttttttcaatcttgcctaaaatcctagatttttagtgttttgagaactcttggagatactgttatttggtagacatattcgaaagaatatcgatgacacctttaagagatgatatgttgcagcttaccaatagggatgccattctatccagactaacttgtaacttgtaggctctatttttaataatgtaccagattgagatatgagtagaattatagcatgtcagcgcatatttttctttgtgtttacacaagaatacattgttgaattttttttcaaaacatgttacaagaatacactagacttttccatcggcagaatattgacatcacataatacaaattgcaactatggcatttcaaatttgtcgtatgacagttggttgatgaaatgacagtaaacaagcaactgaacgacaaggagagggttgcagcagccttggagaaccccaacctacgccagctggtcgatgaatgcttatgcttcaatgatccatactcacgttaacttgttccatgctgcttcacaagtcgcaaccctgcctgctgtacagtagtaaccatgcatgctgtagtctgccctatatgttgacgctgtcgttgtacctggcaacgtgtaattaactgccccggagacatctgtttttgccatctttaaaacgtatggatctcaataatatgacaagagttgcctgcttatgtgacattagcatccaaaagcaagtgtcatttaatgtaaaatcttggtctttgttggtcatctgtatcggacgtcaattctgatcttgatatgttcggttctggaagtgagaacctgtcgttatgctgtattaatgttggccatctactcatctgctctatcagtcgaccccatcttctgggtgaactcacggtcccaagaagaccaaccttgtggtgctctctgtagcctccaaagtacatagtcggcaagcgatcgtgttgatgtttgccagtccaatagataacctgtgctcctgagtcaaaaaaaaaa

SEQ ID NO: 90779 - DNA, 1146 bp, Zea Mays
gccggtcgccgcaactcgggaaagtgcaccaatgattgagacccgactcgtcgtcgtcggtcctctccccacattccttagctctgccctccgcccctcccaaatccattcactaccgccggcgccggatccaataggaggaggaggaagatgactgtgggcatgatcaacgcaaacccggtggtgcacgagcggccggagcgcgcctcgcacccccacgccgccgatgtgctcgaccctctcgatgtctttggcgggctttcgtggtgcggtgcgtcagatacggtgcgggacatcaaggacccggagcacccgtactccctggagcagctcagcgtgctgtcggaggagtccgtctccgttgacgagacgctcggacgcatccagataaccttcactccaactgtgcagcactgcagtatggccacagtcattggcctgtgcctccgacttaagttgatgcagaacttccctccacatttcaaggttgacatcaaagttgctccaggatctcttgctaatgaagaatcagtaaacaagcaactgaacgacaaggagagggttgcagcagccttggagaaccccaacctacgccagctggtcgatgaatgcttatgcttcaatgatccatactcacgttaacttgttccatgctgcttcacaagtcgcaaccctgcctgctgtacagtagtaaccatgcatgctgtagtctgccctatatgttgacgctgtcgttgtacctggcaacgtgtaattaactgccccggagacatctgtttttgccatctttaaaacgtatggatctcaataatatgacaagagttgcctgcttatgtgacattagcatccaaaagcaagtgtcatttaatgtaaaatcttggtctttgttggtcatctgtatcggacgtcaattctgatcttgatatgttcggttctggaagtgagaacctgtcgttatgctgtattaatgttggccatctactcatctgctctatcagtcgaccccatcttctgggtgaactcacggtcccaagaagaccaaccttgtggtgctctctgtagcctccaaagtacatagtcggcaagcgatcgtgttgatgtttgccagtccaatagataacctgtgctcctgagtcaaaaaaaaaa

SEQ ID NO: 90780 - DNA, 1143 bp, Zea Mays
gccggtcgccgcaactcgggaaagtgcaccaatgattgagacccgactcgtcgtcgtcggtcctctccccacattccttagctctgccctccgcccctcccaaatccattcactaccgccggcgccggatccaataggaggaggaggaagatgactgtgggcatgatcaacgcaaacccggtggtgcacgagcggccggagcgcgcctcgcacccccacgccgccgatgtgctcgaccctctcgatgtctttggtagagtacttcagtcctctcctcatacggtgcgggacatcaaggacccggagcacccgtactccctggagcagctcagcgtgctgtcggaggagtccgtctccgttgacgagacgctcggacgcatccagataaccttcactccaactgtgcagcactgcagtatggccacagtcattggcctgtgcctccgacttaagttgatgcagaacttccctccacatttcaaggttgacatcaaagttgctccaggatctcttgctaatgaagaatcagtaaacaagcaactgaacgacaaggagagggttgcagcagccttggagaaccccaacctacgccagctggtcgatgaatgcttatgcttcaatgatccatactcacgttaacttgttccatgctgcttcacaagtcgcaaccctgcctgctgtacagtagtaaccatgcatgctgtagtctgccctatatgttgacgctgtcgttgtacctggcaacgtgtaattaactgccccggagacatctgtttttgccatctttaaaacgtatggatctcaataatatgacaagagttgcctgcttatgtgacattagcatccaaaagcaagtgtcatttaatgtaaaatcttggtctttgttggtcatctgtatcggacgtcaattctgatcttgatatgttcggttctggaagtgagaacctgtcgttatgctgtattaatgttggccatctactcatctgctctatcagtcgaccccatcttctgggtgaactcacggtcccaagaagaccaaccttgtggtgctctctgtagcctccaaagtacatagtcggcaagcgatcgtgttgatgtttgccagtccaatagataacctgtgctcctgagtcaaaaaaaaaa

SEQ ID NO: 90781 - DNA, 1119 bp, Zea Mays
gccggtcgccgcaactcgggaaagtgcaccaatgattgagacccgactcgtcgtcgtcggtcctctccccacattccttagctctgccctccgcccctcccaaatccattcactaccgccggcgccggatccaataggaggaggaggaagatgactgtgggcatgatcaacgcaaacccggtggtgcacgagcggccggagcgcgcctcgcacccccacgccgccgatgtgctcgaccctctcgatgtctttgatacggtgcgggacatcaaggacccggagcacccgtactccctggagcagctcagcgtgctgtcggaggagtccgtctccgttgacgagacgctcggacgcatccagataaccttcactccaactgtgcagcactgcagtatggccacagtcattggcctgtgcctccgacttaagttgatgcagaacttccctccacatttcaaggttgacatcaaagttgctccaggatctcttgctaatgaagaatcagtaaacaagcaactgaacgacaaggagagggttgcagcagccttggagaaccccaacctacgccagctggtcgatgaatgcttatgcttcaatgatccatactcacgttaacttgttccatgctgcttcacaagtcgcaaccctgcctgctgtacagtagtaaccatgcatgctgtagtctgccctatatgttgacgctgtcgttgtacctggcaacgtgtaattaactgccccggagacatctgtttttgccatctttaaaacgtatggatctcaataatatgacaagagttgcctgcttatgtgacattagcatccaaaagcaagtgtcatttaatgtaaaatcttggtctttgttggtcatctgtatcggacgtcaattctgatcttgatatgttcggttctggaagtgagaacctgtcgttatgctgtattaatgttggccatctactcatctgctctatcagtcgaccccatcttctgggtgaactcacggtcccaagaagaccaaccttgtggtgctctctgtagcctccaaagtacatagtcggcaagcgatcgtgttgatgtttgccagtccaatagataacctgtgctcctgagtcaaaaaaaaaa

SEQ ID NO: 90782 - DNA, 1193 bp, Zea Mays
gccggtcgccgcaactcgggaaagtgcaccaatgattgagacccgactcgtcgtcgtcggtcctctccccacattccttagctctgccctccgcccctcccaaatccattcactaccgccggcgccggatccaataggaggaggaggaagatgactgtgggcatgatcaacgcaaacccggtggtgcacgagcggccggagcgcgcctcgcacccccacgccgccgatgtgctcgaccctctcgatgtctttgatacggtgcgggacatcaaggacccggagcacccgtactccctggagcagctcagcgtgctgtcggaggagtccgtctccgttgacgagacgctcggacgcatccagtgcgtatgctgtatactgtcttcatatcctcgacgtcattctttcctttgtacttgctggggaatgagcacaggataaccttcactccaactgtgcagcactgcagtatggccacagtcattggcctgtgcctccgacttaagttgatgcagaacttccctccacatttcaaggttgacatcaaagttgctccaggatctcttgctaatgaagaatcagtaaacaagcaactgaacgacaaggagagggttgcagcagccttggagaaccccaacctacgccagctggtcgatgaatgcttatgcttcaatgatccatactcacgttaacttgttccatgctgcttcacaagtcgcaaccctgcctgctgtacagtagtaaccatgcatgctgtagtctgccctatatgttgacgctgtcgttgtacctggcaacgtgtaattaactgccccggagacatctgtttttgccatctttaaaacgtatggatctcaataatatgacaagagttgcctgcttatgtgacattagcatccaaaagcaagtgtcatttaatgtaaaatcttggtctttgttggtcatctgtatcggacgtcaattctgatcttgatatgttcggttctggaagtgagaacctgtcgttatgctgtattaatgttggccatctactcatctgctctatcagtcgaccccatcttctgggtgaactcacggtcccaagaagaccaaccttgtggtgctctctgtagcctccaaagtacatagtcggcaagcgatcgtgttgatgtttgccagtccaatagataacctgtgctcctgagtcaaaaaaaaaa

SEQ ID NO: 90783 - DNA, 1013 bp, Zea Mays
gccggtcgccgcaactcgggaaagtgcaccaatgattgagacccgactcgtcgtcgtcggtcctctccccacattccttagctctgccctccgcccctcccaaatccattcactaccgccggcgccggatccaataggaggaggaggaagatgactgtgggcatgatcaacgcaaacccggtggtgcacgagcggccggagcgcgcctcgcacccccacgccgccgatgtgctcgaccctctcgatgtctttggataaccttcactccaactgtgcagcactgcagtatggccacagtcattggcctgtgcctccgacttaagttgatgcagaacttccctccacatttcaaggttgacatcaaagttgctccaggatctcttgctaatgaagaatcagtaaacaagcaactgaacgacaaggagagggttgcagcagccttggagaaccccaacctacgccagctggtcgatgaatgcttatgcttcaatgatccatactcacgttaacttgttccatgctgcttcacaagtcgcaaccctgcctgctgtacagtagtaaccatgcatgctgtagtctgccctatatgttgacgctgtcgttgtacctggcaacgtgtaattaactgccccggagacatctgtttttgccatctttaaaacgtatggatctcaataatatgacaagagttgcctgcttatgtgacattagcatccaaaagcaagtgtcatttaatgtaaaatcttggtctttgttggtcatctgtatcggacgtcaattctgatcttgatatgttcggttctggaagtgagaacctgtcgttatgctgtattaatgttggccatctactcatctgctctatcagtcgaccccatcttctgggtgaactcacggtcccaagaagaccaaccttgtggtgctctctgtagcctccaaagtacatagtcggcaagcgatcgtgttgatgtttgccagtccaatagataacctgtgctcctgagtcaaaaaaaaaa

SEQ ID NO: 90784 - DNA, 664 bp, Zea Mays
taaggaattgtatcattttgatattattgcaagatgggcgatggggtggcttttgaggctgcgaggaagattatcatgcacccgctttatacgccaaggtcttctccgtggcttgacttgaaggtgttctatgttagggtaagcaactgtgtggtggatgagtctacaccggaccatctcacgctgaaccacatccctctgtcacctgatacagttatcgaggtgaatggccagcggagcagcttgcatactgagttcatatcctcctcactgaggagggacagggttgacaaaaagacagaggaagctacatttgtcagcacagataatatacggatgacagggagtgcgaggttccaagtgtttgataagaatgatctcttgctcacaggagacctagatttatgcaatgccaatggagtcgttggggaatcgaagaacagcagcaagaaatggaatatgaagtgtcagtcatccacatcatgcaatggcttcttgaagggaaagctgtccaatggctcggaatatgtacaacctatgatcgaggtttatgtcgctgggacctcctctggcacacctatcatattaacaaagacaattcagcttatatcacgaaggaagtctgaaatgaaactaaagcttgattccatccctgagaatgaaa

SEQ ID NO: 90785 - DNA, 1047 bp, Zea Mays
gtttaaatgtgtctgtgctgattacttttaagttagccagcacgtttttttcaacctgtattgccgtcttgttgataaatgataatttctggaaatactattgaagacggccaaatttcttcaggcttctaaaacatgtgaaacgaactttgaggataggtctttccatctattgtcaatatgtatatttattgactatgatgtgttgaaacattcagggaagggttatcccttgcgactttattggtgttgttaaaagtcagcagcctgtttacttgaaaggggaaactgtgagtaatcatgatgagcttatgtccaatttctttgcccaacctgatgctcttgcttatggaaagactcctgaacagttgcacagtgagaaagttccagaaaatcttatccctcataagacttttaagggcaaccggccatcactaagtttgcttctgcctacactatccgcatatgaggttggacagcttttatccatctatgagcaccggattgcagttcagggcttcatatggggaattaactcatttgaccagtggggagtggagctagggaagtcactcgcttctcaagtgaggaaacagctgcatggaacccggatggaaggaaagcctgttgagggttttaaccacagcacttcaagtttgcttgcacgatatcttgctgtcaagccatccaccccgtatgatactaccgtgctgccgaaggtgtaattactcagttgtttttgacatgccaattgctgagttctgacttggcaaggttgagcataagtctttcttcatttgggagttatcacagagccagtttggcagtgctgtagttttggttttacctactctttgtagaagaaaagtgaagagtggatattatggaacaaaatatatacctacggcagcacgcagcatgatgaaacatatttaaaaaatttgggtgctctaccacatgcccgtggaataaaacggatgtaaactcagtgcacttataacaccctaattgtggttttgtttgtggttcaaacttctataccgaggc

SEQ ID NO: 90786 - DNA, 3112 bp, Zea Mays
gaattcttggggctgctgatttgagggaacacttgaagtctgataaatctcctccaaaagaatctgagtctggtggtggtggtatccatgggccatgtgctgaatttggacatcagcgcaatgccttggaccaaggaactaaagttggtgatggtgaaaatgttaacccagaaaacctctctctgtactacaaggatccaaaagggtgcatccaaggtccttttcctggatatgacatcattggttggtttgaagctggatattttggtattgatttgctagttcgtgttgccagtgctccctgtgattctcctttcttattacttggggatgtcatgccacacttacgggcaaaggtaagggtgcctccaggcttcagcaataccaaaccaagaagtatgacagatgcctcacatctaggatcagtgtatcttggaacatctgattatggatccataaacaagaatggctgtgtaactgaagcagaaaattactttttggaggctccagtgtctagtaaaatccagaatcctagagcagcaactaatgttgttactggaggtatgaatgaatggaggtttgtttccggtgagaaagtgaatagtataaaccatcttgaagtacagaaggtgcagttagagacagaaaatacctttcaaatagaaggtgatgtcatatcagttggagagtcacaaaagaaagaatcagtacagtcaacttcacactcaacattcttcccgcaaatggttgacccatcgagtgaagccctccaacctcagaatattaacctgctctcaatgctgcttcctgcagaaaaaggacaagcaccgactgctacttctggattgtcacttcggtcaaataatgctgactctggaaatctgcatgctggtatgtgtggtatagatgttactcaagagatactaaatgtgcaccaaaatctgcataattctcagcaaataggtattgatgctcaacagcattacgttttaacacagaatcaaccaactttagcttgtttgaactctcaaatcacacagccagaaaagtttctcggtggaatatatcatgatcctcagttaaacatcaaccaacaacagtatctgctatcagagctacacttgcaacccctgattcctggagtccctgaacctcaatcctctctattgaacaacatgctacagctcaggcagcaggagcaacagcaacaatacatttctcagtccatacctcatgatcgttccatgcagcagctttatgattcttcccatgggacaatacatacttcattgtcatctggtgaccgtatgaagctttgtcttcaaagaacagaagagattcttgatcttgctctgaagttacctggtcatggtaagcataatctacaactacatgcaagtgtgaaattgagagacacaggaaatattggtttgtcggaaagttgcgctactgccctaccactgccccatgaaatgatgggtcatgcagcttggaaagaatgttctgctagtctcacacagggctctgcagttgttgatgctctttcacaaaaagaaagtattgtagactcaccatctaagaaaactccaagttatggttctaacgattatagcaagatgactgtttttgaagttacaggttttcctcaaccatttcaaggtcttcagaaaccgaaaagtgtagcatctcatatctcaaatgaagttcatgaaatggatatttcctctgtccatcctcattcatggaaacctactccaggtgttagggctaaatcagtgttggaaattcaagcagaggaacgattggaaactcagagggaaatagccctggaaaatacaaaggtaactacaacaacagcttccgggctatctattcattgggttgatttggttgaaacttctgggcaacagtttggagatcaggctagacctatgtgtgataaaaaaaatgacaatatatcacagagtaacagaagtcatttacatgatttatcggcaagagaggaactgataaagtcaaatgctaaagctggtgttatcataaacagtgctgatgatacatcttttcctcctctggcaccttctattactcagtctgatgctcatattcatgatggtgctgatttcattgagttcaagggcacaagaaagataagtaacagggggaagaaacccaaaggttctgcagttaaaaccccagcatcacatgcaaatgttatacctggaccagctactgatcctgcacaggtacgcgaaccatgttctctgagaaatattcaggtggaagaagaacaggaatcagctaatcttcagcaactagtaccagcatcatcccatgcaaaagggcctatggaccagcatattcatgggaacaattcatcctggcaaggttctgaatcacctccatcgaggggtaacgaattcctcaaaatgacttctcatgtttccagtcactccactcctaattcagaagagtatctgttttgggagcctcgtgagcatgcaaagcaagataagccgagactccaatcacctccgagttccgtggtcaatacaaggtctactgcattggacattcataagaaggggaagaaaggtacaaagctgagcacgtcagctttggggttcaaggttcagagcacccgtatcatgatgggtgagatcgcgcatgttgacgagtagatgtccagactggtatatatatagttaagatctatatctatattatatgttgagctacgaaaggcgaccaattcgtgtactgatgcacatagcttacacttcgcatcatcgttttagcacagaatttttatcatggtaggcgagcttcctgaagaatgaagatgatgacagtttggcggctgaagtgacgagaattcaaattgagcaactggcaaaggttttggttttcagcaggcttggttgtaacttgaaaatcgtataatgtttgttgctgggcggattttgtgcgaagcattgagcctggaaggttcaagattcaggtctaatttgcagtatggaatattcgagtgcttgcttgtgaccgtttcctgaaacagtcatctggtgtatagtttcctggaatctgatgggatcgtttgtcattaaaataa

SEQ ID NO: 90787 - DNA, 865 bp, Zea Mays
ctttcttcttcttcgccaagaagaccgacgaccccaacttccagccggtatagacccgtgaccgccttcctctccactcctctttcttgccgcgcaagaacgagcgccggttttatctaccgcggccgccgcctgcaggccagtccgttcacgttcctgcttttcccctgtcctgcggttttggcctttttgcccccggcttcctggcggcaacgaaacaaccagtcggttcggtcgatgcttcgcgagttggaattggacgccggccgacccgctgctcaatccgtcgagttcgacatggctactcccttggttgctgggttgtcagtggctgccgctgcattaagcggaagatacatgattagagcatggcaagccttccggacccaggcggcaatgccgcgggtgcgccgcttctaccctggtggattccagggggaaatgaatcgaagggaagctgcattgatcctcggcgtcagagaacgtgctacagtggacaagatcaaggaggctcacaggagggtcatggtagctaaccaccctgatgctggtggcagccattacgtcgcttccaagatcaacgaggcaaaggacatgctgatgggaaaagggaagtccgggtcttcgatcttttagctgacacaaagctcattctgctgtggcgtgatcaggctgtagctttttcaagggactgacagttgcacgtttcaaatttcttaacaatgctctgctgcttgtaccatatatcataaaggatacagatacagatacagaattgaatcaacttattatctgggtcttaagttattgtttggcctgattggaaatagtaaccatgtatatctcagagcccccaattcttgtc

SEQ ID NO: 90788 - DNA, 393 bp, Zea Mays
atggccctgaaatcttcatgtcgctgggagcatgaacgtgcactggcattttgcaggacgaaaataaaccggtggatgtcgctgctcatacaggtgctcggcacatcctttgccagtaaaggcatcgcactacctgggaggctgggagaaacggggtgcccgctctgccgctcattcataaaggcacagaccatagatgatgatgactcaggacagtgccaaaggtaccaaagtaaaaggtacctggaactggaacttactgaagcatgtaaatgtaagcagtttagagtacaccctcttcatggccgacggaggcaacgttggcactgtgtacctatgttcctgtcgagcgccgtctggttggcatccgtgttgcgcagcaggtcctggtag

SEQ ID NO: 90789 - DNA, 803 bp, Zea Mays
atgggttatgatgggaaacataataacctagagtgtcaatgctttgatgattattattctctttgtgtgcagcactcatcgccgcatatcgtgctctttctcgttctctcttacattgtctcgcatcagttcgacctcctgaaccatcatatattacccatcaataatctccattgtcaatacatgcaattgctaatgttggaggctaatctagtttttggcgcctttacctcctatgatcgacatagagacatgcggatggatattgatgatatgtcctatgaggtatacttcttatgggctaaggggttagtctatgccatgaacacagccgaggagcttaagtttgtcaaagacatagctgcatcaacaggcattgtccttgatccagtctacagtgggaaggtggtttatggattgctaaaagacatggctggcaatccagccaaatggaaagaatacaggcccttttatgctgctattaccccacttcccaaacgtcttattaaaaaaggctgggttgtacttgcgagccctccagagttgcctgatatcaagcgtgccattgtaaatacccatgtcattgaaccacagtgggctttggaatgcatgaaagaccttctactggttaatctgaagggaaatcttcagattgttgtgcaggatgtagtgctgactattacgacgcctagggaacttaacaactactctcgcaaagacacttttgacttgtggtaagttattgacatcttgaatatcgtcaaatagcacgaaactacataaaacacgaactttagtttaag

SEQ ID NO: 90790 - DNA, 372 bp, Zea Mays
atggagtacaccgacgccagtaaccatcaggtgctcgaggaaatgcgcctgatggaagcgcggctctccgagaagttcgccggacgctgcgacaacatcgaacggcgtgttgaggatatccactcccacttcacgacgcgctgtgacaagatccaggagcaggtcgacgtggcggctctccgcggcgacgactgtctcgtggcgctggaggaaatgcgctccgacattgagcgctggcgtccggatctggtcaagcgtgtcgaggacgtcgccctcgaggttctgcgcgtcaacaagttcctcgagcgggagcgtcgagccgactccatcgacaaaccgggcatcttcggttccgggaacaagaaggactga

SEQ ID NO: 90791 - DNA, 1602 bp, Zea Mays
tgcttgagtggaagactgcatgcttgttgctagctgcatcaagagcatccagacatatcgatcgagctcctactcctggcggtggcgggaaatataatattgtatactatacgtccacagccacagtttcttggtagaaagatcggcagatcatggtagtcaaggagttcggaagagaagtagtaatgagcatggacaaggtgaagaggggtggagaagcgctcatggccgccggagccggagccggagatgaagagaaagatgacgcggtgctccctgggttccggttccacccgaccgacgaggagctcgtcacgttctacctccgccggaaggtggccaggaagccgctcagcatggagatcatcaaggagatggacatctacaagcatgatccatgggacctccctaaggcgagcacggctgctggtggcgaaaaggagtggtacttcttctgcctgagaggaaggaagtaccggaacagcatcaggcccaacagggtcaccggctccggcttctggaaggccaccggcatcgaccggcatatctaccctgccaccgcgaaccccgtcgagtccgtgtccgtcgggctcaagaagtccctcgtgtactaccgcggcagcgccggcaagggcaccaagaccgactggatgatgcacgagttccgcctcccgccggccgccgcctcgccctcgccaacgccgacgagcatgcaagaagctgaggtgtggaccatctgcaggatcttcaagaggaacatcgcctacaagaggcagccgcagctgccggcgtggaggcagcagcagcagtccagctccaacacggggagcttcgagtccgacggcggcggcggcggggacgagtacatgaaccgctgcctgccggtgccggccacggccacggccaccgctcatcagatcggcggcatgctgaacggaggaggcgtcgtcagtgccactggcagcagcagcagcagtttcttcagggacagggagagcgtgcacggcggccagcaattccacttccacgagcagtggctgagccgcttccccgccgcgccagcagtcgagcagaagccgcagctcctggacccgtcggcgatggccatcgcgttccatcagaacgacgaccagagcgtcgccaccgctgccgctgccgctgcgagcgagtgctgcaaggacgggtactactgggacgagatcgcgaggttcatggaggtcaacgatccaacggtgcttcacgactgtagatacgcttgatcggtagcaagttcaggcagatcgtagacagacacccagacccaggttaggtgaccaagggatgatgcaagcatgagagactggcaattttgcgcacccttttgtgtctattttcctgatcgaatgtattgtatacaggacgttgttgtgaccaaaataaacacatagttcagccatgaagaatcgtgactttagcacctgctctggtctctgttccgaaaattataggcaagatttgagttggcctaaagtcaaacgatgttgatatttggtgtctgaatatcagttctctttttctataagttctgtcaaacataagaaaggaaactccaaattccctgta

SEQ ID NO: 90792 - DNA, 1521 bp, Zea Mays
gaatgatcaaccatgcaaaaagcttgcatttcaaaggtgcccagggtttccagagaatcatcttgatgtgaacgtcatagcaccccacaaactgtgctttgtaggctgatgttgttgtgtaggaacctgtgctattgaaggtccacatcaacacgtcttctatgttctgggtgagctccatcgattgcaagtccagagctaggtgagatgtcttttgggtgttcaccttgggtccaagcattgtggcagaaggaattttttatccatccccaattttaatttttttagttgttgcgaagattaaataatcggtcttgttgcaaggcgtttcaagccccacccaggggacgtctagctttaaagccaatgtagccatagtgctctagcaaacctataaatgtcaagtactcctaggccgccaaggttgatcggacatgtaaccgttgcctagttgactatacattttccacccaatagactttcccctacccagaggaaccttcttcttagtttgtcaataatctgtagcacacccttagggacaatatgaatggttagcgtgtgcgacggctacgtggagatcactgattttgtttggataagtcttccaacatgggtaatgttgtgtcctttctatgttgtcatcttgctttgtaccttgtccatcaggtattggaagtccattttccttaatgtgttaatcgtcaaaggtaagccaagatacttaattgtgaagttctctcttaccatagggaatttgcacatagtttcatcaaggttcacattgttacatctaatggctaggaatgatgatttttgaatgttcatacatagataagatgccagcccaaagcgccgtagcatgtagtccatggcatctaactcacttttgatgggctttatgaaggcgattgtgttatctggtgcattgagacaaagagcaaaggcgaaagggggtctccttgcctcaaggcccttccatggaagaacaattgccccggaattccattgagcagtatctaggacgaggttgttgacaacaccgatgcaatccagcttctccatctagcaaggaagccaagacgagttaaaaggagtagaaggtagtcccacctatcagagtcaaaagctttcatgatgtctaccttgatgagaagcattggagaactattttggtggaatctctgcgctaaactacataaagaaaattgtcgtggatgcttctacccttgatgaaggcactttagcacttggatatgatgtccgctattactggggccagcctaagcaaggacagtttcataaaaaagcttagccacattatgaattaggctgattggtctgaagtcctcgatttttccacaccctccttcttcaacatcaagatgatgtttgccgtgttgagtaggtcgaagttttagaatctctggctatgacgatagtgtattattgctgaaagatcgaccttgatgatgggccagcaacatttataagtttaagttgaataaatccttgttctcg

SEQ ID NO: 90793 - DNA, 698 bp, Zea Mays
gaatgatcaaccatgcaaaaagcttgcatttcaaaggtgcccagggtttccagagaatcatcttgatgtgaacgtcatagcaccccacaaactgtgctttgtaggctgatgttgttgtgtaggaacctgtgctattgaaggtccacatcaacacgtcttctatgttctgggtgagctccatcgattgcaagtccagagctagcgggtgcgcaccgctggcgccactggcggcggagggcccggtggcagccataggagcgcatgcctatcatagcagaacagacaacaccacgagcagcgcgacgatgatgtggagtgatgtcatctagccttgcctcctctgcatagcctcgctgtcgtcggagccgcacaccaaagacaatttgttgcgtagcaagcgtgactcaaaggttctggctggcgtgggagcgaacgggcagaaaagctttagcgagcgaatgaaagtgcaccgtgtttagcaaatgacaaagatgacatgtattttagtgaatcttttataggtcattgctggaggctttgcaaatgacgacaaacactatatttagtgtaccggacgcttttgtaacccatgctagagacagtgttaggtgtcttttcttcctgatgctgctcattcatttcgagtcttagaataatgcaataatcctgctaaagaatgaatatactattgttgaagc

SEQ ID NO: 90794 - DNA, 271 bp, Zea Mays
tgttgctcgaagtttccggtctgctcctaaaatcggtcgtaacttgtgctaagtagcatggatattatttttgcatgcacggtttttcaagtttcgagtgacctgcagttcaaatctaaattttccaaagaaattcaaataaacgaactaaatctactacctattgaaaactctgttataattatctcaaaatgttacatgtaggtctacatagtgtaggaacatatcacaaaaagtttggttgaaaaaaaaataaaaataaaaataaaaa

SEQ ID NO: 90795 - DNA, 113 bp, Zea Mays
tttttatctcctctattataccacattgaaaaccctaactgtgcccaaaaaagacttgctagaccgctcctagccaaggtctcggctggctcaaccaaggtaaaaaaaaagaa

SEQ ID NO: 90796 - DNA, 116 bp, Zea Mays
cttccaatgtaacaaaattctaattggaaggcattctaatatcaaaatccttggagaactcttactaaactttcacattaagatttttgggtgttacaatagccaacatatctgcc

SEQ ID NO: 90797 - DNA, 768 bp, Zea Mays
cagggatgacacaaagaaagaaagaaagaaagaaagaaagaaagaaagaaagaaagaaagaaagaaagaaagaactaattaacaaggaccatttggtgaaaagaaacacatgacgtactcgttgaactcatatgtagagatgtcttgaactctgaacttgttggtcatcagatgaacgacgattacgtactgttagtactaaacaaaacgggaggaggagatgatcggtcatgcttggctccacgcacgccatccgcagtggagccaacgactagctagcagtgtatgcatgatgagttggcagccatgcgagtggcatacagggagccaggcatatcgatcccgcccctggccctttattagtttccgacgacgtacggtacggccggcgtgtgctagcgctgctggtgctgatatgatgcttccaaacacggagacggaccacatatcgcgcaatgccatgccatgcaatggtttttcattcctgaacttgcagctgcggcagggcgacctggaacaatgcaagaagctagctagtagctggctagctgtatatgtatgcagcactgcagcatatatagcaacaaaaggacattaataagcacagcacggtcgatcgacaaaagagaaggaagagaggatagatgattgcgttgatatgcttcatgacaattgcatgggatgagatgaaagctaagaacgatgactctgggcgctggtgtgcatgaggagcgagcgaggacgtagcagagagccgctatgactatg

SEQ ID NO: 90798 - DNA, 769 bp, Zea Mays
gcaacacagcaagacccgactttgcctcctcctgcagcagccgcataaccagaggggagtgcagcaagtcgtttcgagagacagctttaggctactgctagcagtatggcttccactgagcgcttcctggtggccgtggtcgtggcgtgtgcactcttggccagcaacaactgtcatgcggcgcgctacttggccgacacggcagcggctcccgctgctgctggtgtcgtccctggcctccccgctgtgccgaccttgccaacggtgcagccagttccacaggtggcgctgccacctatgccggccgtgcccgcggtcaccgtgccgcagatgacgctcccgcccatgccagcggctcccaaggtggccgtgccgttgccgccaatgcccaccgtcccgtccgtgctgcccaagctgaccctgccaccgatgcccgttgtcgttccatctgtcgtccccaaggtggtcttgccgccgatgccgtcagtccctaccgtgcccatgccgttcgcggcaccgcctccatcggcgtagacgcgcgtgctcctgcaggtttgcgttcgccgtggccaccatgcacaggtggtgcggtgaccagtgtacgcgagagtgatgtcattgtttgtgagtcgcgtgctttctttttgttcctaacgttgtacgtatgtatatcctttgtatttctactacattcatttacgccgtatatgtctggtcaacactcttctccttttttttgttcttctgttcaaatctgaactttagtttc

SEQ ID NO: 90799 - DNA, 111 bp, Zea Mays
cccaacaacactcttctcctattttttcttctgttcaaatctgaactttagcttccaccgtatattcagctggtgtaatgacactcagaaaataaatggcgcgttttcttc

SEQ ID NO: 90800 - DNA, 808 bp, Zea Mays
gcaacacagcaagacccgaccttgcctcctcctgcagcagcagcataaccagaggggagtgcagcaagccgtttcgagagacagctttataggctactgctagcagtatggcttccgctgcgcgcttcctggtggtcgtggtcgtggcgtgtgcactcctggcgagcaacaactgccacgcggcgcgccacttggccgacacggccgcggctcccgctgctgctggtgccgtccctggcctccccgccgtgccgaccttgccaacggtgcagccagtgccacaggtggcgctgccacctatgccggccgtgcccgcggtcaccgtgccgcagatgacgctgccgcccatgccagcggctcccaaggtggccgtgccgctgccgccaatgcccgccatcccatccgtgctgccaaagctgaccctgccaccgatgcccgctgtcgttccatccgtcgtccccaaggtggccttgccgccgatgccgtcggtccccaccgtcaacgtgcccatgccgttcgcgggcaccgcctccgtcggcatagacgcgcgcggcgcgctcctgcaggtttgcgttcgccgtgcccaccatgtagagcagaggtggtggtgaccggtgctggtgtaccggactaccggtgtatgcgagagtgatgtcattgtttgtcagtattgttgcacctgcgtctcgtgctttctttttgtgcgtagcgttgtaccattgtacgtatgtatatcctttgtattgctatcacattcattacgccgtatatgtctggtcaacaatcctcttttttcttcaaatctgaa

SEQ ID NO: 90801 - DNA, 1301 bp, Zea Mays
tagtcaccaatcatccaacgctgatcccctcgattcgcggcgccctcgcctccaccactccccaaccacccgacgccgacccccctcaattcacgcccccacccgctgcatcggctccctccggcgccccgcctcctggcccagatccgtgcacccctcgccctctctagactcgatgattcacagatccgcccagctgcccaggcaccgactaccggcgtccggatctcctgctccactgctcgctgcctcggggctctctggcgttggctcagcgcggtgggccccccaatagcctagttccggatccccccaccacccacgccccacaggtcaagcaccggccaccgatgtctgacgaacgagcgaactccccgcggatgcaggaggaggaggtgtaggagcgaccaccgaccatccgcgtttcaccatccccttctccgatctcaaggtaaccttctccggtgttgaaaccatcaggggtcgcggtcacctggtgagctggtgcccgcaagaggtggtgctaaggcacgaggcggtggccgtgttcctaacgcactacgggtggaactcgaccatggagagcctgtgcgccggggtgccgatgctgtgatggcccttcttcgcggagcagcagaccaacagccggtacacgtgcgtggagtggggcgtggccatggagatcggccaggacgttcggcgggaggcggtggaggagaagatccgagagatgatgggtggggagaagggaatggagatgcagcgcctcgcgggagagtggcagcagactagtctccgcacgacgcggctcggacggcgctcatacgccaacctcgacaagctggtcgccgacgtgctcctctcgggtggcggcaagagttctcaggagggtttcacttcgcacaccgacaccatccaatgattcagactgaacatggatggtagtacaccaaaagagatttgtgtgaatgtcgaggcaaacccgtaaatcatggagcatgtgatggaatggaaggaccgaaggagccagtagcggaagaagttacttctcgtagcaggcaaaaattggaatatgaaaacctggaagccaagagggttaatccctaattactatattttattccattagtttgtagaagttttggtccctgtattcaatgtaataacgacttacattattttagcctcacaattttctttaatggtctagctttgtaattgataacataattttttttggttgaactgtcataaatttatgacagtatccatatatagtatgtcaaaacttaacatttcct

SEQ ID NO: 90802 - DNA, 1240 bp, Zea Mays
tagtcaccaatcatccaacgctgatcccctcgattcgcggcgccctcgcctccaccactccccaaccacccgacgccgacccccctcaattcacgcccccacccgctgcatcggctccctccggcgccccgcctcctggcccagatccgtgcacccctcgccctctctagactcgatgattcacagatccgcccagctgcccaggcaccgactaccggcgtccggatctcctgctccactgctcgctgcctcggggctctctggcgttggctcagcgcggtgggccccccaatagcctagttccggatccccccaccacccacgccccacaggtcaagcaccggccaccgatgtctgacgaacgagcgaactccccgcggatgcaggaggaggaggtgtaggagcgaccaccgaccatccgcgtttcaccatccccttctccgatctcaagggtttgtccgctggtttgctaaggcaagcaacgtacatagactgctcgtcttggatccttcaggtttgtatagtgtgttgctttatgatcaattgaccattcattacctccgcctgatggcccttattaacaacagtaagaactaactaagaatgtgcgctaagattttgctatctgaagtggtaaatttgttaatcctaattttttgttgaatgggtatggggttttgtgggtggtggatggtgttgtgggatgagatccttttgaaagggaaatgtgcccttgggccatttctaaagtgttttggtgattaagtgcccaacacattttctctaagtgcaaatttgtgccaaagagtgaagaagtgaaaatcgtattacaaggtatgtttctagacttagtacatttgttattgtgtactaatgaagttacctaagtgctagaaacaggaaaagaaaggattggaaaagagtgtctgtgtgcagccaagactcagctcggcttggcacaccggactgtccggtggtgcaccggacagtgtctggtggtgcaccggacagtgttcggtgcgccaggccagctccggcgaactggccactctcgggaaaacttcggcaacatacggctataattcaccggactgtctggtggtgcaccggactgtccggtgagccaacggccctcagcgcaactgtcggccgtcaaatccgcgggtgacgcgtggctcgctccaacggtcggcagggggcaccggactgaccggtgtgcaccggacagtgtccggtgtgc

SEQ ID NO: 90803 - DNA, 840 bp, Zea Mays
aacacagcaagaccgaccttgcctcctcctgcagcagcagcataaccagaggggagtgcagcaagccgtttcgagagacagctttaggctactgctagcagtatggcttccgctgcgcgcttcctggtggccgtggccgtggcgtgcgcactcctggcaagcaacaactgccacgcccacgcggcgcgccacttggccgacacggccgcggctcccgctgctgctggtgccgtccctggcctccccgccgtgccgaccttgccaacagtacagccagtgcccaggggcggagggcccgttatgtgccacaggtggcgctgccacccatgccggccgtgcccgcggtcaccgtgccgcagatgacgctgccgcccatgccagcggctcccaaggtggctgtgccgctgccgccaatgcccgccatcccgtccgtgctgcccaagctgaccctgccaccgatgcccgctgtcgttccatccgtcgtccctaaggtggccttgccgccgatgccgtcggtccccaccgtcaacgtgcccatgccgtttgcggcaccgcctccgtcggcgtagacgctcgcggcgcgctcttgcaggtttgcgttcgccgtgcccaccatgcacagcaggtggtggtgaccggtgtacgcgagagtgatgccattgtttgtcaatactgttgcacgtgtgtttcgtgctttcttgttgtgcgtgtagcgttgtaccgttgtacgtacgtatatcctttgtatttctaccacattcatttacgccgtatatgtatggtcaacactcttcagctttttttcttctgttcaaatctgaactttagcttccaccgtat

SEQ ID NO: 90804 - DNA, 1183 bp, Zea Mays
ctcgcacctttgacccctctcccttctcctcgaggacgcgcgcccatcactcagccaccgccgccgccggagtgatggattcccgcggattcgattccgccggccgcatcttctccagcgccacagagatgtggacggaagagctcggttccagcatcacggcttccaccgcgggggaagctgaagccgccccggcccccgccgccgccgccgaagccagcgaggaagtgggcggagacggaaaacgcaaggagtggtactccaaggctatcgcctactggcaaggcgtggaggcgtcgaccgagggggtcctgggaggttatgggtgtgtgaacgacgcggatgtcaagggcagcgacgccttcctccgccctctcctcgcagatcgcttcggcaccgcgaagcgtcatctggttgcgcttgactgtggctcgggtattggacgcgtcacaaagaattttcttcttacgcatttcaacgaggtagatcttgttgagccagtatctcattttcttgaagcagcacgggaaaatcttactggatgtatggaccaaggagaagactcgcacaaggctgccaacttttactgtgtgcctcttcaggacttcactcctgaggaaggaagatacgatgtgatttggattcagtggtgcatagggcaacttcctgatgatgatttcatttcattttttaatcgtgccaaggccgggctcaaacctgatggtttttttgttctgaaagagaacattgcaagaaatgggtttgtgttagataaggtggataacagtgtcactagatcagacgcatactttagggacctatttaaaaggagtggattatatatccttagtgttaaggaccaaaaggaactcccgaaggaactatttgctgtcaaaatgtatgcactggtgaccagtcaaccaaaaatccagaatagtggaaagagaagacggcctagaaattcacctcgtatgatccggtcttgaagaatgcccggtactaggtggccattgagctgctgggcctatttggtcatgtattgccactggattgtgctaaaagttgctgggacatcagtttttgcggtgattgttttgtttctatacattttatttctttacaagcacaaatttcttttgggtgagcacgttcacattattctgagatgaatatgctgaagttc

SEQ ID NO: 90805 - DNA, 1316 bp, Zea Mays
ctcgcacctttgacccctctcccttctcctcgaggacgcgcgcccatcactcagccaccgccgccgccggagtgatggattcccgcggattcgattccgccggccgcatcttctccagcgccacagagatgtggacggaagagctcggttccagcatcacggcttccaccgcgggggaagctgaagccgccccggcccccgccgccgccgccgaagccagcgaggaagtgggcggagacggaaaacgcaaggagtggtactccaaggctatcgcctactggcaaggcgtggaggcgtcgaccgagggggtcctgggaggttatgggtgtgtgaacgacgcggatgtcaagggcagcgacgccttcctccgccctctcctcgcagatcgcttcggcaccgcgaagcgtcatctggttgcgcttggtgagtttatttattactgcaaggaagctttggctagtgccagtagagcttgtttctgtgcgagttctgttctagtgatttcgctctatgacagttactgtctaatgttgattttgtgaaatccttgtgtcagactgtggctcgggtattggacgcgtcacaaagaattttcttcttacgcatttcaacgaggtagatcttgttgagccagtatctcattttcttgaagcagcacgggaaaatcttactggatgtatggaccaaggagaagactcgcacaaggctgccaacttttactgtgtgcctcttcaggacttcactcctgaggaaggaagatacgatgtgatttggattcagtggtgcatagggcaacttcctgatgatgatttcatttcattttttaatcgtgccaaggccgggctcaaacctgatggtttttttgttctgaaagagaacattgcaagaaatgggtttgtgttagataaggtggataacagtgtcactagatcagacgcatactttagggacctatttaaaaggagtggattatatatccttagtgttaaggaccaaaaggaactcccgaaggaactatttgctgtcaaaatgtatgcactggtgaccagtcaaccaaaaatccagaatagtggaaagagaagacggcctagaaattcacctcgtatgatccggtcttgaagaatgcccggtactaggtggccattgagctgctgggcctatttggtcatgtattgccactggattgtgctaaaagttgctgggacatcagtttttgcggtgattgttttgtttctatacattttatttctttacaagcacaaatttcttttgggtgagcacgttcacattattctgagatgaatatgctgaagttc

SEQ ID NO: 90806 - DNA, 1179 bp, Zea Mays
ctcgcacctttgacccctctcccttctcctcgaggacgcgcgcccatcactcagccaccgccgccgccggagtgatggattcccgcggattcgattccgccggccgcatcttctccagcgccacagagatgtggacggaagagctcggttccagcatcacggcttccaccgcgggggaagctgaagccgccccggcccccgccgccgccgccgaagccagcgaggaagtgggcggagacggaaaacgcaaggagtggtactccaaggctatcgcctactgggcgtggaggcgtcgaccgagggggtcctgggaggttatgggtgtgtgaacgacgcggatgtcaagggcagcgacgccttcctccgccctctcctcgcagatcgcttcggcaccgcgaagcgtcatctggttgcgcttgactgtggctcgggtattggacgcgtcacaaagaattttcttcttacgcatttcaacgaggtagatcttgttgagccagtatctcattttcttgaagcagcacgggaaaatcttactggatgtatggaccaaggagaagactcgcacaaggctgccaacttttactgtgtgcctcttcaggacttcactcctgaggaaggaagatacgatgtgatttggattcagtggtgcatagggcaacttcctgatgatgatttcatttcattttttaatcgtgccaaggccgggctcaaacctgatggtttttttgttctgaaagagaacattgcaagaaatgggtttgtgttagataaggtggataacagtgtcactagatcagacgcatactttagggacctatttaaaaggagtggattatatatccttagtgttaaggaccaaaaggaactcccgaaggaactatttgctgtcaaaatgtatgcactggtgaccagtcaaccaaaaatccagaatagtggaaagagaagacggcctagaaattcacctcgtatgatccggtcttgaagaatgcccggtactaggtggccattgagctgctgggcctatttggtcatgtattgccactggattgtgctaaaagttgctgggacatcagtttttgcggtgattgttttgtttctatacattttatttctttacaagcacaaatttcttttgggtgagcacgttcacattattctgagatgaatatgctgaagttc

SEQ ID NO: 90807 - DNA, 148 bp, Zea Mays
catgagggcacaaacacatggtacagatctcataaccaaaaattgctaatcaacaaactaaaacacacagtacaaataggaacaaaaaatagttgtaatacacactaatgctgcaacacacattagtactgggacagaattgccacat

SEQ ID NO: 90808 - DNA, 444 bp, Zea Mays
atgacagatgaacctgggagcagattgaagatgacgatcgtacctgaggaacagaagatctgggccgcaacacgacgaatcaaagtgattaactccggatctgaggatgtcggcgtgggtcggagtggaaaagaacggatgcggcgacgaagagcctcggtggagtcagattggtgggcgcttcgtcttcctctgcgaacgggattgagtgttgaggaactcgacgtgctccacttggtcctgctcgacgcagacctcgaccggctcggaatcgcccatccgccggcagatccgccgccgtgtcgcccgatcttggccgacttcgacagaagcgtcgagaggaagcgaagtggaccggaaactttcctcggtgtggcgcgggcgacggcttccgcgataagcaggagcgggggagtcaacagtgcgctgcttcatctggcatga

SEQ ID NO: 90809 - DNA, 431 bp, Zea Mays
agcaaagcttcaaagcatctctgctgggattttagcaagcggcaacgacgagcgacccaaaaaagcaatcaatagtcaccatatctgctcctctcactccacaccccctgctctgcgaattgaggcaggacaggaggcagagacgggcaatggggttcgtgctggtggtctctctgcccttcatcttcctctccatcctcctcggcttcggctgctacttcctcggcaagcacaggggccgggaggagatgcagaccggcgtcggcgcgcagatctacagcacgccgctaccgccgcccagtgtcgtcggagcctcctcgccgccgcctcagccgttccatagcaagaaagaagtgtacgagtgtgatacccggtttgcaaagaagggaagttggaggttattctttttgttttttttctcattcggttga

SEQ ID NO: 90810 - DNA, 423 bp, Zea Mays
cagtcaaatgcatcttccggcatgggagttgctcctaacattagggagacgtttgtcaagctccaaatgaagaaggcattctgatatgttatcttcaaaatcgaagaaaagcaaaagcaggtaattgtggagaagacgggggcgactactgaaagctatgatgattttctggcctctctcccagagaatgactgccgatatgcgctgtatgattttgattttgttactggggagaatgtgcagaaaagtaagattttcttcattgcctggcccccaacaccgtcgacatcccgcatccgtgctaagatgttgtacttgacctcgaaggaccgcatcaagtatgagctcgacaggttccactacgagatccaggcgaccgacccatccgaggtagacattgaggttctgcgggagcgggctcac

SEQ ID NO: 90811 - DNA, 801 bp, Zea Mays
catgtcccaaagcaaagcaaaacaaagcttcaaagcatctctgctgggattttagcaagcggcaacgacgagcgacccaaaaaagcaatcaatagtcaccatatctgctcctctcgctccacacccccctactctgcgacttgaggcaggacaggaggcagagacgggcaatggggttcgtgctggtggtctctctgcccttcatcttcctctccatcctccttggcttcggctgctacttcctcggcaagcacatgggccgggaggagatgcggaccggtgtcggcgcgtagatatacggcacgccgctgccgccgcccggcgtcgtcggagcctcctcgccgccacctcagccgttccacagtaagaaacaatggtccgaggctgtgtgactcagattcagacgtctctccatccattctactagtactactacatatatgtcttggtggtgatgttggatttatattctttcttctttaattttgccctagctgtcttgagagtgtagattgagagtcaaatatgtgcttgtgtctaaagatggtgtgtgtgtgtgtgtgtggatgttgtgatacgattgcaatcacactttatatcttctgtaatcaagcaaaaaccaatgcgttgcagtagaatggcttgtgtgtgtgactcctgcaggctatttatgtgtttgaagattgcaactgagcatctccacaagatcttttataacatctataaattctttagattcaatttaggatatgtcatagcagatcatctaaaacttgtctctcgtatttcttgaaatgtgct

SEQ ID NO: 90812 - DNA, 611 bp, Zea Mays
aatagagtctctaacatgcaacctagtttggctagctggagtggctagccaagtttggctagtgatggggtaatttggagagctagatggcttggctagttagatggctagtatgttggaatatccaaattttaatttaacgagtgatttggctagtctcctgaagatgctcttagtgagttatgctttaatgtgcctaggccgtgtcgtgttcgtccaatccggatgtacatgcatgcataggatatcctccctggtcgtgttagtactgcatcagcaagcaacaacatgccacgatcaagctcagctgctgctgctgccgccattcagatgatgaccaacatgatggcaggagcggatctaaacaaaacatccattggtgtcatctccattaaattataaaatcatcaattcatttatgtgctaacaaacatacattctaatggagattactaaaattcattggtgtcacaggacaccacaaaaagggcctggatccgcccctgcatgatggtagagtggtagaacttttggttgggtggtgaactggtgatgtggttggcttcttatatttggcctaaaaagaagcatttgtgctggttgcaattatg

SEQ ID NO: 90813 - DNA, 103 bp, Zea Mays
gtttcagcttataatataagtagattatataatctagatgagaaacaaatagataaattatataacctggaggccagatatactcaacagattcttattttag

SEQ ID NO: 90814 - DNA, 255 bp, Zea Mays
atgggagctccggctgggagctcagcacgcagcagatggagggcagagcgtgtagggaagagaaggacccgcgccattggagatgcgcaggaggccgagcgccaggagcaggcgcacgccatgggaggtggcagggccgagcagccaagcgccatggggaagaccgcagcagagccgtacaggagaagaccgacaggattgagaaggatgcgtcaacagataagaatgaggagtgacgtggggataggaaactag

SEQ ID NO: 90815 - DNA, 795 bp, Zea Mays
atggccaggctggctgcaacacgcatacagcaagggcgggggcacacgcgcatggggtggagctcgcccaggacggcgtggctacagaagggtaggcacaaacctcacctcggaaggaagctcgacgaagatgatcgcggagggtagctcagcgaagctccggcaagcagacgtcgcagcggtggctccggcttcctgctgatgcgtgaatgcgacgacgaggcaaggaaacagacgcgacgatgatggtgagcttttgcagtgctcccagcatgggctcgcgggcgcttgctggttgttgccggcgacttggcgaagtcttcccgtgcgacggaggcacctaggtgcgcgacagagatctgcgcgatgtggtaaatgacggcgggacgcaaggcagtgcggcgcggatggctgtcgagtagcgaaaagttagagggctgcgaggcgtggggagcggggcacagatttgaaggacgacggttgcaaaatcatgggcgtgtgcagcaacggagaaatagagcaagcagttacgattgagaagaagatggacctgacacacagggcccacggtgcagcatctatggctaccgatgggtgggcccctggccaaggcgtggctggatgctccctgctcccgtgcgtgcaagcgtgaggggttgggctcctctggccgactggttgctagacgagggggaaaagaaaaagagtttttattttatttttttcttgtcttcttttttaatccctatacgtagctatacatttatatatatatatatatatatgaatatatct

SEQ ID NO: 90816 - DNA, 441 bp, Zea Mays
atggatggtcgcatcctcaggacctccgcgtgcaacagcagcgtaccgtgctttttacttcacaagaaaaggttggccgaggtccctgctctagcgcaaggatttctactgcaacgattgcaacacacacagatattagcattcttgcaccatagacgcgagcctgtaaacaatattatagaatgggataagatgaccaacaacctttccactgtcatcattaggcatcgagcactcaggaacttttttgaaaccttcaagcttcaacgcttgaccctttgcattggtggcatagtgaatattgaactactggagagaatacaaaaacaatttacggatgataggtactacatatggcagatgaggcaactggccatggcatatatgttgcttcgacctgtgcagtttatggatgaagacgaagctgacctgcagatgtaa

SEQ ID NO: 90817 - DNA, 1380 bp, Zea Mays
ctcccggcctcggctgcaccgctctgtatactctccggtgaatcgctcccagtcccaagtccggatcgcaccgcgaagcgttcagccatgagctccgctgcagccgccgccaatgtcgccgtcatcggaggcggaatatccggctccgtgtgcgcgtcgctcctcgccgcgcggggcgtggccgtgacgctcttcgactccggccgcggcgccggcggccgcatggcgcagcggagggaggtgatggaggatggctcggagctgcggttcgaccacggtgcgccctacttcaccgtcaccaacggcgaggttgcccgggtcgttggtgggtgggaggcgcgggggatcgtcgccgagtggaaggcaacgttcgcgtgcttcgatctggccaccggaaaatttacggacttcgagaaggagggaacagctaaaaagtatgtgggagtgccagccatgaactcgatatgcaaatcactctgtctagaggatggtgtggtggccaaatttggtgtcactgtgggcaagatggattggcttcaagatcggagttcgtggtcactagctagcctggatgggaaagatctaggctattttgattatgttgtggcgacagataagaacatagcgtcaccagcattttctgggttgactggaagaccgccacctcttgatttgtcgtcatttccacgcctgcctacagcacttcaagatatcccagttcgtccatgttttgctcttatggtagcattctcggagccattggctacggtacctgttcatggtttctctttcaacaattccaattctctgagctgggccttctgtaacagcagtaagccagggcgtgcttgcgtacctccaaacagacaatcttgggtgctgcattcgacaactgagtacgcttccaaggtaataaataatattggtccacgcaaaccttcggcggaggcgcttgctaaggtggcagaggaattgttcagagaattccaggcgactggattaagcattccacgaccaatttttttgaaagctcacagatggggtgctgccttcccagccattgcaattagtggagatgataagtgcgtttgggacaagagcacgaacttggcaatttgtggagatttctgtacaagcccaagtgtcgaaggagcagtccttagtgctacgagaggagtttccgaaatccttgaatgtttaaggtgcccgtcaagtatctaacgttattgttaccatccccagggcccctctctgtgattggttgtatttatgcctgcattctcttacacaaataaacaattcaagccttatttggaggcacatattgttcgtttatgctaaataagaaataaagtaacagcagaagttgcaacctttttt

SEQ ID NO: 90818 - DNA, 546 bp, Zea Mays
atgcagcacttcttagagctcttgcggccgaggccctcgttgtccaccgtcccctccttccacgacaccttcttcttggcccggcgcttgaggcgcagcaccaccgactcaggagccggggccggggccggcgccgacgcgggcggggcggaggaggacgacgacgagggggacgggtcgatcgtcaccgtcacggatccggtcgaagaagactgcggcggcgcgcgcgttgccattgggggggtgggaaaatatggggttctcctcctctgtagcagcctagcagggcaggggcggcgcggcgtcgcgctcgggaacagcggcaaggcaaggcgacctcggcaaggcaaatcgctgggaggagattggggaacggccgaaatgcgtacggagcggaacgcggtgcgggaatcggagaggagcgatacggacctacggtggcctgagagtggattcgtcgttctacttcccgcaaaagcccaaaaagcatgccgcggcctgcttttgttgcttgtgtgggctttgttttgtcgcagtaaaaagtga

SEQ ID NO: 90819 - DNA, 417 bp, Zea Mays
tttaataaattccatagaagatttatcccaagcactaaatacttgcttcgcaggacataattatattggatctgagcacctgctccttggactgcttggtgagggtgaaggtgtggtggctcgtgtgcttgagagtctcagagctgaccctagaaatatccgtacacaagttattcgaatgattggtgagaccacagaagctgttggtgctggagttggcggcggcagcagtggtaataagatgccaactcttgaggagtatggaactaatttaacaaaattagcagaggaggtaatatttccgacccactgcattataattagtacaagttatgtaataaaactaatgttgatcatatgtgtagggaaaaatcagatcctgttgttggaaggcagccacaaattgagtgtgtcata

SEQ ID NO: 90820 - DNA, 781 bp, Zea Mays
cttcgcatgtgaactgcccactgccgcactgcgacaccgctccacccaccccaacctaggcagtaggcagtaggcatcaagcgtcctgcgtggctgcgtccaagtccaagcgccgtccggccaccagcgcaggtaccgagccaccgaggtaggagccagccaccgggcagatcccaggctgccagccaccggcgtccagcactccggctgccagctaccggccacccgcagcgcaggccacaccaatgggtagcaaccgcatggcgccatggctgccgacgaacaccagcagcgagacggccagaccccagagtccaacccaaggatggtttaggctactgaagggcaatgcactgattcttagactattgaagaatttacaggatgatgtgcaggagcagagcgtgggcagtaaatgcaaagaaaaaacacagttgcagaaattgctagcaatagactatacaagatagagccaaattgagcaaaaaaaaagaccattcccatttggatcaccattccctaaccacagcaaaatgaaggtggaaaattgagtagttgagtgccgtgtatgcacatgagcagggctaatactttataagaaatgtgctggttcttgatactcctccaaccagttgtagaagaattctggtttggctgaagtagttttacatccgaaagatggactttgtacagatatattctctgtcaacaatatgtatatccaggcggagatgaacttggagggaagcagatttacacaatttctgcaagtcgacccatc

SEQ ID NO: 90821 - DNA, 1974 bp, Zea Mays
cttcgcatgtgaactgcccactgccgcactgcgacaccgctccacccaccccaacctaggcagtaggcagtaggcatcaagcgtcctgcgtggctgcgtccaagtccaagcgccgtccggccaccagcgcaggtaccgagccaccgaggtaggagccagccaccgggcagatcccaggctgccagccaccggcgtccagcactccggctgccagctaccggccacccgcagcgcaggccacaccaatgggtagcaaccgcatggcgccatggctgccgacgaacaccagcagcgagacggccagaccccagtaattcgatttattatatcttcgtcgaggatagtgacacgtcacgtcagtgtccggccatcgcttgagaggcgcgaatgtcttcgctgcgccgtcacgatccaggctcgcatccccttctgacgcgcacccattgcgggcagacgtttgggctttgtgtggatggatcatggacgtacataccacgtttgtttttctaactaaatcttcacttctttgaatcgcagagtccaacccaaggatggtttaggctactgaagggcaatgcactgattcttagactattgaagaatttacaggatgatgtgcaggagcaggcagctactatgcaattttctatttattgtactcttgccacgaactgctcgtaattctctttcagtttgttgcagagcgtgggcagtaaatgcaaagaaaaaacacagttgcagaaattgctagcaatagactatacaagatagagccaaattgagcaaaaaaaaagaccattcccatttggatcaccattccctaaccacagcaaaatgaaggtggaaaattgagtagttgagtgccgtgtatgcacatgagcagggctaatactttataagaaatgtgctggttcttgatactcctccaaccagttgtagaagaattctggtttggctgaagtagttttacatccgaaagatggactttgtacagatatattctctgtcaacaatatgtatatccaggcggagatgaacttggagggaagcagatttacagtttggtgatattatatattatcaatcgcagtttattaatgttgcgcttcttctctattatcaaactattcacacaagacttcatgtgtgcgtgtgtgaaagattttattagtgtaaggtctttagggacagttcacattgaagttctggtgcctacataaattgtaaaccatacatgttgacatgggtacacatctcatggctatatacaactttgacatgaggtttatcttaagattgtgtgttccaataaaagctgttactatttcttgcatgtgcatgtctttaggatatacatttttctttatagatttatttatttacatcgcttactgcttactagcctattttttctagcaatttctgcaagtcgacccatcgtgttgaactaaaccatctctaatttcctacagcttcaactccaacaacagaggtaccacaatggacttcttaagaagaataggaatcgtgtacataagcttttttgctctaataaaataagagtggttgttgcaacaatggcattcagaatgggtcttgataagagtgacgttgaaccgatatgaccatttgactagcatacaaagttcaaatgtgacagcctatagctttaagcaatgttacactgcttatcacctggactgattcaagcatttgttcttttaaaggtggttcattgtatcttgccagaaatcgtagaagaatacatacatgtatattccatgcagattccccccaccctcccattttcttctcttttctagacatcttactatgctctttctaggaaactggtcgtgctgattcaacaaaagtcaaagtcttttgcacaaatgaatcttatcgtcttgtcctttttttcttgtaatttacatttccaacctgctctaagtttcctacataatgacttcaatc

SEQ ID NO: 90822 - DNA, 1964 bp, Zea Mays
cttcgcatgtgaactgcccactgccgcactgcgacaccgctccacccaccccaacctaggcagtaggcagtaggcatcaagcgtcctgcgtggctgcgtccaagtccaagcgccgtccggccaccagcgcaggtaccgagccaccgaggtaggagccagccaccgggcagatcccaggctgccagccaccggcgtccagcactccggctgccagctaccggccacccgcagcgcaggccacaccaatgggtagcaaccgcatggcgccatggctgccgacgaacaccagcagcgagacggccagaccccagtaattcgatttattatatcttcgtcgaggatagtgacacgtcacgtcagtgtccggccatcgcttgagaggcgcgaatgtcttcgctgcgccgtcacgatccaggctcgcatccccttctgacgcgcacccattgcgggcagacgtttgggctttgtgtggatggatcatggacgtacataccacgtttgtttttctaactaaatcttcacttctttgaatcgcagagtccaacccaaggatggtttaggctactgaagggcaatgcactgattcttagactattgaagaatttacaggatgatgtgcaggagcagagcgtgggcagtaaatgcaaagaaaaaacacagttgcagaaattgctagcaatagactatacaagatagagccaaattgagcaaaaaaaaagaccattcccatttggatcaccattccctaaccacagcaaaatgaaggtggaaaattgagtagttgagtgccgtgtatgcacatgagcagggctaatactttataagaaatgtgctggttcttgatactcctccaaccagttgtagaagaattctggtttggctgaagtagttttacatccgaaagatggactttgtacagatatattctctgtcaacaatatgtatatccaggcggagatgaacttggagggaagcagatttacagtttggtgatattatatattatcaatcgcagtttattaatgttgcgcttcttctctattatcaaactattcacacaagacttcatgtgtgcgtgtgtgaaagattttattagtgtaaggtctttagggacagttcacattgaagttctggtgcctacataaattgtaaaccatacatgttgacatgggtacacatctcatggctatatacaactttgacatgaggtttatcttaagattgtgtgttccaataaaagctgttactatttcttgcatgtgcatgtctttaggatatacatttttctttatagatttatttatttacatcgcttactgcttactagcctattttttctagcaatttctgcaagtcgacccatcgtgttgaactaaaccatctctaatttcctacagcttcaactccaacaacaggatggccccacacacttaatgaaaacatctctaatttctagcaaattcgactccgaggacaataaaggtaccacaatggacttcttaagaagaataggaatcgtgtacataagcttttttgctctaataaaataagagtggttgttgcaacaatggcattcagaatgggtcttgataagagtgacgttgaaccgatatgaccatttgactagcatacaaagttcaaatgtgacagcctatagctttaagcaatgttacactgcttatcacctggactgattcaagcatttgttcttttaaaggtggttcattgtatcttgccagaaatcgtagaagaatacatacatgtatattccatgcagattccccccaccctcccattttcttctcttttctagacatcttactatgctctttctaggaaactggtcgtgctgattcaacaaaagtcaaagtcttttgcacaaatgaatcttatcgtcttgtcctttttttcttgtaatttacatttccaacctgctctaagtttcctacataatgacttcaatc

SEQ ID NO: 90823 - DNA, 1899 bp, Zea Mays
cttcgcatgtgaactgcccactgccgcactgcgacaccgctccacccaccccaacctaggcagtaggcagtaggcatcaagcgtcctgcgtggctgcgtccaagtccaagcgccgtccggccaccagcgcaggtaccgagccaccgaggtaggagccagccaccgggcagatcccaggctgccagccaccggcgtccagcactccggctgccagctaccggccacccgcagcgcaggccacaccaatgggtagcaaccgcatggcgccatggctgccgacgaacaccagcagcgagacggccagaccccagtaattcgatttattatatcttcgtcgaggatagtgacacgtcacgtcagtgtccggccatcgcttgagaggcgcgaatgtcttcgctgcgccgtcacgatccaggctcgcatccccttctgacgcgcacccattgcgggcagacgtttgggctttgtgtggatggatcatggacgtacataccacgtttgtttttctaactaaatcttcacttctttgaatcgcagagtccaacccaaggatggtttaggctactgaagggcaatgcactgattcttagactattgaagaatttacaggatgatgtgcaggagcagagcgtgggcagtaaatgcaaagaaaaaacacagttgcagaaattgctagcaatagactatacaagatagagccaaattgagcaaaaaaaaagaccattcccatttggatcaccattccctaaccacagcaaaatgaaggtggaaaattgagtagttgagtgccgtgtatgcacatgagcagggctaatactttataagaaatgtgctggttcttgatactcctccaaccagttgtagaagaattctggtttggctgaagtagttttacatccgaaagatggactttgtacagatatattctctgtcaacaatatgtatatccaggcggagatgaacttggagggaagcagatttacagtttggtgatattatatattatcaatcgcagtttattaatgttgcgcttcttctctattatcaaactattcacacaagacttcatgtgtgcgtgtgtgaaagattttattagtgtaaggtctttagggacagttcacattgaagttctggtgcctacataaattgtaaaccatacatgttgacatgggtacacatctcatggctatatacaactttgacatgaggtttatcttaagattgtgtgttccaataaaagctgttactatttcttgcatgtgcatgtctttaggatatacatttttctttatagatttatttatttacatcgcttactgcttactagcctattttttctagcaatttctgcaagtcgacccatcgtgttgaactaaaccatctctaatttcctacagcttcaactccaacaacagaggtaccacaatggacttcttaagaagaataggaatcgtgtacataagcttttttgctctaataaaataagagtggttgttgcaacaatggcattcagaatgggtcttgataagagtgacgttgaaccgatatgaccatttgactagcatacaaagttcaaatgtgacagcctatagctttaagcaatgttacactgcttatcacctggactgattcaagcatttgttcttttaaaggtggttcattgtatcttgccagaaatcgtagaagaatacatacatgtatattccatgcagattccccccaccctcccattttcttctcttttctagacatcttactatgctctttctaggaaactggtcgtgctgattcaacaaaagtcaaagtcttttgcacaaatgaatcttatcgtcttgtcctttttttcttgtaatttacatttccaacctgctctaagtttcctacataatgacttcaatc

SEQ ID NO: 90824 - DNA, 270 bp, Zea Mays
atgttatttggactgaaacgagaaggacataatacaggtctaaagtcccgcatcctgactgtagctccacacaggttacaatctaacaacggtgacctcatgctgcatccagaatctccaacgggcaatttgcctttccccttatctttcttggctgatgcagaaaatgaatttttgttatgttcaacaaaatggggatataaccgttcgtcaggtccaactgagggtaaatttttagctgaatgcgttgaattttcttcacagtcttga

SEQ ID NO: 90825 - DNA, 1667 bp, Zea Mays
gtggactctccactcttcttctgcggtcggatcccccggcgggtcggactgcggagcacgggctccggcgagccgctgacgagggcctgtgcggcgaccgagctcgtggcgggagaagatggacgaagcgagcacctccgcgtccggcgccgcgacgaggcgcggcttcgtgcctgcgagatcgggagtttgttagttttgcagttttctataggttcacccagcagaacctcccagcttggaagccagcaatgacacctggatgtataatagcaatgttcttgattatcggaataattttcatacctttcgggcttctttgtctccaaacttcaaatcatattgcagaaatcatctaccgctatgatgttgactgtgtgcctgatgcttacagaggaaataggcaagcttatattaaggacagctcgatttctaagaactgtactctggaagcgaaggttctggaatacatgagagcaccaatttatgtttattatgaacttgagaatttctatcagaatcaccgcaggtatgtcaaaagtagaagcgataaacagctgcgttttggggcaaaatacacggccgactcgtgcagtcctgttgagtgggataataatggttccccaattgttccctgcggcttgattgcctggagcttattcaatgatacatatggttttactcgtgggtccaaggaaataaaggtcaacaggaaaaacatttcatggaagagcgaccgggagcataagtttggcaaacatgtgtttccttccaactttcagaacggaaccttgattggaggggggaaactcgaccctactgtcccactgagtgaacaggaagaccttattgtgtggatgaggacatccgctctccccaaatttcgaaagctctatggtgtgattgaagacgacctgcatgcggatgagaccatagctattttcgtaggaaacaattacaacacctacacttttggtggaaagaagagcatagtcctgtcgactgcgtcctggctaggcggcaagaacgacttccttggacacgcttatattgtcactggttcgttgagcatcatcatatcgattctctttgctctgatccatgtgaagtacccaaggccgcaaggtgaccccaattgcctatcctggaacaggaaaaacagcaatagctaaggggccccgcctgtatctaccatctatgagggcgcctccacatgaatcagtattacacatctgtatctgaaacatgtcagacactgtgccgcaaggttaatcccagatgatgaaaagaaactgcgtacaccatgtccatcagaaatactagttccaattccgacacatgcgctgggcatcaaggtcaacaccgggagtttttattattattattccagaatgcgcacggtaatttgaaaatgaaattgtggtggaaactgtggaatccgctaatccggtgcggatctgcacagagaaactctggtggctgctgtgactaatgaaaagtggttattctggcttggccgttgtccatcgagggagatgtaatacctgatcagccctgaaatcttaaagggctcccttctttcctcatgctgggacaacatttatttacatcgggtgtgttcttggagttctctccatcaccgaatatatgtcggcgtgattgctggt

SEQ ID NO: 90826 - DNA, 1637 bp, Zea Mays
cttcttctgcggtcggatcccccggcgggtcggactgcggagcacgggctccggcgagccgctgacgagggcctgtgcggcgaccgagctcgtggcgggagaagatggacgaagcgagcacctccgcgtccggcgccgcgacgaggcgcggcttcgtgcctgcgagatcgggagttttctataggttcacccagcagaacctcccagcttggaagccagcaatgacacctggatgtataatagcaatgttcttgattatcggaataattttcatacctttcgggcttctttgtctccaaacttcaaatcatattgcagaaatcatctaccgctatgatgttgactgtgtgcctgatgcttacagaggaaataggcaagcttatattaaggacagctcgatttctaagaactgtactctggaagcgaaggttctggaatacatgagagcaccaatttatgtttattatgaacttgagaatttctatcagaatcaccgcaggtatgtcaaaagtagaagcgataaacagctgcgttttggggcaaaatacacggccgactcgtgcagtcctgttgagtgggataataatggttccccaattgttccctgcggcttgattgcctggagcttattcaatgatacatatggttttactcgtgggtccaaggaaataaaggtcaacaggaaaaacatttcatggaagagcgaccgggagcataagtttggcaaacatgtgtttccttccaactttcagaacggaaccttgattggaggggggaaactcgaccctactgtcccactgagtgaacaggaagaccttattgtgtggatgaggacatccgctctccccaaatttcgaaagctctatggtgtgattgaagacgacctgcatgcggatgagaccatagctattttcgtaggaaacaattacaacacctacacttttggtggaaagaagagcatagtcctgtcgactgcgtcctggctaggcggcaagaacgacttccttggacacgcttatattgtcactggttcgttgagcatcatcatatcgattctctttgctctgatccatgtgaagtacccaaggccgcaaggtgaccccaattgcctatcctggaacaggaaaaacagcaatagctaaggggccccgcctgtatctaccatctatgagggcgcctccacatgaatcagtattacacatctgtatctgaaacatgtcagacactgtgccgcaaggttaatcccagatgatgaaaagaaactgcgtacaccatgtccatcagaaatactagttccaattccgacacatgcgctgggcatcaaggtcaacaccgggagtttttattattattattccagaatgcgcacggtaatttgaaaatgaaattgtggtggaaactgtggaatccgctaatccggtgcggatctgcacagagaaactctggtggctgctgtgactaatgaaaagtggttattctggcttggccgttgtccatcgagggagatgtaatacctgatcagccctgaaatcttaaagggctcccttctttcctcatgctgggacaacatttatttacatcgggtgtgttcttggagttctctccatcaccgaatatatgtcggcgtgattgctggt

SEQ ID NO: 90827 - DNA, 2066 bp, Zea Mays
acccgcagcggcaccagcaatcagcttctgccgctccgcagcgccccgagcgtgaggagagagacggtgatacagtggcagcgagcttgcagccgagcagcgagtgtccagtccagtgtgccagcgcgtgccagagccggagaaaaatgctggcacgattgtaggagcacgggcgatgcactaggcgcgggcagcgtagggataagacagcagcacagcagccgggccgatggctggacgtggccggcgcgcatgaccagcaagcagcacgccggggagcaccagccgttgccgcattccagcagcgacaggcaccgagccgaaaaccgccaggcgccagcccacgccgccaggcctagtgctccctcataaaagcgtcgcattcctctcacggtcacggcactcgccgcgccagcagccagcctatgagcagcgcttgcggcggcggcggttgtagggaatggaggcagcagccgtgggcgacggcgcgccagcgggccgctcccatcagggcgccaagcgcgcgcgcggcggcgccgtgaagggcagcgagacggaagcggcggcgtggggtcagccgccgccgctcccgccgccgccgggcccgggggcggggtcccggatctaccgcgtgggggcgagcgggggcaaggaccgccacagcaaggtgtacacgaccaagggcatccgcgaccgccgcgtgcgcctgtcggcgcccaccgccatccagttctacgacctgcaggaccgcctcggcttcgaccagcccagcaaggccatcgaatggctcatcaacgccgccgcctccgccatcgagaagctcccggagctcgacccggccgccttcgccgcccttcccgcgccgggcggcgcggatgccgccggcaatgataagcagcagcagcaggggagcaagtccgcgggcagcagcacgtcggagacgagcaaggggtccgagctctcgctctcgcgctccgacggccgtgggggcgccgccgcgcaggacagggtggtcaccgtggccagcacctcggcgcaggccgcgtccttcaccgagctgctcaccggggtggcgtcggccggcgccattagcgccggcgaacataggcagtcgtggcatcagcagcccaacgtctccgccggcgccggcgccgaccgcgtcggcattgcgcacaacgggaaaggcgcgcacgggctgtcgacggcgacgcacgccttttctggccccgccgccgccaagtttggcaatgcgcctccgttcggcctggtgccggcacagcctttcgacttcaccatccccatcgagatgcctcacttctcgctcggtcaggacacttcggcggcgtcctcgtctggcgccggggactacagcctcagtttttccatgtcctcgggtttcttgggtgccaatagggggacccttcagtccaattcgcagtcgaacttctcaggccatcatcaccagcagctccagaggctggacggcccgctcttgtttggccacgcccacgccgcggcggcgatgcatcccgcatccgagaaccagctgaccgcatcggcggcgttacagctctgggacggactccggcactccggcatgaaggagaagggcaggagctgattgcatattcttcaatagaaaaccgaagacgtcctattgctgggggccgttccggcaagaattctcttgtggagctgctaccattttgttgcggtgacgacttgtcagatcgccgcacgcaaggctgctatggtcaccatatcaaccatccatcagcgatagctggtgccgttgatcaaacaatcctgtgccttcttttttctttcatttccgtcgttgatgctgttgtacagattttgtgggagatgagagtttaaacaagtcgtcgtaggagtgctcggtaatcgcgagagttctagtggctccccgcgtctgactgctggtctacattattttgaggttttggatgaacaggtccactggacaagcgttgtggtccctgatggctcgttctaggtgctgagggttgaatatttcgatatggaaagatgatccactcggtgaa

SEQ ID NO: 90828 - DNA, 1457 bp, Zea Mays
gccagcctatgagcagcgcttgcggcggcggcggttgtagggaatggaggcagcagccgtgggcgacggcgcgccagcgggccgctcccatcagggcgcctgtcggcgcccaccgccatccagttctacgacctgcaggaccgcctcggcttcgaccagcccagcaaggccatcgaatggctcatcaacgccgccgcctccgccatcgagaagctcccggagctcgacccggccgccttcgccgcccttcccgcgccgggcggcgcggatgccgccggcaatgataagcagcagcagcaggggagcaagtccgcgggcagcagcacgtcggagacgagcaaggggtccgagctctcgctctcgcgctccgacggccgtgggggcgccgccgcgcaggacagggtggtcaccgtggccagcacctcggcgcaggccgcgtccttcaccgagctgctcaccggggtggcgtcggccggcgccattagcgccggcgaacataggcagtcgtggcatcagcagcccaacgtctccgccggcgccggcgccgaccgcgtcggcattgcgcacaacgggaaaggcgcgcacgggctgtcgacggcgacgcacgccttttctggccccgccgccgccaagtttggcaatgcgcctccgttcggcctggtgccggcacagcctttcgacttcaccatccccatcgagatgcctcacttctcgctcggtcaggacacttcggcggcgtcctcgtctggcgccggggactacagcctcagtttttccatgtcctcgggtttcttgggtgccaatagggggacccttcagtccaattcgcagtcgaacttctcaggccatcatcaccagcagctccagaggctggacggcccgctcttgtttggccacgcccacgccgcggcggcgatgcatcccgcatccgagaaccagctgaccgcatcggcggcgttacagctctgggacggactccggcactccggcatgaaggagaagggcaggagctgattgcatattcttcaatagaaaaccgaagacgtcctattgctgggggccgttccggcaagaattctcttgtggagctgctaccattttgttgcggtgacgacttgtcagatcgccgcacgcaaggctgctatggtcaccatatcaaccatccatcagcgatagctggtgccgttgatcaaacaatcctgtgccttcttttttctttcatttccgtcgttgatgctgttgtacagattttgtgggagatgagagtttaaacaagtcgtcgtaggagtgctcggtaatcgcgagagttctagtggctccccgcgtctgactgctggtctacattattttgaggttttggatgaacaggtccactggacaagcgttgtggtccctgatggctcgttctaggtgctgagggttgaatatttcgatatggaaagatgatccactcggtg

SEQ ID NO: 90829 - DNA, 237 bp, Zea Mays
atgacgatggactcgcagacggggcgggcagcccgcgtggaggagcaccggcaccttgccgtgcgccgggttggacaccgtggccgagtactcttcggaccatctgatcgacttagctacatagctataaaaaagatatttcctgatgaatcaaaatcgaatgaaccatctaaactaatgctgcgaattaggacggaccgtcccgatcaagatagtgatgaatctggacacatataa

SEQ ID NO: 90830 - DNA, 626 bp, Zea Mays
gccgtgaaaacaaattccaacagactcgccttcgtcctcacttctccatcgtgctcggcatcacctccccgtcgctagccatatttcccgagctgttgtgactcgccatctcccacgagcacctcctgctcccgcgcactgatgctctcgctcccgcgcacttgcccttgagttttgagaactcgcctccgtgacctagcaattccgccgcattctttgctagccctcggtcatccatgtataggccgccgcatccccgtacaacggaggctggggatattgggtcgctgattggatctgcagagaggcttcttccttcccagtttgtgccaggacgcctggaacaagagccaggtagaggtaggacggaggtcgactggatgccagacgatgtgtccaattctactccattccacggtgagtctcactgctaagatggtggtgcaattaattaattttatccttgttgtttattttgcacgaacagaggaatcgtttgtgaattggatgatgttgagatccctaaactgctgagatgcctgttgtattgcattgttaattaagatactcttgaattagataatctcatattcatttccatgccaacatcaaaacgaagacaataa

SEQ ID NO: 90831 - DNA, 1061 bp, Zea Mays
tgtgaagacaacaagaagaaattcataaccatttattcggttgtggtgtacgaggcaacacgtacggcgctgccaccgctgacaatagaaaatacaacgacgacgaactcatgaacacgaactgctctgctgagcacactaaaaccaaaactagattattggttcgtcattattactcccggccagccaccggccgaccgatggatgctctactcgatgcccagcctcttcttcatcccgcagacgaagtcgtagaccttctcgggcgggtagaggttcttggcgacgctggggcgctcggcgcagcgcttggcccaggcggccagcctcgggcactccttctccacgctgacgccgccgaagcggtcgtaggcgaggaaccaggacgtgaagggcacgagcgcgacgtcgacgaagccgagggcgtcgccaccgaagaagggcccgtcgccgagcgcgccctccagcgtgcggaggatctcgaccatctcggcgcgcgcctgcgcctggccgtcccccttgagcttccacagccgggtgccgcagtcgtacagcttcttgtcgacgtagtccgcccagaagcgggcctgcgcgcgcgcgtaggggtcggcggggagcagcgccggcgccgcctccgggaacgcctcgtcgaggtactgcacgatgacgagggactcgcagacggggcggccgtcgtgcagcagcacggggatcttcttgtgcaccgggttggcgcggaggagcagctcgctcttgttcctcaggtcctgctccaggtactcgtaggccaggcccttctcgtccagcgcgatgcggcagcgctgcccgaatgggctcacccagaagtccagcagctgcaggccctgcttcttctcctcggccatgtcgagccttttcttgttctcgcctacggcgttagctacttagctgcgtgtgtgaggtgagcgtgcacttgtgcggtgagcaatggcggatcgatgctagctgtggaggtgaggatcgacgaggggctcttgctttatttataggaaccgatagcgagagggtggagcagagcttca

SEQ ID NO: 90832 - DNA, 1722 bp, Zea Mays
cttgcagttgcaggctagctagctgcaaaaggtacgagacatcatggcaccgctagtgttgaagagcagtagcagcggcacctctattctggtgatcggtggtacggggacgatcggccgccacctggtgacggcgagcctcgacgccggccaccccacggccgtgctcgtccggccggcggccgcggccgaggaccccgccaaggccagcctcctggaggcgttcaagaccagaggggcaagccttatctacggggacatcaacgatgccgaggcgttggttgcagcgatcaagcaggccggcgacgtggtcatctccgccaccggccacagctcgccggaagaggtggagagccagctcaggattgtggccgccataaaagaagcaggcaatgttaagcggttcttgccttctgaatacggctgcgacgtggagcatgtggcggagcacatggtggagccggcgaggagcatcctcggggccaaagtccgagtccgccatgctctcaaagctgcagggattccacacaccatcgtctgcagcaactgggctcagggcttcctgctgccaagagctggggaccctcagctgccagacggtcgtcctccggacaccaccgccaccatcttcggcgacggacaagtacaagcgacgttcgtgaatgagcaagacatgagcagggtggctatcaaagccgtgcaagacccccgcacactcaacaagaaattacacgtgtgccctccaaccaatctctgctccctcaaccaactagtctcactctgggaggataaaatcggcaagcccctccacaggcactatgttgctgaagaagagttactcaagaaaatacaagagtctccgtttccactcaactttcagctggcgattgtgcacgcgtcgtttatcgctgccggccgtgcccctagcaccaaaagaaacatccacaccaaggatagccatggggagacgatgacacaaggcgtggatgatgtggacgcaacgcagctgtacccgggcatcagctacatcaccgtcaaagactacctggacgctctccctccccacaacacactacgatctgacggttcacgaccggactctagatgatcaaccaatatgcaagcaagcacacgctcacatcgtcctcgtaccattttaggagtctgcataaatatatctccgtttacaaatgtcacaccgttgattttttttcaaaacttttatcattcatcttatttaaaatatttattaaaaatgtaaaattagaagaagcactaaaacaaccttaagtgataaaacaaatcacaacaaaataaaagttttttttaaataagacgagtggttaaagtttcgaaaaaagataaagtgtcatatatttgtgaacagagagggtaataaaataatacggtgtgtatgtgcatgcacggagacgtctgactgaatcattcgtcctaccttataccattttagatcttgtttggatatagtcggattcatattagtagacacgtgctaagatggatcggagtacaacttcaactatatactatctcaatgtatgtggattaaagtgaacctaacaacatccaaataaggcatatagagtattatctctcctctctttgttttgggttttaagtgctctcgagggtcagatatgatggagagtactacataatagaaaatattactatatatataatattatgtatgtgtttaat

SEQ ID NO: 90833 - DNA, 1065 bp, Zea Mays
atggcaccgctagtgttgaagagcagtagcagcggcacctctattctggtgatcggtggtacggggacgatcggccgccacctggtgacggcgagcctcgacgccggccaccccacggccgtgctcgtccggccggcggccgcggccgaggaccccgccaaggccagcctcctggaggcgttcaagaccagaggggcaagccttatctacggggacatcaacgatgccgaggcgttggttgcagcgatcaagcaggccggcgacgtggtcatctccgccaccggccacagctcgccggaagaggtggagagccagctcaggattgtggccgccataaaagaagcaggcaatgttaagcggttcttgccttctgaatacggctgcgacgtggagcatgtggcggagcacatggtggagccggcgaggagcatcctcggggccaaagtccgagtccgccatgctctcaaagctgcagggattccacacaccatcgtctgcagcaactgggctcagggcttcctgctgccaagagctggggaccctcagctgccagacggtcgtcctccggacaccaccgccaccatcttcggcgacggacaagtacaagcgacgttcgtgaatgagcaagacatgagcagggtggctatcaaagccgtgcaagacccccgcacactcaacaagaaattacacgtgtgccctccaaccaatctctgctccctcaaccaactagtctcactctgggaggataaaatcggcaagcccctccacaggcactatgttgctgaagaagagttactcaagaaaatacaagagtctccgtttccactcaactttcagctggcgattgtgcacgcgtcgtttatcgctgccggccgtgcccctagcaccaaaagaaacatccacaccaaggatagccatggggagacgatgacacaaggcgtggatgatgtggacgcaacgcagctgtacccgggcatcagctacatcaccgtcaaagactacctggacgctctccctccccacaacacactacgatctgacggttcacgaccggactctagatga

SEQ ID NO: 90834 - DNA, 1258 bp, Zea Mays
atggttatgagctttagccttgtgcttgcttttatgccaggatttctcattctttatatactccattcgctagatgtagctggcaatccacctccaaaaccatgggaacgtgcaggaaattcatctggcccagtgccttttaagccgccctctggtggtagcaccagtgatgttgttgaagcttctgggacagcaaaacatggagaagttgtttctgctgctggaaacaatgttgcctccaatgtaaacagcacaatttcaatgcctgtgcccccaaggccttggcagcagcaaggctatgaaaactcttatgggggttatggctccaatatgtatagctcttacggcggatatagtggaccctatggaaataacatgtactcaggttatggaggaggttatggcggtatgtatggaggttctggaatgtatggtggaccaatgtatagcggtggaatgggaggaccctatggtggttatggtatgggcatgagtccctataatcagggaccgaattcatttgggccacctaccccaccccctggtttctgggtgtccttcctacgagtgatgcatggtgttgtgaatttctgtgggagggttagcttccttgttagccagaacactcaggcatttcacatgttcattactgcacttttgcagttatgtgatcgggctggaatgctttatggtgagcttgcaagatttgttctacgtttgctggggatcaaaagaaaaccaaagaagagcggtgttaagggcccaggagctccatcatcggagggacgaggccagcagcttgttgaggcgccgaaagttaactcgtgggacagcgtgtggactgagaatggcaagggaaattaaagggcccgtttgggcacagtgaggcagttctcctgaaaggagaggagggcgagtttgcttgtggaagagaaatctgcgaatatctgttcggatgcgttttgcatatgcatagaaggcatagacaaggaaccccttatgcctttttgtatttgtcatgttcttccatggtgtacatatagatcagtgtgcaatgagaaatgtgagcgggtaatgtacggctttcccccccaaaatattactgcaatagtaccgtttgtacttaaaaaagacggaacacaatatagatgatcctttttatttggcctgttgctacatataaggttgtttatacatggagtcttggcatgtggtggtgccaggtattagcagctgttctgttcatgggatgaaagtg

SEQ ID NO: 90835 - DNA, 616 bp, Zea Mays
cgcctctccctgcagtgccccctacatggcgttcgtcttctctctcacgctagatcaagcggagcactattcatcccccatcctttccttctggatgatggcagcgagcacgccttggcgaagaaacctcccgctcctttgcggtgggtttggacccgagcgcggaggaaggccgactcggatccgctcgatctcgccgccgaccaggcccaacagcaggacgttgcggcgcaggaagcattcccgtcgatgtactccgagcaggcaccgcaagaacaaccctcactgccgcaggtgttcttcatcgccacatccgacgtccttgattcagtcaatcgatgctgctctcaaatctagttcccctcccatcgccgctccatctcaaagcacagatcttgacgtactccatcaggggaagtagaagaccagctcgaagagtaggaggcgtacctgctcgattcagtcaatcgatggaagacgaagagtagaaagcgtacctgctcgattcagtcaatcgatacttaattatgtttttctaaaatttagaaattaaataatacgtaattatacacattatgtgcccctcaataatttatggagattatatgtctaattg

SEQ ID NO: 90836 - DNA, 671 bp, Zea Mays
cgcctctccctgcagtgccccctacatggcgttcgtcttctctctcacgctagatcaagcggagcactattcatcccccatcctttccttctggatgatggcagcgagcacgccttggcgaagaaacctcccgctcctttgcggtgggtttggacccgagcgcggaggaaggccgactcggatccgctcgatctcgccgccgaccaggcccaacagcaggacgttgcggcgcaggaagcattcccgtcgatgtactccgagcaggcaccgcaagaacaaccctcactgccgcaggtgttcttcatcgccacatccgacgtccttgattcagtcaatcgatgctgctctcaaatctagttcccctcccatcgccgctccatctcaaagcacagatcttgacgtactccatcagacgaatgtgtcccaggggaagtagaagaccagctcgaagagtaggaggcgtacctgctcgattcagtcaatcgatggaagacgaagagtagaaagcgtacctgctcgattcagtcaatcgatacttaattatgtttttctaaaatttagaaattaaataatacgtaattatacacattatgtgcccctcaataatttatggagattatatgtctaattgaaaaattaaatcaattattcaatggatttgtacgttaaga

SEQ ID NO: 90837 - DNA, 775 bp, Zea Mays
cctctccctgcagtgccccctacatggcgttcgtcttctctctcacgctagatcaagcggagcactattcatcccccatcctttccttctggatgatggcagcgagcacgccttggcgaagaaacctcccgctcctttgcggtgggtttggacccgagcgcggaggaaggccgactcggatccgctcgatctcgccgccgaccaggcccaacagcaggacgttgcggcgcaggaagcattcccgtcgatgtactccgagcaggcaccgcaagaacaaccctcactgccgcaggtgttcttcatcgccacatccgacgtccttgattcagtcaatcgatgctgctctcaaatctagttcccctcccatcgccgctccatctcaaagcacagatcttgacgtactccatcaggtacgaagcgcttcgatgatgttcatttttatttggtttgtacttgctggagcataaccttcgttcttaggttttgtagttcttcaatagtacatgtcttgcaaaagatccgtagaaccatgtacaggtttttaaactacgatttgctgaaatacttgcatgctttgtggaagacgaatgtgtcccaggggaagtagaagaccagctcgaagagtaggaggcgtacctgctcgattcagtcaatcgatggaagacgaagagtagaaagcgtacctgctcgattcagtcaatcgatacttaattatgtttttctaaaatttagaaattaaataatacgtaattatacacattatgtgcccctcaat

SEQ ID NO: 90838 - DNA, 3223 bp, Zea Mays
ggacaacgtcgaactttggcccagcaagctcacaccccgaaattccacctcaaaaatcaaaaagagaaaaaaagaaagaaaaaaaaggcgaaacccttctctcccccgccccaacccgatctctcgctgcctgcctccctccggtcccccgtggccccgtcccctcttcgccaccgcaccgactcgctcacaaaatcctcacgccggactcctccgccgcctccgccgcgccatgcccgtcggcgcctgattcatgtctcagccccacgccgccgctcccgcctcgaagcgccccttctcgtccaccaccacatccccgtctccgacgtcctcccctgcgacgccgcttatgaagaaggccaagcacccggccgccaccgcctcctccgttgggacggtcgagaagaacggtatccatcttgataccgccgccgccgccgccacgggcgggggccgaacgaacggcgaggaggatgcggaaatggtgctcgtggaccaagatgagctccccgcgcccagcgcgccggcctccgcgggcgttgccgccaacctcttccgaaagaaggccacgcttccgcagccgtcgacctccgcccgcaagcccctccgcatcagaataggcgcgcccccaataccttattatgcgaattgcttactctgcgagtcttgtgcgattgatcgtcatcgtcactgagggggtgtggtcgcaattgattccagtcctgttgtttcggatatgttacttgccatctcgcgggctagcccaaagttttttcatgcctgacattagggttaaaagtcatatatccgtttacatatcacttgtttacctttcactaccagccgccacctggacccacctaaaattagctctttgatggacgcaatatggaaattggctagatctgcacattgtttctggaaaactggtgttttggtagcctattatggcatttcgggttttcttttctcgagagttgattattgttgggacatttcatattttatacctgctcataccatcagactgatcagaagagagatttgccataggaaacataatacttctgttgagcggctgcgtttagttgtttgcttctgtatatttcaagtactttgtaaattgccacacggttcacctgtctttctaactagccgttcataagcatttgattaacacatatgtaaacgagagagaaaccgagaaggatctgttttccactgagaagaattaggcacacaaatctagtcaaaggggaatataatcttggtggtggactggtatacagacacctcacccccagcaactgagctggagtcagttcctgtttgattaattgtacccctagtaccatggtttggcttggcattcgttggcacctatgtgtgacaacctccaatattgggaaatgacagcccaattcctttgaaacaactcattatgatgtacttcagcacacactatttgctgattccttttacttgctacgacaccagttgctggcaaattcatattgaacgcatgtatgcaaatcttataaatcacgagtcactagcaaagacatgctgaacatgtgtatttgaaaatttgaatatcagaattcattgggtttccttttcacaacctttgcttaatgccatagcactatgtctaaatgccattctggccatcatgcactcattaggtcaaccaaaactgccaaaaaacttcgaagaggatacatggacgattttgaaggatgctatcacagctatttttctcaagcagaaactttcttgtgatgttgagaaactctatcaggctgctggtgatctttgtctacacaagctaggggcaaacctatacgaacgaatcaagaaagaatgtgaaatacacatagctgaaaagatatcagcattagtgggccaaagcccagatttggttgtatttttgtctctggtccaaagaacatggcaagatttttgtgatcagatgttgattattcgcggtattgctttacttcttgatgtaaaatatgtcaagaatgtagcaaatatttgttcagtatgggatatggggctgcagctgtttcgcaagcatctatcactatccccagagattgaacacaaaactgtaactggccttctcagattgattgagagtgagaggcttggtgaagcaatagataggacattacttagtcatcttttgaagatgcttaccgctcttggaatgtattctgagagttttgaaaagccctttcttgagtgcacttctgaattttatgctacggaaggtgttaaatatatgcaacaatctgatattccagactacctgaagcatgtagagtcgaggttgcaagaagaacatgaaaggtgcattctgtatttggaagctaacacgaggaagccactgatcgcaactactgaaacacaattgctagaccgtcatacatctgcaattattgagaaggggttcgcaatgctcatggatgcaaatcgtataaatgacctcttgaggatgtacaaccttttccagagggttaatgctgttgagctgctaaaacaagcacttagttcatatatccgggctacaggccagggcattattatggatgaagaaaaggacagagagttagttccatttcttcttgattttaaggcatccctcgacaaaatattggaagaaagttttgctaaaaatgaggctttctccaataccatgaaagattcgtttgagcaccttatcaatctaagacagaaccgtcctgcggaattgattgcaaagtttcttgatgagaaacttcgagctggcaataaagggacatcagaagaagagctggagggcatacttgataaagttttggtcatgtttcggtttatacaaggtaaagatgtatttgaggcattctacaagaaagatctagctaagaggttgctgcttgggaagagcgcatcaatagatgctgaaaaatcgatgatcacaaaactcaaaactgagtgtggaagtcagtttaccaataagctggagggaatgttcaaggacattgaattatccaaagaaataaacgattcattcaggcaatcatctcaagctaggacaaagcttccctcaggcattgaaatgagtgttcatgtgcttacaacaggctattggcctacatatccaccaatggacgtgaaactcccacacgaactgaatgtgtatcaggatatatttaaagagttctatttgagcaagtac

SEQ ID NO: 90839 - DNA, 2036 bp, Zea Mays
ctcgctgcctgcctccctccggtcccccgtggccccgtcccctcttcgccaccgcaccgactcgctcacaaaatcctcacgccggactcctccgccgcctccgccgcgccatgcccgtcggcgcctgattcatgtctcagccccacgccgccgctcccgcctcgaagcgccccttctcgtccaccaccacatccccgtctccgacgtcctcccctgcgacgccgcttatgaagaaggccaagcacccggccgccaccgcctcctccgttgggacggtcgagaagaacggtatccatcttgataccgccgccgccgccgccacgggcgggggccgaacgaacggcgaggaggatgcggaaatggtgctcgtggaccaagatgagctccccgcgcccagcgcgccggcctccgcgggcgttgccgccaacctcttccgaaagaaggccacgcttccgcagccgtcgacctccgcccgcaagcccctccgcatcagaataggtcaaccaaaactgccaaaaaacttcgaagaggatacatggacgattttgaaggatgctatcacagctatttttctcaagcagaaactttcttgtgatgttgagaaactctatcaggctgctggtgatctttgtctacacaagctaggggcaaacctatacgaacgaatcaagaaagaatgtgaaatacacatagctgaaaagatatcagcattagtgggccaaagcccagatttggttgtatttttgtctctggtccaaagaacatggcaagatttttgtgatcagatgttgattattcgcggtattgctttacttcttgatgtaaaatatgtcaagaatgtagcaaatatttgttcagtatgggatatggggctgcagctgtttcgcaagcatctatcactatccccagagattgaacacaaaactgtaactggccttctcagattgattgagagtgagaggcttggtgaagcaatagataggacattacttagtcatcttttgaagatgcttaccgctcttggaatgtattctgagagttttgaaaagccctttcttgagtgcacttctgaattttatgctacggaaggtgttaaatatatgcaacaatctgatattccagactacctgaagcatgtagagtcgaggttgcaagaagaacatgaaaggtgcattctgtatttggaagctaacacgaggaagccactgatcgcaactactgaaacacaattgctagaccgtcatacatctgcaattattgagaaggggttcgcaatgctcatggatgcaaatcgtataaatgacctcttgaggatgtacaaccttttccagagggttaatgctgttgagctgctaaaacaagcacttagttcatatatccgggctacaggccagggcattattatggatgaagaaaaggacagagagttagttccatttcttcttgattttaaggcatccctcgacaaaatattggaagaaagttttgctaaaaatgaggctttctccaataccatgaaagattcgtttgagcaccttatcaatctaagacagaaccgtcctgcggaattgattgcaaagtttcttgatgagaaacttcgagctggcaataaagggacatcagaagaagagctggagggcatacttgataaagttttggtcatgtttcggtttatacaaggtaaagatgtatttgaggcattctacaagaaagatctagctaagaggttgctgcttgggaagagcgcatcaatagatgctgaaaaatcgatgatcacaaaactcaaaactgagtgtggaagtcagtttaccaataagctggagggaatgttcaaggacattgaattatccaaagaaataaacgattcattcaggcaatcatctcaagctaggacaaagcttccctcaggcattgaaatgagtgttcatgtgcttacaacaggctattggcctacatatccaccaatggacgtgaaactcccacacgaactgaatgtgtatcaggatatatttaaagagttctatttgagcaagtac

SEQ ID NO: 90840 - DNA, 495 bp, Zea Mays
agtgtggttttgatgttgttcaatgacgcacaaaaattaagcttccttgacatcaaagattccactggtatcgaggataaagaattgagacggacactgcaatcgcttgcatgtggtaaagttcgggttctccaaaagataccaaaagggagagatgtagaagataaggatgactttgtattcaatgaagattttagtgctcccctctatcgcataaaggtaaatgcaattcaaatgaaggagacggtagaagaaaacacgagcaccactgagagagtgttccaggatcggcagtatcaggttgatgcggccatagttcgaataatgaagacgcggaaggtcctgagccacacccttctaataaccgagctttaccagcagcttaagttccctgttaagccagctgatatcaagaaaagaatagagagcttaatagaccgggagtacctggagcgggacaggagtaacccccagatctacaactatctggcttga

SEQ ID NO: 90841 - DNA, 550 bp, Zea Mays
ccaccgcccaccaccgctcaccgagctcgcggtcgccggagatcaccgttctccggcggccccgcgtacgccggtatcagtaaaggttggttatccacatcgaaaccccagctcgcgcctcccacccgagtcagtcacgccgctaaatttggctcatccgccattcagaccagcgccgctagggttttggacctatggatccgctccggagctacctgggccggatcctcctcgaagagatcacaccggtggtgatggtgctgtccacaccgctcgccgaggccgcctgccgtaagaacggcctcagcttcgtcgacatgctctccccgttctcgctcttcaaaaaaatcgacgtgcccgtgcggacggcgagcgaggttccgtacaggctgcaaatgtttaagatccggatggtttacgcgtccgacgtccggaaggaggactgcgaggtgatcctcaaacattctgacgttgctatcctaggtgtatgtagctacttcggtgtttgatgacctcgatgtttgggaacaggtggcagacgagaagatta

SEQ ID NO: 90842 - DNA, 4609 bp, Zea Mays
ccaccgcccaccaccgctcaccgagctcgcggtcgccggagatcaccgttctccggcggccccgcgtacgccggtatcagtaaaggttggttatccacatcgaaaccccagctcgcgcctcccacccgagtcagtcacgccgctaaatttggctcatccgccattcagaccagcgccgctagggttttggacctatggatccgctccggagctacctgggccggatcctcctcgaagagatcacaccggtggtgatggtgctgtccacaccgctcgccgaggccgcctgccgtaagaacggcctcagcttcgtcgacatgctctccccgttctcgctcttcaaaaaaatcgacgtgcccgtgcggacggcgagcgaggttccgtacaggctgcaaatgtttaagatccggatggtttacgcgtccgacgtccggaaggaggactgcgaggtggcagacgagaagattaagcctgtagtttctgaggccaatgagaaggctcttccggatttgctttcagacccgcctcaggctgaagatgtacttggaaagcctgaggccgagctgtgcccattgtggattaagaagttcaatagagaactaatgcgaacactctcattttcggagcatgaaacgtttgaccatcccgtggcatgtcttctagttgtgtcatcaatggacaaagaaccagtcaataaatttgttgatctcttcaacacaaatcagttgccatctcttttgaatgaaggcataatggatccacagattttgaagcattatcttgtacttcatgaccagcaagaggggccacaagacatagctgtgaatgtcttagctgaaatgaggagtacccttggtctgaatgactgtaaattattatgcataaattcgtctacagaagcaggtggtagtaatgctgacaattcatggctaccttataaagctcttgttttgaacaatcatgatggatcctgtattcttagtgtggatgatctgaatgagataaaggacttcatgcaagattttgtttcaaaccatatcatcccctacatggaacaaaagatccgtgtcctcaatcagcaggtagccacaacaagaaagggttttagaaatcagatcaagaacttgtggtggagaaaaagagatgatgtcccagaagctccaaatgggccaatgtatacattcacctccatagaatcacagatcagagtacttggtgatttcgccttcatgttacgggactacgagcttgccttgtcaaactacagactactcgctactgattataagcttgataaggcttggaagcgatttgctggtgtacaggagatgagtggactttgctatttcattttggatcagtcgaggaaggacgcggagtattgcatggaaaatgccttcagtacatatttgagaattggatcttctggccagagaaatgctactagatgtggcctttggtgggctgaaatgcttaaaacaagaggacagtatagggaagcatctaatgtgtatttccgtgtttctaatgaggaaccttctttgcattctgctgtactgcttgagcaagccgcttgttgctatctattatgcaatccacccatgcttcggaaatacggatttcacctaatcttagctgggaatagctacttcgtgtctgatcagaaacaacatgctgttcgggtgtacagaaatgctttgttcgtttacaaacaaaacccttggagttacatcaacaatcatgtacactttaatattggaaggtggtatggagttctcgggatacttgacgtagccatcaagcacttgcttgaggtcattgcttgtagccatcagtcgctgactacacaaaacatgttcctcaatgattttttccattatgttcagagcatggggaagaaatttgatgtgtacaagctccaacttcctgtttttaacatgtcatctctcaaagttctacatgaggatcatcgcacttatgcatcacatgcagatgttggcgttagtgaaagcacgtggcaggagctggaggaagaattgatcccatcatcatcaattgtcaaaactaattggctggatactcagccaatgagaaaatacaaggactcctgtatttgtgtggctggagaagcagtaaaattgagtgttgaacttaaaaatcccctccaaattcctgttgctgtttctggcatctctattatatgccagctttccagcactttggatgcattaagttctgatgttagtggactggacttggatggtggggaagataaggttaacacagagccatctatttcaatgttggagactgatggagataagtttacattgtcaaagcttgacattgtattaggaggaggtgaaagtaaaagagtgcaacttgatgttactccaaaggttgaaggtattttgaagttggttgggataaggtggactctttcagagtcagtagtaggttatcaatactttgaatttaatgcacagaaaaaaatcaagaaagggaaaagaggcccacaccgttcttggaataacagcctggttgtaatcaagggtttaccaaaacttacaggatctattgatcgcatgcctacaaaagcgtttgctggtgatttaaagctgcttacactaaatctgagaaaccattccgaatatgctgtgaagggtataaaaatgaaacttagcaacccaagatttttaattcccggcgattcatcggacattggcctcaagttcccacactgcttaaagaggcacgtgcaatcagaaagcagtgttgtatcagccaaaactatgaaggacaatttcaagagtctgctctttgcatttcctcaggatatagaaattcaagcaggggcagcactctcttggcctatttggtttcatgcggcaactcctggaaatgtttctctttatatatctctgtattacgaaatggggagttccagtgatattaaataccgtacactacgcatgcacttcaatcttgaggttttgccgtcacttgacgtatccttttctgtaagcacgtcctcatcaagattgcaagagtatattgttcgcatggatgtcatgaacaagactccatcagagtcatttgtgcttcatcagttatcatgtgtcggtgataaatgggcagtttcagcattggcggcgtgcagttcaatcaactctgttgaaacagtatcagaaaatcaggctgtgtcgtacttcttcaaaattaaggattgtgaggcggattcttgtaaagaggcagaaagtgattcctgcacaagcgatatggctttgtgtccaggaagtagcactgatctgtttgacattgcacgatctccttttgttgattttcaccatcaagaaagatgcaggcaagtgaagatggcaaaggggccatgcagccttcttgattttgttctaatctcaaaggcagttgataactcttccaagcctactccagacttcgaactactttctcatcacacatgtcattgcagtgctctaagccagaaccctatatggtggcttatggaagggcctcggacaattagtcatgatttctcaaagtcttattgtgaggctaacctccaattggtcattcacaattcagaagctcataagattttggtgagagtggtcacttttgatgtaattccagagaaaaccgtccatcctcatgactcaaccagtgctcagggtggatggtatgatgtatcactggaaagtgacgtaaaggccatctctagttccaagagtacacatcaagagaagcgatcttcgaagagcattccaccatatgtttggtgttcattgagttgtgctcaaatcgagctccaacctgacagttgtgctagagttcctctaaaagtgtgcatatttgcaccgggcacatacaatttttccaattatgagctgcaatggaaagtgcatctatctgagggaccacatgtgggtgaaaatgagaaccggttatctggcggtggtctaggctatcctttctatgtcactgtccttcaaggtgtctaagtaattatcaggattcaagaagtaccttcttgagcgtcaatatagaccagtgcaaaactcaggaactacacccaattgcaacgggctgatgataataggtgccagccagtccagtttgtgcaaagatctgccccggaagttccctgactgaatatacttggatacgctcatggttctgcttcggtaccgatatatttacacgtcattttgaaggatgagttctggtgagtacatgtatacaattgtcgctgggaacaaaaactaacggtaattgctggtggatttttggcagacagaatataccgatagaagttttgcttgtctaattgttgatggtggctagtaggagcatatactattcctgtacatcctgtttaacttgtcgctgctagacgatttcgcaaatgtagtatgtagtggtagatggatccgataaattttctgtaattttgacgaggtaatcaggcaatcgtctcgagattgttgttgtatgggcgacagtattttttcattgtttgtacaatccttttaaaaatcatcgtctggccttgagcctttatgccatatgggtatatgttgattcccctttt

SEQ ID NO: 90843 - DNA, 1424 bp, Zea Mays
cccctctgccctctccttcgtcccaccttcctcccgcgttgccatttcagagcaaggtggcgcgcgccgcctcctcatcacacggtctcctcgcccgccacggcgtcacatcacatggatgcctcggcacggccgactccttcaactccgcgtccgtcgtcttgttccatctcgcatgattgattgaatctccacgccccccttgtccaactacccctcccactatttcatttcatttcatccccccgatccaagaaaccggccaccgggccggagcgaacccttagaagcgaccttggcccgtgaggaagccaatcagccagagacagaacaatccatccaccatgaacagcctgttctcgagctcatggaagcgcgacggcggggacatcgagtccggcggcgtggagatgtctgcgccgccgggcgccgcggcgggcgcgagcctggacaggttcttcgaggacgtggagtccatcaaggacgagctccgcgacctggagcgcatccagcggtcgctccacgacgccaacgaggggggaaagtcgatgcacgacgcggcggccgtgcgcggcctccgcgcgcggatggacgcggacgtggccgcggcgatcaagaaggccaaggtggtgaagctgcgcctcgagtcgctggaccgcgccaacgccgccaaccggtccgtgcccgggtgcgggccgggctcctccaccgaccgcacccggacgtccgtcgtggccgggctgcgcaagaagctccgggactcgatggagtccttctcgtcgctgcggtcccgcgtcgcggccgagtaccgggacacggtggcgcggcggtacttcacggtcacgggggcgcagcccgacgaggcgaccctggacgcgctggcggagtccggggaaggggagcggttcctgcagcgcgccatcgcggagcagggccaggggcgcggggaggtgctgggcgtggtggcggagatccaggagcggcacggcgccgtggcggggctggagcgcagcctgctggagctgcagcaggtgttcaacgacatggccgtgctggtggccgcgcagggggagcagctggacgacatcgagggcaacgtcggccgcgccaggtccttcgtcgaccgcggacgcgagcagctgcaggtggcgcggaagcaccagaagagcacccgcaagtggacctgcatcgccatcctcatcctcctcgtcatcatcctcgtcatcgtcctccccatcgtgctcaagggcgtcaataagaactaggccgcctggcctgcgtaattcgttctagtttttttttttcgtggcctttgtatcatacatacggttcgttgatacggtcgtcttgattatattttcttctattgcctcaaccttcgattacatggttttgtttataacacatgattcattttcttttgc

SEQ ID NO: 90844 - DNA, 1791 bp, Zea Mays
agccactcgcccccgcctcttgcagcttccagcgcattcactcccgaccaccagtcccgatgctataactaccctcgttgttctatctcctcctcacaaacctctcctggcacgagatcacgcttctcgttggatcgaacagctagggtttccaagatgttcgggcgcgcgccgaagaagagcgacaacacacggtactacgagatcctcggggtctccaaggacgcgtcccaggatgacctcaagaaagcctaccgcaaggccgccatcaagaaccaccccgacaagggcggcgatcccgagaagttcaaggagctagctcaggcttatgaggtcctcagtgatcctgaaaagcgggagatttatgatcaatatggtgaggatgccctcaaggagggaatgggaggtggtggagggatgcacgatccctttgacatattccagtcattctttggtggtggaagcccttttggaggtggtggcagcagtaggggcagaaggcagcgaaggggagaggatgtggttcatcctctaaaggtttctctggaggatttgtacaatggcacatcaaagaagctctctctgtcccgcagtgtcctctgctccaagtgcaatggtaagggttcaaagtctggagcttcatcgaggtgtgctggttgccaaggttctggctttaaggtccaaatccggcagttggggcctggaatgatccagcaaatgcagcatccttgcaacgagtgcaagggttctggagagacaatcagcgacaaggatagatgcccacagtgcaagggtgataaagttgtgcaggagaagaaggttcttgaagtgtttgtggagaaaggcatgcagaatgggcagaagatcacattccctggtgaagctgatgaagcgcctgacactgtcactggagatatcatttttgttctccagcagaaggagcatcccaagttcaagagaaagggcgatgacctcttctacgagcacaccctgaccttgactgaatctctgtgtggcttccagtttgttgtgactcacttggataacaggcagctgctgatcaaatcaaatccgggcgaagttgtgaagcctgattctttcaaggcgatcaacgacgaaggcatgcccatgtaccagaggccgttcatgaagggcaagctgtacatccacttctcggtggagttcccggactcgctgagcccggagcagtgcaaggccctggaggctgtgctcccgcccaagccggtgtcgcagtacaccgacatggagctggacgagtgcgaggagacgatgccctatgacgtgaacatcgaagcggagatgcggaggcggcagcagcagcaccaggaggcctacgacgaggatgaggacatgccgggcggcgcgcagagggtgcagtgcgcccagcagtaggcagcagtttggtagcggtgataaaatatttgacggcggcggaaaaatttgtgcgactactgttaggtccaaccgtccaattttacacgcgcgtattaatgttatgatcatacttgtctttgtttattatgtatgttttgcgttacgggatctgtgcggattagttctaggcgatgtttagattcaatttggtgttgctactagcagcgatctccaacccatatgacagttggaacgtgactgtgcctgctatttcctcgatcctgatctgtccgtacaaagcccggaatccgtcgaaccttaaacctcctttggaatggataataaataaataaattgtataggattcaattcctttcctagcagagccttttgaca

SEQ ID NO: 90845 - DNA, 1020 bp, Zea Mays
gcacggatcgctgtctgcaccaacacccagcgccgactccccacctcgtcgagctagtctcgtgtcgtgtcgtgtcgtgcgtggcccacttggctcgccgccagccaggtcagcagcacgccgcgacgatgagctccggcgggacgccgcccgtggggctggcaccggtggacggcaactccggcggcatgttcagcaccgaccgcatcggcggcttcggctacggcgtcggcgtctccgtcggcatcctcctgctcatcaccaccatcacgctcgcctcctacttctgcacccgggcgcccgtcgacgcggcgggggaggctgctgctgccgccgccgccccgtcgtcgtcccggcgccacggcggcggcggcggcggcggcgaaggggcgcaggcgcacgacgtcgagctcggcatcgacgaggacacgctcaaagggtacccagaggtggtgtacgagaaggaggccaaggccgccgccgccaacaagaagggcaccacgtgcacgtgctgctccatctgcctcgacaactacggcgacggcgaggtgctccggatgctgcccgactgcggccacctgttccaccgcgagtgcgtcgacccgtggctccgctaccacccgacgtgccccgtgtgccggacgtcgccggtgccgagccccatgccgacgccgctcgccgaggtcacgccgctggcgatggccggtatgtcgatgtcgtcgtgacaacggcacggaccgggttcttttctcctcctcttcttcttcttctaaaaattcttccttttcttgcccttactgctaaaacatggaatcgacgaaaatgttcagggcactaggaattagaatatattttttttctcaggtgtaattgtaaatttgggatgggctcaggcgctcagcgtattttccatttctccttgatgaaaaagcaaagcttgaattaggattatctagggcgattgcaaacgttttggcggatcttcaaattatatggaaccgcgatttctgttttggcaaa

SEQ ID NO: 90846 - DNA, 932 bp, Zea Mays
aaagtcacacagctcacaaactggtggattcgtggcgtcacctgctaaaccatctgctattctgctcgacggctcagctctagcctccactccaggcaccggagtccgagagcccgcctacagtgatggcgcccaagcacctcaacctcttcgccgcggcgctgctcctcctcctcctcccctccggctccagcgccaccgccgtcgagtactgcaaaaaggggtgggactacccagtgaaggtgagcagcgtggaggtcgtccccgatcccgtcgtcaggggacagccggccaccttcaagatttccgcctccacagataaaaacatcactaaagggaaactaacgatagatgttgcatacttcatcttccacgtccactcggaaactcataacctctgtgatgagacttcttgcccagtaacaggtgaatttgtgctagctagccaacagacattaccatcgttcaccccgccaggttcctacaccctcacgatgaagttgctgggggacagcaacgaggaactgacctgcatctctttcgggttcagcatcgggtttgttgcgccgaatcccgtcatctgaacccagtatcgaatgtcatggatgtactttacatgaaccttgtagtgcaacattctccagtaagactcggaactcccaggctgggcgcctggaattggttaattcggtcttctcagccttaccaatgttcatcatgtgcacgctcaagattcctaaaaccatcattaaggaaattgatattttcagaaagcactgcctgtggagaggaaatgacatcaactccaagaggccacctttgattgcttggaattcggtcactcaaaggaaagtgaatggtggcctgggtgttcttcgattagaaacacagaacgaggctcttctaattaaatttttgcataaatttttcaa

SEQ ID NO: 90847 - DNA, 812 bp, Zea Mays
aaagtcacacagctcacaaactggtggattcgtggcgtcacctgctaaaccatctgctattctgctcgacggctcagctctagcctccactccaggcaccggagtccgagagcccgcctacagtgatggcgcccaagcacctcaacctcttcgccgcggcgctgctcctcctcctcctcccctccggctccagcgccaccgccgtcgagtactgcaaaaaggggtgggactacccagtgaaggtgagcagcgtggaggtcgtccccgatcccgtcgtcaggggacagccggccaccttcaagatttccgcctccacagataaaaacatcactaaagggaaactaacgatagatgttgcatacttcatcttccacgtccactcggaaactcataacctctgtgatgagacttcttgcccagtaacaggtgaatttgtgctagctagccaacagacattaccatcgttcaccccgccaggttcctacaccctcacgatgaagttgctgggggacagcaacgaggaactgacctgcatctctttcgggttcagcatcgggtttgttgcgccgaatcccgtcatctgaacccagtatcgaatgtcatggatgtactttacatgaaccttgtagtgcaacattctccataagactcggaacgtgtgaccaactgctgtcttgcattcggagttgggcgcctgacctaacgatcttaactgcatacagttttatcatggacctaccagagtttggtgctccgtgctccatgtcagcatgccttttacatgtatataagactatgtacaacggctccca

SEQ ID NO: 90848 - DNA, 1250 bp, Zea Mays
atggcgcccaagcacctcaacctcttcgccgcggcgctgctcctcctcctcctcccctccggctccagcgccaccgccgtcgagtactgcaaaaaggggtgggactacccagtgaaggtgagcagcgtggaggtcgtccccgatcccgtcgtcaggggacagccggccaccttcaagatttccgcctccacagggttcctacaccctcacgatgaagttgctgggggacagcaacgaggaactgacctgcatctctttcgggttcagcatcgggtttgttgcgccgaatcccgtcatctgaacccagtatcgaatgtcatggatgtactttacatgaaccttgtagtgcaacattctccatggagtcagggcatcccgaggcatattttcccagagctcttctcctttgccaagaactcaaaaatgaccatcaaagaggtcaaggatcaagagcagttccatgatctttttcatttacctgtctctgatcaagcgtttgatcaatttctggtactcaaggggtcttgggagcaaattattcttaataatgttcatgaccgctggaagtatatttggggatcggacaaattctcgtcccaaaaagcttacagatctttcatgggccagatgcagactcatcctatctacaaactagtttggaaaagtaagtgtcagcctaagcatagagtcttctattggctgtggcttaagaacaggctaaacaccagaaatatgctgagaaggagaaacatggagctagattcctattcttgcgaaaactgtctttggcaaagagaggagaccctttatcatcttttcctcagatgcaacttcgcgaaagcctgctggaactcaattggcattaccccacccagaatttccaaccctgaagaggcatctgtaaacctcaaacaccagctcaacgttcccttctctatggagatcactattcttatgacttggagcatctggaaaagccgaaacgagtggctgttttcaaacagagatccctccgtgctccgctgcactcaggaatttagtagagaattgcgactaatcattcacagagcacggggagaattcgacacctcaatcccgaactggctaaatttgtggcaaatatagaaatagctcttcttttttctttctttctctcttctttttattgattgtaaaaggaacagggcctaacctttaatattcgctttctaataaaatgcgcagtaggggtttccccctcctgatccttc

SEQ ID NO: 90849 - DNA, 4651 bp, Zea Mays
caccgaaatagagacaggagaggctgcgcagcagcacacaggcctcgcgacgcgactcgcgggacggaagccctagtttttttccttgcgttattccacccccttccttcctaccccgcgcctccgccccatcctccaccctgcgcccccgcctccgccgcgccatgtacccaagcccgtacgacggttccggcgccggaggaaagatccggcgccgcccgcacctccgcgccgcctccacgccctacgaacggccccccgccgccgcggcggcgcaccgcctcgcggccgctgctgcagcggcttccgcatcctcggagcccggcggggagcgcggcggcgggggcggtggctgggtgtcccggctggtggacccggcctcccgcctcatcgcgggtggcgccgcgcgcctcttcggctcggtgttccgcaagcgcctcgccccgccgccggccccttctccgccgctgtcgtcgcctcctggacgaaacaatgagccaaaacagggcttacctgattcaacacatgttgattcacttccaatcccagagggtggaatggagaaagggaagagcatagttgacacatcagatgtcaaagcaatgtctgaagtagagcacttgttaatgcgaaagacatttactaaggttgagtttgatcgtcttacagacttattgcgtgcaagaaccattgagtctgatccacctaaaccaattgtttctcgtgaggaaaagaatgaagaaagtatcaaagttgatggaattagaggctcagcgttacgtcatatggacctagatgattctcctgctgttaaatgctgctgctccctctctgctggttacacaccctatctgtggccctcttctgcgaccacccttcctgaaggggtacataatcatggtgctagttctcctgcagaactcgcgaaacaatatatgagctctcgttatttgagggaaccccaatccagtagtctgcggagccgattgtttcttgagaataaaggtgaagcaagcaacactgtcaatgataggaggtctgtaccaccaattgttcagacaccacttgaacttcggaatgaaaaccctggtctccctgtaaatggctatgtgacttcgggattacgtgggcgttcagcgatatatagaatgtctcgctctccatattttaagggtcagaactattccagtgatttgaacacgtcttcattgtcccaacgatcacaaagcttgcatgttggtggcaggcaggtcttgaaacgaagcggggctgaattagagaatgaacttggatctataggccccattcgtagaattcggcagaaatcaaatatgatgtcttcatttagagattctcgtgcaaatcctaaaggaaaccttcttactagccatataagtagtactgatttcactgaagacggtgcatccattcagtctccgagctcaaaaaaattattggttgggagtagtcaatctctgcgacccttagaatcccaaaagaatgagggagatggtaaatctagtgatagcattccacccataccagctcaatcaaacaagatggctgaaaagatatttgagcagcttaatataatagctccatcgccaaaacaacaacagtctgttactctgaatgctagtaactctatgtcaaagaaacctgtttttcaagatgctgggtcaagcagtatgtataaccaatctagttccctgaagtttcaagatttggatggtgcaaatggaccccatgatacaaacttgaatggttccctgctgaagaaagacaagctaaatataataaaagacggatcgccaaaagctgccttttctgatagacctgcccttttggggaactcggtttctgcttctaaatcatggacgccagcctttaaaatggctgtgatagaggacttaccagagttggatgatgatctggaggtccttattcaatcaagtaagatagaggttgaaacaactgagcagaaaattgattcaaatagaaaagaacagaaggttgaacaaaatatattagagcaaagggttgaaccgaacttgaagaacattgctggttctacgattagtgaacagcctgtagcatcactgtctaaaactgtcacttcatctggtggtttatttttatcaaatgatcctgggaaggcagttcccaaagcttctgtggacaataataccgaatttgcattctcaaatgggcctcctggcacccgccctgcaactggtgtatcagcaatgccacttgcttcagttaataacgataaacagactggtgcttcaaatttcattttcggcatcaagcagccaattacgtcagattttgaaacatcaactgcaaaaaacaaatcaacactcgggcagagtgtcaccaagcccacaacattagccagcactagttcagagagaggtgataaaacagaaaaagcagaagatgtagccaacccatctgagaaggtgttgccttcagctgcatcaacaacactgaatgcacctctccattttacatctgtggcatctacttcgagcctgagcaatggcttgtcatactcaccaccaaagctcacaactcctccacctactgataaacctgctatcagctcagctgtttccacttccatatttgccgtatccagtagcagtccagctatttcatcgtctcctgcatttacgggatttagtttttcttccagtgctccggttggattgtcattggtaacatcagctaaatctgatggcacaactgctgaaaataaggcagctagcaccttatcatttggtatagggggtacaaaagctgaagtgaaatctgttgcaccagatgcaagcagcaaggcatcatcggaactttttatttcacctgtgtcatcaagtattgcaagcttttcaagttcccccgccacatctacgcctactttcaccgcagttgcaccttcaagtgatgctgctggaatatctgtggctgcaccatctagtacttccactgcaccaggtttacagtctgcttcaaccccttcatttacatttccgagctctggaaacaacctttttgggttcagctccccagcccaatctactggcctcagtacatcgtcacttgctggtagtacctctcaaccaccagctgctagcacactctttggtagtaagccgacgcagtcagacggaacaatacaacaaacatcccagagttcaaaaccacaatctggctcaccattcccggtcatgactcctggagttggagcatcctcgtctggacctgggacgctatcttttggacttggagcttcctcaactggttcaggcactgcatcttttggtgtcggagcttcatcttccgcacctggaactttatcaacttttggtgcagcagctcactcttctggacctggagttttctcttttggggcaggaacttcctcatcaggacctagcactgcctcttttggtgcagcaacttccacatcagggactggatttggcaattcaccatttggaactggagctacttttgcgaatccatttagctctagttcaagcactgggttcacattttcttcacctagctcttctgctggtgcatcaacagcggccagtacgagtgtatttgccagcacctctacagcttcttcagcctcagcttttagcaacccttttggctcaagttcatccccacccagcacatttacatttgggcaatcaggttcttcaggcaacacttttgcatttggagcgcagccagctccaacgttcccatctcaaccatcacttttctcatttagttcagccaacactagcatgaattcgtctccacagcctgcatttggaatgataaataccaacacagccttcagcatggcttcccccggaaatgatcagatgaacgaagacagcatggcagatgacactagtcaggcagcacctgcgccagcgccagtatttggttcatcatttggacagcagaacaactcatctgctgccccggtatttggtgctcccgcggtccagccaggtggtgtttttcagttcgggggccaacaaggttcagcacagcagaacccgtccttcccagctgttggcagtctagagtttcagggtgggaacttttcgttgggcagcgggggtggtggcggtgacaagtcgaaccgaagagtgatcaaggtcaaaaggacaccaaagaagagataagggtgcgccctctgttggaatcttcctttgatggtgtcatttgtgattggatcgcactgcttgggaacgaagtcaagtacgacgaggttttatggccacgcagatttccctgcagcagggcgatagcgctatatatctcatggctggcttgtaaacgcatccaccaaggtcagtgtagtctcctgtgcactcaattcatttcctcatcggggccggcggcctgcatgttgtgtaatatgcctgtgctcatggggtgtaaaatagaacaaaaaagtgttgtaatttttgttttcttgcctccaaatgccgacttgatttcttatctgtggtttggctacggtatatttgtatcggagtgtaacgcactgttgtatttttgtttttgggtttattacattcaacaaggtcagaactgtatcgtagaatacctgtccatacttaatcctgcctacgca

SEQ ID NO: 90850 - DNA, 2567 bp, Zea Mays
aatgttcttgtcatttcttcttctagataagctgcatatcctatcgtggtcgtggtcgagctgttgtccccttgcttgtgaaccttcggccctctttggaggtggtcttcctacccctcaatttgccttgagcaatttggtttctagcgtctgtgggtgctctcctttgactgcttcttcctccacctgctgcgccggcaagacgacgaggtccaaaatctcggtggccgtgctgtcactctcgccgcttcgttattcttgatgcgcaggcacagctgctgtcccaaggcgtccgatttccgcattgcgtgctccgggatacacctcttctcgcgttgacttcgacgcgcactcgaggcgatcggggcacttgtttccatctttgatctccgctttccatagcttcccgcgcgatctatccgatctcctgcccaaagggagccccgttcccggatgctggaggaaggggcacacatatacccgcgacgtgatctgagccggcacggagctccaggagtcgagggctgtgttcttggatccgataaaggttccggccactcgtgttcgccccgccgcacgccgcgatggggaacacgtgcgtcggacccagcatcaccaagaacggcttcttccagtccgtctccacggtgctgtggaagacgtcgcaggacggcgacgcgctgcccgccgccggctctgatgccaatggccccggccggtcgcagtcgacgccgccgccggcactgccgaagccggcgtccgacgtgcacgtcgccgtgcagagcaaggcccctgagcccgtcaagatcgccgcctcccactcggagccggcgcccaaggccgccgcccccgtcgccgccaacgccagccccagctccagccccaactcgtctgccgaggcgctgcccaccaggccgcgtcccaaggcgccgccggtgaagcgcgtgtccagcgccgggctgctggtcggctcggtgctcaagcgcaggacggagaaccttaaggacaagtacagcctggggcggcgcctcgggcagggccagttcggcaccacgtacctgtgcgtggagcgggccacgggcaaggagttcgcgtgcaagtccatcctgaagcgcaagctcgtcaccgacgacgacgtggaggacgtccgccgggagatccagataatgcaccacctggcgggccaccccaacgtgatctccatccgcggcgcctacgaggacgccgtcgccgtgcacctcgtcatggagctctgcggcggcggcgagctgttcgacaggatcgtgcagaagggccactacaccgagaggaaggccgccgagctcgccagggtcatcgtcggcgtcgtcgaggcgtgccactccatgggcgtcatgcaccgggacctcaagccggagaacttcctcttcgctgaccagaaggaggaggccgctctcaagaccatcgattttggtctctccattttctttcaccctggtcaaatattcaccgacgtggtgggtagcccttactacgtggcaccagaggtgctgaagaagaagtacggtccagaggcagacgtctggagcgccggtgtgatcatctacatcctgctgtccggagtgccgccattctgggcagagaacgagcagggcatattcgaagaggttttgcacgggaggctcgacttcgagtcggagccatggcccagcgtctccgaaggcgccaaggatcttgtgaggagaatgctcatcagggacccgaggaagagactgaccgcccatgaagttctacggcatccttgggtccaggttggtggtttggctcctgacaagccgctggactcggctgttctttctcgcatgaagcagttctcggccatgaacaagctgaaaaagatggctctcagggtgatcgccgagaacctgtccgaggacgagatcgcggggctgaaggagatgttcaagatgatcgacgcggacaacagcgggcagatcacgttcgaggagctcaaggtggggctgaagaaggtgggcgccaacctccaggagtcggagatctacgcgctgatgcaagctgcggacgtggacaacaacggcacgatcgactacggcgagttcatcgcggccacgctgcacctgaacaaggtggagcgggaggaccacctgttcgcggcgttccagtacttcgacaaggacggcagcggatacatcaccgccgacgagctgcaggtggcgtgcgaggagttcggcctgggcgacgtccagctggaggacgtgatcggggaggtcgaccaggacaacgacggccgcatagactacaacgagttcgtcgcgatgatgcagaagccgccggcgggtctgcccaacaagaaggccggcctgcagaacagcttcagcatcgggttcagggaggcactcaggatggcctgaccctgaacagctggttggctgcctgcctgcctgtagatgacgaacggagttccgaactgggtgagttccagtagagacggcccgaggcgggcttgagacgtgtacatgtgccatggaggcagaagttggactgctcggttccaaaacggttttgtt

SEQ ID NO: 90851 - DNA, 1229 bp, Zea Mays
ggacataaaggagcaggcccagatctgaaggtaggcacggcactgacctcgccggagcttgatcttcttcttgtgggtgacgatggcgggaggcttcctgttagggtcggctgtctgcgtggccttggtgtcgtccggcgcgaacagcacggcgtcgatgccctgcacggagatcctcccgtcggtgtagatgtccgggtcgaagaggtaggcggagccctcgccctggccgaacttgacggagccgtcggcctcccgcgccacgaccttgtgcggcaggcgcagcgtgtcgtagcgcaccttgccgaagcggcgcacggcgttgtacatggactcctcggtctggtactcggggatcatgtggtagtagaggatgttctcgggcgagccgggctcgctgagctggtccgtggtgaggcgcgcatggcctcgtcgttgggggcgagcacggtgaggacgtagccctcggagacgaggcggcccatctcggtggcgagggaggtgaggttgacgaggatgtcggcgagctcgttgtagccgccgtagaggagcagcgtctggatgaagtccttgacctggctgtggccgtcgaagtggtgcttcccggagcccgggccaggcgccggcgcgggggcgatggaggggccgggcgccatggcgtcccagaccgggagcacggggggcgcgccgggggccaccggcggcgcgggcttcttgaggcggtgcgtcctggggtccacctcgggcgcgcccgtgggcagcacggccgagatcgccgcgaggctgcggcggcggttgaagtcctcctgcacggagcgcggcacgaggaggcgctcgatgccgtggatgaccccgtcgggcctgagcacggcgtccgggcgcgtgacggcggcgtggccgacgcgcatgccggcgccgagctcgacctcctcgccggacagcgtggggtgggacgccgcgggccaggagtcggagggcaggcgcgaggggaggacgtggtagagcagcagcgcctgcagcgacctgaggttgcgcggctccagcaggaagcgcttgaactccgggtccaggtcccgctccagcgcctcgttccgcggcgcgaagatggtgacgttgtgcttcccgacggcgtcctccagcgtctgcaggagcagcgccttctccaccagttccgccagctccgtgtagtgcgaatccagcagcgccaccagcacggagttggagttgac

SEQ ID NO: 90852 - DNA, 2142 bp, Zea Mays
atgccgcactccgtcctggcccgtctgccccccggctccgtccggctcgtagctgccttcgggctgctgctcctcgtctcgctgctcgttctccaccgccgccccgggaggccccatgtggcggcggccgccgccagcgaccgactcactgatccctcccggtcccggctgttcctgtcgcagtcccccggggccaacgcgagcatcgcggctgacctccgcgcgctcaccgcggggccgcacctcgcggggacgcctgcgtcggcgggtgcagccgcgcacgtgctcgcccgcctccgcgccgcgggactccaaaccctaacgcgcgagtacgagccgctgctctcgtaccctgggcacgcctccctcgcgctgctccggcccgacgggtccctgctcgcgcgcctgtcgctcgaggagcccgcggacgaggggcgccgcgtcgtgcctccgtaccacgcgtacgcgccgtccggcggggccgtcgcggaggcggtgttcgtcaacctcggccgcgaggaggactacgtcgtgctcgagaggcttggagtgggcgtgcgcggccgcgtcgcggtggcgcgccgcgggggtgggtaccgcggcggggttgtggcgcgcgctgcggacaagggagccgtcgccgtgctcatcgcgggcaacgcggacggcggcgtcgagagaggagtcgttcttctcggcggccccggcgatccgctcacccccgggtgggccgccaccagcggtgcggagcgtttgaagttcgacgataaggcagtcaagcagcggtttccgagtatcccctccatgccggtgtcggccaagacggcagcagcgatcattcgaagcctgggcggtccggccataccggcggaatggaaggacggcctcggggtggataccggtggtcttggacctggccccacgctggtcaacttcacgtatcaggaggacaggaagttttataagatacgagacatttttggtatcataaaagggcaagaggaacctgaccgatatgtgatactcggtaaccacagagatgcatggacctatggagcagttgatcctaacagcgggacagctgcacttctagacattgctcggcgtcttggaataatgctgcaatcaggatggaaaccacggaggtccatcattctttgtagttgggacggtgaagaatttgggatgattggatcaactgaatgggttgaagacaaccttgaagatctgcattccaaagctgtagcttacttgaatgttgattgtgctgtgcaaggtgtgggattttttgctggttctactccccagttggacaaactcttggttgatattacaagacaggtaagggatcctgatgtcacgggaaagatggttcatgatacatggaatgaaatgagtggcggcatcaaaatagaaaggcttgccagaactgattccgattttgctccatttctacatcatgctggaattccatctgtagacttgtactacggagaagaatttcctggttaccatactgctcttgacacttataattggatggaaaagcatggcgatccattctttcttcgtcatttggctatcacagaaatttggggactattagctcttcgattggccaatgatcctgtgttaccttttgattatcaagcttacacttcgcagttacaggagcatataaaaacattgtctgccctgacgagcaatggccatgcagtaaatttgatgaatgggtgcgtcaatgatctttctggtgcagctatggaagttctgaaggagatgaagaaactacagcagatggatttatatgatgaacacgccaggatgagaaggcgattgttgaacgatcgcctcctacttgctgaaagaagcttcctgcaacctgaagggctccaaggaagaggatggtttaagcatctgttgtactcgcctccggaggactacgaaagcaagctgtcgttcttccctgggatcgctgacgccatctcacggtccgccaatctgagtgacaaggaacaggaggtggcaatgcagcatgaagtgtggaaagtctgccgtgcgattcaaagggctgcgagtgttcttagaggtgaattcagtgagcaaaaaccgacgaattttagttctttggtgaccccatga

SEQ ID NO: 90853 - DNA, 862 bp, Zea Mays
gagaaataggggaaccagagcaaagaagggaccgccgaccgccggatacctgacgctggcgggcggcggcggcggcggcggcgaagacgtccgttgcggctgcgacgaatccaagtaaccggggcccttgccgaactggcaggcgagataggtcccccgattcaagcggagatggttcactgatttcccttccccgccgccaattcgatcgggctcgcggctcgccgtctctgctctccccaaccggcaccaagccagccaatggcgctcgaggaggcacagcggccactgtccgccggcgtggcctggcgcctaaccggaagctggctaggctccgaactggttcgaggcttcaagccgatccgcatctatccaggcagtacattggaggggaaataccagaagcttggagctctgccccgactttcttgatcggcttgccaactggcttgtattcatcaccgaaaaccatttcttgtcttgagtgtattggtaaataatttctgtcaacctcaagattttccttcattggttaaggaggataagaaggtgaacaagaagctgacagccaagctgaccctatactcaggatgtgttgtgccttctggtggtgaaaccgtctctttaagcaactgaactgctttaagtataacagaagagctcagtgattttccctttagaaaatcctctaccttgctagctctgatggcatggtcagctccataagcaccgaacaccaagcatatatcctccatgatgttcttccctgaagctgcatcagttgaagtccttgccaagagagcagcattgacatatgaagcagcattgccaaatggccgaggcgctgcccggaatgtctcaa

SEQ ID NO: 90854 - DNA, 849 bp, Zea Mays
gagaaataggggaaccagagcaaagaagggaccgccgaccgccggatacctgacgctggcgggcggcggcggcggcggcggcgaagacgtccgttgcggctgcgacgaatccaagtaaccggggcccttgccgaactggcaggcgagataggtcccccgattcaagcggagatggttcactgatttcccttccccgccgccaattcgatcgggctcgcggctcgccgtctctgctctccccaaccggcaccaagccagccaatggcgctcgaggaggcacagcggccactgtccgccggcgtggcctggcgcctaaccggaagctggctaggctccgaactggttcgaggcttcaagccgatccgcatctatccagtacattggaggggaaataccagaagcttggagctctgccccgactttcttgatcggcttgccaactggcttgtattcatcaccgaaaaccatttcttgtcttgagtgtattggtaaataatttctgtcaacctcaagattttccttcagaggataagaaggtgaacaagaagctgacagccaagctgaccctatactcaggatgtgttgtgccttctggtggtgaaaccgtctctttaagcaactgaactgctttaagtataacagaagagctcagtgattttccctttagaaaatcctctaccttgctagctctgatggcatggtcagctccataagcaccgaacaccaagcatatatcctccatgatgttcttccctgaagctgcatcagttgaagtccttgccaagagagcagcattgacatatgaagcagcattgccaaatggccgaggcgctgcccggaatgtctcaa

SEQ ID NO: 90855 - DNA, 1131 bp, Zea Mays
atgttgtagttagcagtgcaggcatagaacctatgaaacatggatacttggttacaaagttcaactttcagtcaagttttgttcaacaagggtctaatagagacttccatgaaactgatcgatttgtcgttggtgtcatatggcaagattgaatgaagggctgtcattatttgatgcaatactgattgttccaatgtttcaaattacttggaccttcttctctatttgtataggatttgtttactttcaagaatatcaagtatttgatacactcaggataattatgtttgtgttaggcatgacatttgtctttgttgggatctccttgctagcacccgatgacagtaaagctgatacgaaagatggttcaagcaccgccgaggactccataattgacatagacagaaatggaaagatgctgatggaggagacagacatagatgatagcatctcctttgttacttctgtaaaagtaaatgcaaaacgtgtactttcaaaggcaaagtccgcatgctccatgtcccttggccttggggagagcaccataagcgcttcatcgatgcttgccatgcctatggtctcgtcaagaacaaccggcttcagaggaatcgaaaacgaccgtccaaattgctgcctgtatggcgcctcttctgttgcgtccacttctggctggtgaatgtgagatggatgaagtatttgatatggatggtgacgattctgcgcagcttcttgctacagcaaacgccgcaaacagtgctcaaggaattgtcgcaactctcttggaggaatatgagggcatttttcatgatgaacacctcagatgttccttgtcacctgaatctcaaattgaagatagtggtactgaagcatcaactgatgatggtaatttggaagccaagggcaatggatttcatgatgcagaaaatgatgtagatcaagaattggatgatgacaatggtgtggagcgtatacttagtgggaaattgagtgagagtagtggatatgctggcagtgacctctatgactacaaggtttggttttgtgtgcttcattcttttgatttttctgatgcttggtgtttggtggttttattaatactactgtgagtctttaatgtgagtttggtactgg

SEQ ID NO: 90856 - DNA, 1662 bp, Zea Mays
atggaccacacctgtcagaaaagatagccggaagccggaaaaaccctcgtctcccgtctcggagcggcggagtacgcacctatcagtcccaagttcccgccacacacctctccattcccctcccgaagtcccgatcctgtcctcaaatcccattgctctatcttctctagcggcgagtcgaggcggggaagacgagctagcggcgaggatgttgtgggtagataagtaccggccgaaaaccctagacaaggtcaccgtgcacgaccaggttgctcagaacctcaggaagtttgtgtcggagcaggattgcccgcacctgttgttctatgggccgtcggggtccgggaagaaaaccctaatcctcgcgctcatcaagcagatgttcggcgctggcgcggagaaggttaagctggagaacaagacatggaaaatcgatactggaacaaggacatttgagatagaattggcgatgttgtcaagtgctcaccatgtggagatgacccccagtgatgctggctttcaggacaggtatgttgttcaggaggtcatcaaagagatggcgaagaacaggccaattgatgccaaaggcaagagagcatttaaagtccttgtgttaaatgaggtcgacaagctctcacgagaagcccagcattccctccgcaggactatggaaaagtatagctcatcatgtagactgatcctatgctgtaacagctcctcaaaagtgacagaagctgtaagatcccgttgcttaaatgtgcgagtaaatgcacccagcgaagatcagattgtccaagttctagagttcattgggaagaaagaaaatctgcatcttccagctggatttgctgctcgtatcgccgcacaatcaaaccgtaatcttaggcgggcaattctgttttttgagacttgcaaagtgcaacaatatccatttacatcaaatcaagtggcgcctcctcttgactgggagcaatatgtgtctgaaatagcaactgatatacttacagaacaaagccctaaaaggctatttgctgtacgccagaaattctatgaattactcgtcaattgtatcccacccgaaagtattttgaagaagttgttggcagaattactgaggaagttagatgcggatctgaaacatgagatctgtcactgggccgcacattatgaacacaagatgcgcctcggatcaaaggctatttttcatctagaagctttcgtggccaagttcatgagcgtttacaaggagttcctggtggcgacatttggttgagcaaaacctcaaggcattgggttgccacccgcgaagcgaagagaggatggcagcggctatcgcactgtatcaggcagtgtcttgcctgtgtagttttgtactgaagttgtgaacgattagcttcattgtgtctgtttaaaccaccgtcaactcgggtcgcccttctgtgagttcatcgcgtccgcctgcacgtggtcgttgatgacgacacgatcagaagttgtgaacgactagtagtttttgcttggttaagaaaaaacatcctgaaaagtaaaaaagtaacagtctgtgaacggaaccgtaacaagaaaaacgaaacaagcagatgccaatcatgctattgcaatttgcaagagtcgtcccagattaaaattcaaatagctgtatcc

SEQ ID NO: 90857 - DNA, 1736 bp, Zea Mays
atggaccacacctgtcagaaaagatagccggaagccggaaaaaccctcgtctcccgtctcggagcggcggagtacgcacctatcagtcccaagttcccgccacacacctctccattcccctcccgaagtcccgatcctgtcctcaaatcccattgctctatcttctctagcggcgagtcgaggcggggaagacgagctagcggcgaggatgttgtgggtagataagtaccggccgaaaaccctagacaaggtcaccgtgcacgaccaggttgctcagaacctcaggaagtttgtgtcggagcaggattgcccgcacctgttgttctatgggccgtcggggtccgggaagaaaaccctaatcctcgcgctcatcaagcagatgttcggcgctggcgcggagaaggttaagctggagaacaagacatggaaaatcgatactggaacaaggacatttgagatagaattggcgatgttgtcaagtgctcaccatgtggagatgacccccagtgatgctggctttcaggacaggtatgttgttcaggaggtcatcaaagagatggcgaagaacaggccaattgatgccaaaggcaagagagcatttaaagtccttgtgttaaatgaggtcgacaagctctcacgagaagcccagcattccctccgcaggactatggaaaagtatagctcatcatgtagactgatcctatgctgtaacagctcctcaaaagtgacagaagctgtaagatcccgttgcttaaatgtgcgagtaaatgcacccagcgaagatcagtccaaaatattgaaggggaattggggacagattattcaaatacttcaagtctgagaccattcttcacttcccagattgtccaagttctagagttcattgggaagaaagaaaatctgcatcttccagctggatttgctgctcgtatcgccgcacaatcaaaccgtaatcttaggcgggcaattctgttttttgagacttgcaaagtgcaacaatatccatttacatcaaatcaagtggcgcctcctcttgactgggagcaatatgtgtctgaaatagcaactgatatacttacagaacaaagccctaaaaggctatttgctgtacgccagaaattctatgaattactcgtcaattgtatcccacccgaaagtattttgaagaagttgttggcagaattactgaggaagttagatgcggatctgaaacatgagatctgtcactgggccgcacattatgaacacaagatgcgcctcggatcaaaggctatttttcatctagaagctttcgtggccaagttcatgagcgtttacaaggagttcctggtggcgacatttggttgagcaaaacctcaaggcattgggttgccacccgcgaagcgaagagaggatggcagcggctatcgcactgtatcaggcagtgtcttgcctgtgtagttttgtactgaagttgtgaacgattagcttcattgtgtctgtttaaaccaccgtcaactcgggtcgcccttctgtgagttcatcgcgtccgcctgcacgtggtcgttgatgacgacacgatcagaagttgtgaacgactagtagtttttgcttggttaagaaaaaacatcctgaaaagtaaaaaagtaacagtctgtgaacggaaccgtaacaagaaaaacgaaacaagcagatgccaatcatgctattgcaatttgcaagagtcgtcccagattaaaattcaaatagctgtatcc

SEQ ID NO: 90858 - DNA, 2530 bp, Zea Mays
atggaccacacctgtcagaaaagatagccggaagccggaaaaaccctcgtctcccgtctcggagcggcggagtacgcacctatcagtcccaagttcccgccacacacctctccattcccctcccgaagtcccgatcctgtcctcaaatcccattgctctatcttctctagcggcgagtcgaggcggggaagacgagctagcggcgaggatgttgtgggtagataagtaccggccgaaaaccctagacaaggtcaccgtgcacgaccaggttgctcagaacctcaggaagtttgtgtcggagcaggattgcccgcacctgttgttctatgggccgtcggggtccgggaagaaaaccctaatcctcgcgctcatcaagcagatgttcggcgctggcgcggagaaggttaagctggagaacaagacatggaaaatcgatactggaacaaggacatttgagatagaattggcgatgttgtcaagtgctcaccatgtggagatgacccccagtgatgctggctttcaggacaggtatgttgttcaggaggtcatcaaagagatggcgaagaacaggccaattgatgccaaaggcaagagagcatttaaagtccttgtgttaaatgaggtcgacaagctctcacgagaagcccagcattccctccgcaggactatggaaaagtatagctcatcatgtagactgatcctatgctgtaacagctcctcaaaagtgacagaagctgtaagatcccgttgcttaaatgtgcgagtaaatgcacccagcgaagatcagattgtccaagttctagagttcattgggaagaaagaaaatctgcatcttccagctggatttgctgctcgtatcgccgcacaatcaaaccgtaatcttaggcgggcaattctgttttttgagacttgcaaagtgcaacaatatccatttacatcaaatcaagtggcgcctcctcttgactgggagcaatatgtgtctgaaatagcaactgatatacttacagaacaaagccctaaaaggctatttgctgtacgccagaaattctatgaattactcgtcaattgtatcccacccgaaagtattttgaagaagttgttggcagaattactgaggaagttagatgcggatctgaaacatgagatctgtcactgggccgcacattatgaacacaagatgcgcctcggatcaaaggctatttttcatctagaagctttcgtggccaagttcatgagcgtttacaaggagttcctggtggcgacatttggttgagcaaaacctcaaggcattgggttgccacccgcgaagcgaagagaggatggcagcggctatcgcactgtatcaggcagtgtcttgcctgtgtagttttgtactgaagttgtgaacgattagcttcattgtgtctgtttaaaccaccgtcaactcgggtcgcccttctgtgagttcatcgcgtccgcctgcacgtggtcgttgatgacgacacgatcagaagttgtgaacgactagtagtttttgcttggttaagaaaaaacatcctgaaaagtaaaaaagtaacagtctgtgaacggaaccgtaacaagaaaaacgaaacaagcagatgccaatcatgctattgcaatttgcaagagtcgtcccagattaaaattcaaatagctgtatccattttacactaccacagtttgattacaaaggttagtgcttgcaggatcgcgtctcagacccttggcctcaccctgcgaccgctggtgtcgccgccgtcagagagctgcgcccatacgctctggcttttcacgccgctgctacattgttcctcacatccggcaactgtccgcagtatctctgactgcagggatgggcagttgtctttgagatagtcgaacccctcggtccggatcacagctgcagatacataagggcatctggaatgttatacagttcaaacttatttgggcaccaccaagcaacaaacgagcgatagatcaaggtacaaaatataccgaaaaaagctaaaatatggtacacagtacaatttactgaaggtaaggtaggagtgtacggtatgataatgttccaaccgtaagcaataaatgtctgaaatttacaaagttatcaccactcgtagtccagtaaccattaagtttataaccatgaatattactattttggcacaataacctttatcaagtttcacagctatgataagaataagaaagcagtcatgtcttgcaatttactatgcaatgacacactgcagacatttcaccagcatgcaagcccttgccataatgccatgccaaccctaggtaaatcattcatcaaactgggaatagcctaatgtctaagcaagtagtcttcttggcaacttagccattgagaaaaccaaaacatactaaattgtttagagtataataagtatgcctaagatgtcaaccaagaggatatctacatatgacatgtgaaggttaaacatattttcatgttgtaagtcttattacccgaaaggttttcagcagcaaattttaggcaaac

SEQ ID NO: 90859 - DNA, 1762 bp, Zea Mays
atgtttctccaaacagataggaaagttaaaatttgtatttgttttggcaaattctgtttggaatgtgtaactgatagatcatataattcagtatcattgttgaaagcaccgatcgttcctatatttgtggatgctctagtagctcaatatcattgtgcttttggtactgaactactgatataatgacactatttcctgaacatctcttttgatccatcgcacatgcagttctatgtgtaatcattttggtccatagtttcttcttttttttaaaaaaaaaagggccaaactaggaggaactaggtggctttctgttaagaaactaggcacccaaaattgcctcatcgagacttgaaccaactgaactaggtttagattcttttttggtctatagtttccttaagttacttcattagctttccatgcttccagccaaacatgatgtttttaccggtcttttatattcttgtttttacaaatttgaacatctcttgtaacagaatatagatttgagaaagttaccctttccaatgtgcgcagcttctgttctcggtttgttgagatgttcccgtatcatgacttatgcaagcgacttattgattttattttattttggctctgagcctttcaggctatttgctgtacgccagaaattctatgaattactcgtcaattgtatcccacccgaaagtattttgaagaagttgttggcagaattactgaggaagttagatgcggatctgaaacatgagatctgtcactgggccgcacattatgaacacaagatgcgcctcggatcaaaggctatttttcatctagaagctttcgtggccaagttcatgagcgtttacaaggagttcctggtggcgacatttggttgagcaaaacctcaaggcattgggttgccacccgcgaagcgaagagaggatggcagcggctatcgcactgtatcaggcagtgtcttgcctgtgtagttttgtactgaagttgtgaacgattagcttcattgtgtctgtttaaaccaccgtcaactcgggtcgcccttctgtgagttcatcgcgtccgcctgcacgtggtcgttgatgacgacacgatcagaagttgtgaacgactagtagtttttgcttggttaagaaaaaacatcctgaaaagtaaaaaagtaacagtctgtgaacggaaccgtaacaagaaaaacgaaacaagcagatgccaatcatgctattgcaatttgcaagagtcgtcccagattaaaattcaaatagctgtatccattttacactaccacagtttgattacaaaggttagtgcttgcaggatcgcgtctcagacccttggcctcaccctgcgaccgctggtgtcgccgccgtcagagagctgcgcccatacgctctggcttttcacgccgctgctacattgttcctcacatccggcaactgtccgcagtatctctgactgcagggatgggcagttgtctttgagatagtcgaacccctcggtccggatcacagctgcagatacataagggcatctggaatgttatacagttcaaacttatttgggcaccaccaagcaacaaacgagcgatagatcaaggtacaaaatataccgaaaaaagctaaaatatggtacacagtacaatttactgaaggtaaggtaggagtgtacggtatgataatgttccaaccgtaagcaataaatgtctgaaatttacaaagttatcaccactcgtagtccagtaaccattaagtttataaccatgaat

SEQ ID NO: 90860 - DNA, 1133 bp, Zea Mays
gcacgatcactcgttgggcgaggggcgcgtgggggcaacgcgacctcggccgctcggggaagggtcggtccacacacgccgctcgcgcttcgcgtcggttttatgcacgactccttttcgcacccggctggccggctccccacctgctcgcctctcgctccgaagcttctcctctcgcgtatcctaccaggagggtgggagacccagggagcggaggtgtgcgaagctcgcctcgcaccacgcgctgcggcctgcggggcgagagatcggggcctgagctagggtctggtggcggagatgtcgacgccggcgaggaagcgcctgatgcgggacttcaagcgcctgcagcaggacccgcccgccggcatcagcggcgcgccgtacgacaacaatatcatgctctggaacgccgtcatattcgggccggatgacacgccgtgggatggaggcacgttcaagctgactctgcaatgtacagaagattaccccaacaaacctccaactgttcggtttgtttcgaggatgtttcatccaaacatctatgcggatggaagcatctgtttggacatcctacaaaaccagtggagccctatatatgatgttgcggcaatattgacctctattcagtccctgctgtgtgacccaaacccaaattctcctgctaactctgaagcagctagaatgttcagcgagaacaagcgtgagtacaaccgcaaagttcgtgaggttgtggagcagagctggacagccgactgaaactttatccgctccgccaggcggtgtaaataaagcatctgtctttcctacttggccggtctgttttaccgttagaaatcctcagctatcgttgtgttcttgtggttcagtcccttgttgtagtgatgcctgcgggttttcctaatgtagtgctgaacggtttcataaactcggatattggtgcatatgtaacagatatagctaagtcaagttgttgcttggtttgcataagcttcgtgtcgtgtcgtgtgcttctttctcgctgcacgaacggcctttcacgaggcacctctgacagatctccatgaccgtcctcagcgactcgtccgagcaccctttgctcaccgcggggtctgcgaagctcctcctcctcaccc

SEQ ID NO: 90861 - DNA, 2291 bp, Zea Mays
ctcctgctgtctgctgccgaagtcgccaactaacatagatcgcaccatttcccgttcacctccccttccgttacatcccaccatttgctgttcaccttccctcccgtttgcctcctctcgctgtctcgtagcttctttcctccggcgacggctgggcgagcggccgccagtcggtcccttcgtcggcgacgagcatccacctgcgccggcgctccatcttccgctccctcccttactcgcgctcggcacacaggcgacggcggcggcgctcaggatcgggctatcaccgacggggtccggcttctccgcccgcctctcgccactcgtcctcgcctccggtcctccgcacaccggccggtgatcctgcctctgtaggttttttgtactatactttttagtggttctggccttcttgacacaatggtgaagctgacaatgatagctcgtgtcactgatggccttccactggcagaagggttggatgatgggcgagatctgaaggattctgatttctataagcagcaagctaaacttcttttcaagaacttgtcaaaagggcatcatgaagcttcacggatgtcaattgagacagggccctactatttccactacattattgagggcagagtatgttatctgactatgtgtgaccgctcttatccgaagaaacttgcattccagtacctagaagatctgaaaaatgaatttgagagggtcaatggcaaccaaattgaaactgctgcaaggccatatgcttttatcaagtttgatacattcatccagaagactaggaaactgtatttggatacaagaactcaaagaaacctcgcaaaactgaatgatgaactctatgaggtgcatcaaattatgactcgcaatgttcaagaagttcttggtgttggtgaaaagctagaccaggtcagtgaaatgtcaagcaggttgacttctgatacaagaatatacgcagataaggctaaggacctcaaccggcaggtatccacatgcttaattgcacaaggttcatggtttacatttgccagatgaggcgttgattcggaagtatgctcctgtcgccattgtcattggggtagtattgatgctgttttggctcaagaacaagatatggtgattgtacagtacgaaggatactgggccctgttacaacaccggagaagaacagatggagataaaaaccaggtctattctggaacaagaagatgctttggtgacttgtatcccgtatctgcccattcaagcgattacttaagctgcccttttgctcctccctataagctagtatcaaagtgaattcgttggagtgcagacctgataagagcatctccggaagtctttcaaaatttcactctaaattctcattttgagagtcatttgcttaataattgttattatgtttttttcactctccaacagcctttaatatcctgtttgcactagggagccattctctttctatattggactaccgatgaatttggaggagatggatatattcggatagctgtttttaaaaaaagctgttgggggaatcttagcaattaggaagggtatagtctctagagaaactcatattttgtgcatccgttgaactcaatgtaatataatataagagctctagagttctacatcggggttgtggaactcaatgtaatacaagagctgtggagttgactttacatcggggttgtaatttttagggtggaactcaatataaagattcagggtggtctgatgagttgacgaaactcgagcatgctttttatagctgcctaatatgtattgatttaaggtcagagagagtcgtgtatactacagctacgagcagaaccctccgtggcaactggcacccaagtcctgtcctgtccagcaaaaaggttgggtgcgccgtgcgcgtctccacggggtcggagtcggaggtggatgggcagtgggcaaagcctctcgcgctggcgaccgtgcagatacaggctcagtgctcaactgtctcacaggcaaggatggcaatcgggccttattattcgcggataccttattatatccataaccatacccacggataccaaattccaccatacccgcatccaatggataattatccgcggttatttacccatacccatacccatacctattgctatccctactcacaggctcacagccgcgcacaggaccgtgtcggtgtcacggtggagagacgtctcggcgagtcggtggtgccacaatcgcggacacctggcgacgttgctgacagtcttttactacaccctttctaa

SEQ ID NO: 90862 - DNA, 2049 bp, Zea Mays
caactaacatagatcgcaccatttcccgttcacctccccttccgttacatcccaccatttgctgttcaccttccctcccgtttgcctcctctcgctgtctcgtagcttctttcctccggcgacggctgggcgagcggccgccagtcggtcccttcgtcggcgacgagcatccacctgctctgtaggttttttgtactatactttttagtggttctggccttcttgacacaatggtgaagctgacaatgatagctcgtgtcactgatggccttccactggcagaagggttggatgatgggcgagatctgaaggattctgatttctataagcagcaagctaaacttcttttcaagaacttgtcaaaagggcatcatgaagcttcacggatgtcaattgagacagggccctactatttccactacattattgagggcagagtatgttatctgactatgtgtgaccgctcttatccgaagaaacttgcattccagtacctagaagatctgaaaaatgaatttgagagggtcaatggcaaccaaattgaaactgctgcaaggccatatgcttttatcaagtttgatacattcatccagaagactaggaaactgtatttggatacaagaactcaaagaaacctcgcaaaactgaatgatgaactctatgaggtgcatcaaattatgactcgcaatgttcaagaagttcttggtgttggtgaaaagctagaccaggtcagtgaaatgtcaagcaggttgacttctgatacaagaatatacgcagataaggctaaggacctcaaccggcaggcgttgattcggaagtatgctcctgtcgccattgtcattggggtagtattgatgctgttttggctcaagaacaagatatggtgattgtacagtacgaaggatactgggccctgttacaacaccggagaagaacagatggagataaaaaccaggtctattctggaacaagaagatgctttggtgacttgtatcccgtatctgcccattcaagcgattacttaagctgcccttttgctcctccctataagctagtatcaaagtgaattcgttggagtgcagacctgataagagcatctccggaagtctttcaaaatttcactctaaattctcattttgagagtcatttgcttaataattgttattatgtttttttcactctccaacagcctttaatatcctgtttgcactagggagccattctctttctatattggactaccgatgaatttggaggagatggatatattcggatagctgtttttaaaaaaagctgttgggggaatcttagcaattaggaagggtatagtctctagagaaactcatattttgtgcatccgttgaactcaatgtaatataatataagagctctagagttctacatcggggttgtggaactcaatgtaatacaagagctgtggagttgactttacatcggggttgtaatttttagggtggaactcaatataaagattcagggtggtctgatgagttgacgaaactcgagcatgctttttatagctgcctaatatgtattgatttaaggtcagagagagtcgtgtatactacagctacgagcagaaccctccgtggcaactggcacccaagtcctgtcctgtccagcaaaaaggttgggtgcgccgtgcgcgtctccacggggtcggagtcggaggtggatgggcagtgggcaaagcctctcgcgctggcgaccgtgcagatacaggctcagtgctcaactgtctcacaggcaaggatggcaatcgggccttattattcgcggataccttattatatccataaccatacccacggataccaaattccaccatacccgcatccaatggataattatccgcggttatttacccatacccatacccatacctattgctatccctactcacaggctcacagccgcgcacaggaccgtgtcggtgtcacggtggagagacgtctcggcgagtcggtggtgccacaatcgcggacacctggcgacgttgctgacagtcttttactacaccctttctaa

SEQ ID NO: 90863 - DNA, 880 bp, Zea Mays
attagattacttttgaggaactgatccagttcttatgaacacaattgattcgttacaaaaaatgatgagttcggagagattgacttacttgtaaaagtagatcaaactatcagaattttacaaacttgcttgcttcgaaatacctgaagtgctactgctatcagttcttagactttggtttaaatcatctatttttttctattgttctgtcaggtctggacactctatgagttttatgatctcgagagcatcattgataggacactaaagcgcgattttgacaccgaggaaacactctggttgcttaagataagtcttgtgtgcatcccggatagccctaagatcaagcccttcatgtcaatggttgccaagatgctgcaagatgagtgtgttgtgagtgacaggatcatgagacctggcctgatcacagacgtcatggacctgaaagtcaggatggtagagtcggttcagttcagcttgacatcatgctcgagcactgccgcgtcgtggcctggggcgtgatgcacccactccttgttggggatttcccattcagctactacgagtcatctgccatgtaggtacgcgatctatcccctccgttctggataagacgttctaatgtgacagtgatagaaatataatagaacggtgcggtggtgccacacaacccacaatgtagacgacacttggctatcacattcgttcgtctcactacagaaggttgtgtcgtggttttcattttttcactaagcaaatgtgatgcttgttagatttggataagaaaccttttattttacaatataattcactaattgtaccggccgatattcgattgttttttggttcaatattagatgttcagcaacatggttttttg

SEQ ID NO: 90864 - DNA, 820 bp, Zea Mays
gtaggttgtggagaccacttgccatgcaggaggttggatgcttctctgttgtgtattagttgttggcagataatttataagatattgagatcgaaatcaggatgtttccaaactgtctataatcaggatggctactgtagcttttacagtaggttggtattatatgtttccaatttgtgtttttattaaatcattgtctaattggtgtcaggtcttcttccatgggcggatcattgtcgactggtggtgtcaggtcttcttccatgggcggtgccgtggagcacctgattgtctcacgtatttgaccagcaacaagggacgaagattggagctgtgtgaattgtgtgcaggcaacacgggtcaggagcatttcatttgatcccttttctctgatggatatgctgatattcaaggctgtggaagagcaggtcaagaatagagtagagcataaggcaaggatcttcgagcagaatgccactgatagtgagtgcaaggtcgatcctaaagtgctctccaagttatatgatcagtgggtgatgccacaaaccaaggatgtcagccttgactaatcatcgattagctgtagctgtaaattttatgtatacatggtttcaattgcgctcgaaccaattgtcttgaccttgaatggacattttgatgtttatttcatgaatgttcaggtcaacgacaagagaaaccaattgcgttgtatgggttttagatcataactcaagtttttttgtagatcttggtgctatttcatctgatgcgtcatgtttcagtgattgttttatagtgaacctgtaagatgtaaaatgac

SEQ ID NO: 90865 - DNA, 1643 bp, Zea Mays
gagcaagttgagcccaaccctagcagcaccccgcgctgaacccatcaccgtcaggccatcaccatgcgaggcatcggcgccgccgccgccgccaggcggcacactccattcctctcctcccgcgctctcgccttctcctcctcttctagaagcgggggcggtgatggcggtttcgggcacgggcgcggacgcggcctgccgaccgccgggcagccgcgcgctcccgggaggcccatttccaacgacgatgacgcggatcccttctctgccacagcacccgtcggccgtggtcgcggggagcctgaggttccctcctccccaggcatcccgtccttcgctgtgttctctggcgtcggtcgcggccgcggccgcggatccccactgcccccaccgccaccccctgaggacgcttcaaagcagccgaccttcaccaagggcttcgacaacgctcctcagcgctcctatccggagccgccgagcctcgatgcttcctcctccgcgccgccgctgccccgcccgctcccgatctccggcgccggccgcggggtcccctggacgcagcagccttcgccggataagcctccggaagagaacaggttcatccggcgccgcgaggcggtgaaacagtctgccgccgagccgccgaaacaggctcccggggcgcagcaaccgaagttgtcgccacaagaagctgtgagacgggcggttgaactcctgggcggcgggggccgcagcggcgaagatggcggagggcgtggtggtgggggtcgcctctcccgtggccgtggccgtggcacaggccgcggcaggcgtcccgggcgtggcgaccgctctgatgatgtggaagacgtctggcaagcgagctacttgggggacaaagctgatggcgataggctagagcagcagctcggcgaggacaagatgaagattctggagcaggcgttcatggaggcagcagataatgcgttgccacatccaatggaagatgcttacctcgaggcttgtcacacaaacaacatgatcgagtttgagccggagtaccatgtgaattttggtaatcctgatattgatgagaaaccaccaatgtcgttggaggagatgcttcagaaggtgaagccatttgtagttgcatatgagggcatccagaaccaggaagaatgggaggaagctgtgaaagatgtaatggctagagccccccatatgaaagagctcatagatatgtacagtggacctgatgttgtgactgcaaaacaacaagaagaggagttgcaaagagttgcaaacactcttccagaaagcatcccttcttcagtaaagcggtttactgacaaaactctactctctcttaagaacaatcctggctggggttttgacaagaaatgccaattcatggacaagtacgctcgcatagtttcagagcaatacaagtagaaaggcatcttataccctgttgtagtaaccatattatttgtcctccaaggagacaagtacgctttgttttgagagaaggtgagatgcccatatctaatccgtgcaatgtttttttatttatttcactgagatgctagtttgataaataaaattggtgacaaacatgtttctttttttcatcatatgaagcaccaattccttgctcgggctta

SEQ ID NO: 90866 - DNA, 1472 bp, Zea Mays
ggccatcaccatgcgaggcatcggcgccgccgccgccgccaggcggcacactccattcctctcctcccgcgctctcgccttctcctcctcttctagaagcgggggcggtgatggcggtttcgggcacgggcgcggacgcggcctgccgaccgccgggcagccgcgcgctcccgggaggcccatttccaacgacgatgacgcggatccccactgcccccaccgccaccccctgaggacgcttcaaagcagccgaccttcaccaagggcttcgacaacgctcctcagcgctcctatccggagccgccgagcctcgatgcttcctcctccgcgccgccgctgccccgcccgctcccgatctccggcgccggccgcggggtcccctggacgcagcagccttcgccggataagcctccggaagagaacaggttcatccggcgccgcgaggcggtgaaacagtctgccgccgagccgccgaaacaggctcccggggcgcagcaaccgaagttgtcgccacaagaagctgtgagacgggcggttgaactcctgggcggcgggggccgcagcggcgaagatggcggagggcgtggtggtgggggtcgcctctcccgtggccgtggccgtggcacaggccgcggcaggcgtcccgggcgtggcgaccgctctgatgatgtggaagacgtctggcaagcgagctacttgggggacaaagctgatggcgataggctagagcagcagctcggcgaggacaagatgaagattctggagcaggcgttcatggaggcagcagataatgcgttgccacatccaatggaagatgcttacctcgaggcttgtcacacaaacaacatgatcgagtttgagccggagtaccatgtgaattttggtaatcctgatattgatgagaaaccaccaatgtcgttggaggagatgcttcagaaggtgaagccatttgtagttgcatatgagggcatccagaaccaggaagaatgggaggaagctgtgaaagatgtaatggctagagccccccatatgaaagagctcatagatatgtacagtggacctgatgttgtgactgcaaaacaacaagaagaggagttgcaaagagttgcaaacactcttccagaaagcatcccttcttcagtaaagcggtttactgacaaaactctactctctcttaagaacaatcctggctggggttttgacaagaaatgccaattcatggacaagtacgctcgcatagtttcagagcaatacaagtagaaaggcatcttataccctgttgtagtaaccatattatttgtcctccaaggagacaagtacgctttgttttgagagaaggtgagatgcccatatctaatccgtgcaatgtttttttatttatttcactgagatgctagtttgataaataaaattggtgacaaacatgtttctttttttcatcatatgaagcaccaattccttgctcgggctta

SEQ ID NO: 90867 - DNA, 238 bp, Zea Mays
ccagcgagccctcgcccttgccctctagctcttcctgctagcgtcgtctccgtcccgggctctcctgttcatcgtcgatctcagccatctcaggagcacccgctcactcccagacgcccacgcaaaggaatcccccacgatctccctccaaactacccactccctccacaatctccccctctagctcatgatccctccgcccgcccccaccccccccccccccccgcctgccacgccc

SEQ ID NO: 90868 - DNA, 602 bp, Zea Mays
aatgctcaaccaatgcggaacagtgacaccacaaatcctgaatgtcgaatgtctggatccccaacgccgtgggcaacagagctagaggagccaagattgtcacgcggccgagatgccgtagacagtaacagccgcaaatgccagcaccaggctcaccgccccccgggtcgacgcggcgccggacgtcaggaacggggccgtcggcgtcgccttcgatccagtgccgcgcccggagcgctgccgccgccagcagctttgcacttgctcgccggcggggtcttgacgttgcacgcctgggggagctggagcgcgcgcgtcttgtcgacggtgacaccgccgagggacgaggagtcgccgctgagcgcggcgcagaggcactgcgggttggtctgcacgacgctggcgagctgcgagcagcacgaggacggcggcgccgacacgttgccgctgatgtagttgaggcacgggtacaggctgatcagcgtggtcgtgcacccggactgcgccgacgccgaggccaccagcgccgccgccacggcggccgccaggagccacgccacgcccgacgctcctgctcttgctgctgctgccgccgccatttc

SEQ ID NO: 90869 - DNA, 101 bp, Zea Mays
cgatctgcggacgattatcgattcaagcttacatataataacataagttcggtttataatgctagctactacgtgccttatttgtaagttccccagttaac

SEQ ID NO: 90870 - DNA, 704 bp, Zea Mays
aagactcaacacacgctctcgccagccaaccgaagccaccgtacccacccacccaatggcggcagcttaccgccacgtcgcgacgcgcggcctcgccctggccctcgcggcggccgtggtcacggcgtggcagtgcgcggcgcagcgggcgccgtccggcccgggctgcatgccggagctcgtcagcctgaacccgtgcatggactacatgtccggcaacgcgacggcgcccgacggcccgtgctgctcggccgtgtcgggcatgcttcgggccagcccgagctgcctctgcatggtggtcggcggcacggccgcgacgctcggcgtcgccgtcgacggcgaccgcgcgctgcggctgcccgcggcgtgccaggtccaggcgccgcctgccaaccagtgcgacgtcgcgggagctccagtgccgtctccggtggcggggacgaacacaccaggggctcaggcagcggcggcgccatcggacgccaataatgtcacccctgcagggtctggatcgacccttccatcctccgacggagacaacggcagacctggaacgaccttcgtcttcgccgctgcggcactggcgttgctacatcgtctctgagacacgagagttttcacgtgtccatcgactcatcgtggacgaacctttcgttttcacgtgttggtgtttgtcccaccgtcaggattaagagctcttggaa

SEQ ID NO: 90871 - DNA, 930 bp, Zea Mays
tacgaacagagcggagcagctgcactgccgcatcgagaaatcattagacctcaagaaaacaggtcagcaatggaagccacggcgacgccacgaacccaagaagtgatgaagcccgagcccggcacggtcaaggtgaccgtggacgaggtgacgctccgcaagttcgagctgtccgacgtggacgccatgatggcgtgggcgtcggacccgcaggtggccgccttgtgccggtgggagccctacgagtcaacggagccgctgctggccttcatccgcgacgtggtgctcccgcaccagtggttccgcgccatctgcctcggcagcgaaccccgccccgtcggcgccgtgtccgtgtccccgacgggggacccgtgccgcgccgagctcggctacgtgctggcgcgcgcgcattggggccggggcgtggccacggccgccgtgaagcgcacggtgaccgcggtgttcggcgaggtcccggggctggagcgcgtcgaggcgctcgtggacgtggccaacctggcgtctcagcgggtgctggagaaggccgggttcacgagggaggccgtgctccgcaagtatggcgctaacaagggcgtcgtcagggacaaggtcatgtgcagcttcatcgaccccgacgcagtgcccgagtgacttgagcgccctgtcgcaaatcttttgctgtcggatgcatccagttccgaatttgaatgcaagcaattccaatcgatgacacacggtgcgcccgccgggttacgccgctgtgtgtggacctaagatttgaaagatttgtatttaaaattactaaggtgatgtttggtttctcgggactaatttttagtccctatattttattctattttagttccaaaattgtaaaatatagaaactaaaactttttttttgtcacttagtgggtgtttggtttctagg

SEQ ID NO: 90872 - DNA, 754 bp, Zea Mays
atccactggaatcataaaagaacagagcggagcagctgcacttccgcgtcgagaaatcattagagctcaagaaaacaggtcagcaatggaggccacggcgacgccaagaacccaagaagtgatgaagcccgagcccggcacggccaaggtgaccgtggacgaggtgacgctccgcaagttcgagctgtccgacgtggacgcgatgatggcgtgggcgtcggacccgcaggtggccgccgtgtgccggtgggagccctacgagtcgacggagccgctgctggccttcatccgcgacgtggtactccctcacccgtggttccgcgccatctgcctccgcggcgagccccgccccgtcggcgccgtgtccgtgtccccgacgggggacccgtgccgcgccgagctcggctacgtgctggcgcgcgcgcactggggccggggcgtggccacggccgccgtgaagcgcacggtggccacggtgttcgccgaggtgccggggctggagcgcgtcgaggcgctcgtggacgtggccaacccggcgtcgcagcgcgtgctggagaaggccgggttcacgagggaggccgtgctccgcaagtacggcgccatcaaaggcgtcgtcagggacatggtcatgtccagcttcatcgacaccgacccagtgcccgagtgacttgagcgcccctgttgcaaatcttttgctgtcggatgcatccagttccgaatttgaatgcaagcacttccaattgtttcctgcaaa

SEQ ID NO: 90873 - DNA, 95 bp, Zea Mays
atcgtgctggcccgcgcgcactggggcaagtgcgtcgcgacggcagccgtgcggcgcgcgcacggggacgtggagctggagggcgagtggaggcg

SEQ ID NO: 90874 - DNA, 1544 bp, Zea Mays
aagcaaaagaaaaggcaaaagcaacgcgtcggatgggagggaggctcagagatggagcaagaagcgcctgcccgaccggggtccgttcccgcggtcacgctccgtcgtttcgagctcggcgacgtcgacgcgatgctggagtgggcgtcggaccccgaggtgacggcgttcatggcgtgggacgcctgcacgtcccgggacgccctcctggcgttcctgcgcgacgcggtgctgccgcacccgtggttccgcgccgtctgcctcggcggcggcggacactgccgccccgtgggcgcggtgtccgtgacgcccaccgacgacgcctgccgcgccgagctccgcgtcgtgctggcgcgcgcgcaccgggggaagggtgtggccacagcggcggcgaggcgcgcggtctccgcggcgttcggcgacctcccgggcgtggagcgcgtcgaggcgctcgtggacgtcgaccacaacgcggcggcgcggcgggtgctcgagaaggccgggttccagcgcgaggccgtgctgcggagctaccgcgtggtgaaggggaggctcagggacgtggctgtctacagcttcatctctaccgaccctgtcgttgagtgatcaggattcgaaaatgacccaaagtcgtgcacgaaaaccagatggcattggcattggcattgctgcttgcagacagcatctcagctatgggttacagttacagacttattataactctccttccgctattttatctccaagaagacgcacttcttggaattattaactgagcccgtttttctcggatctccgttgatctcgacaataattaaccaaagaaaaacaagggcccaagaccaagaggatacaacagggaggggcacacggacgacacggagggaggtcatgcttcccatcccctgaggacggtggcgcgcgcgacgcggttgacgccaagcgtgaaggcgcccatgcggaggtcgcagctgtggctccggcacatctgcttcacgtccccgaaggcgcgcgtcatgtacgtccgcagctccgcgtttaccttctcttcgtcccacatgaacccctggatgttctgaacagacgaaagcacctcactgtgacgccaccagagttggccagtatgtcggggaggatgaggacgcctttctttgacaggatctggggatggaacgggatacagaggggatcagaaaacattgcagaaagcagtcggtttgttttgagctacgggcttgcctcgtctgcctctggatctgtggggtgattggcagcctcgatgatgtactttgcctttatgtcgttagcattatccctgtcaaaaacaaaaaaagtgcggacgaatagtttaatcaggcctcgagctgcaggcacaactaagatataataataactgaaaagaatcgacttcgtaggcgtagggtgaaaacgacttcaatgagaagaaatctacttgtttatgactcccccaagcgctgctgggatgaggacgtcgcactcttcagtgagcaacgagtctggagcgatggcgtctccccccttga

SEQ ID NO: 90875 - DNA, 1111 bp, Zea Mays
gccatgctggattgcggggtttcagttcctcggcctccctccacctctctctctctctcgcactcgcacacaacgcactcttttgtcttctctcctgctcccctgcctccctgtcaagcttacaaccagctgcagctctccccgcttccgcacctctcctgcacagagatttgctgctcctcttgtcggcaggctcgattcctggttgcattccgcagcagcacctcgatctgctcctctgccagtgccagtcgagagattcgattgatgtggtgtgctcttggagccaggggctatttggcactagctttccgtgcttccacccccgaccttgatgaggctctcccattgcgagagccactgcgccggtcccttccgcctcatcccctgcctcccccaatccaaagatgcgagccgcgacgctgccgccgcctctccgccggctccgcgcccagccgctgtcgccgaggaggagccgcctccggttcagaaggtagaggcgccggtagccgccggaagggacgacgacgctgagaagcgcgaggatgtggagaaggcgccggcgctgggtaagagttgcctgaagaaaaccagctgcggcgatgacgagtgcgccgacaaaggcaatgtaaagtggctggatttgatcgggaaagatctggcagagattaaggagtacgagccaagcgaaggcggagacttgcttgacgacggagacggcatctcgacatgtgtttgcgctatccaatgagtcaagaaggaccccgctcattctcgaccatggtgtgttctttcccgtggagggccagggtgtcttcttgtttattatcctccatgagatccaccggaatcacttgctgggtgtaaaccagtctcatcagcagtacatgccgctacagatgcttcgtagcctagccgtagatttgtagtatcagtttgtcagatctgtgtgcagctggttttcagagttgtgttagtgcaggcaggatgttgcctttctgtaaagctttcatactagtaggagaaaattagcttagttcaatctcatctcgagatataaattggaaacaaatcatcttatttgaagaatgatagtgacacaccgtgtggt

SEQ ID NO: 90876 - DNA, 1974 bp, Zea Mays
ggcgcggcgcggcgagactgctgagcccgaggaaacgggaagagaggagaaaagcaaaacgaagctcggaaccacgagacgacggagaggatgggcttcagcgtcctgctctcaccgccgccccttccgctcccgagcgccaccgctgcggccgacttgtacctaatattcggcggccacgatcgccgccgccgccgcccgctggaacacggctgccgctgcggccgccccccggagacggcgctcggcggcagctcaggccgccgcggctcgtacgatgacgacgggacggctccaggctccctcggcctcgacggcagcagcacgtcctcctcggtccgtcggacggggagtgcaaaaccaagatatcaagtaacttcgaaagaagaggacacacaaaatgcagaccgcgaggggtggcaatatagtacagaaggcctttcaaagagcatgtccaagtcaaggtacatcaaagtatttggggttgatttgtcccctgataatgtggctgttgctattgtttacttcgtgcaaggagttttaggcctttcgaggcttgctgtcagcttctacttaaaagataatcttcatcttgagccagcagagactgcagttatatctgggttctcagccttgccatggttggtcaagcccctctacggttttatcagtgattccatccctctctttggatatcgaagaaggtcgtacctatttctatcaggcatccttggagcactttcatggagtttgatggccgctgttgtggatgataaatatagtgcagcactctctattattcttggatctcttgcagttgccatatctgatgttgtggttgattctatggtggttgagagagctcgaggtgaatcacagagtacatctggatctctccagtcgctatgttggggatcctcagccttcggaggagtcgtgagtgcatacttcagtggttctttagtggatacttatggtgtaagatttgtttttggtgttacagcacttctgccactgatgacatctgctgttgcagttcttgtaaatgaagaacgcttacctttggggaaaagttcagtctcactttcagtttcaggttcagaattaattgagagctctaagcaacgtatcatgcagatttgggattcagtaaagcaacccagcatactcctacccaccttgttcatattcctttggcaagcaacaccgcaatcagactctgccatgtttttcttcatcgctcgccatccacgcccacgcaggccgcagctgccaccggccactcgctcggagatttgatctgctccaaccagcaaccaccacccctgggggaaaaggcgtcagcggtgcggttgctggcggctggccagcaaccaaaccacaccctaaaatgaacaaataagctcgggtttactccagaatttctaggacgcgttacgcttgtcacatctgttgcatccttactgggaatcggagtgtataatttgtttctgaaggaagttccattgaggaaaatctttcttgtgacaacagtcttaggttctgctctcggaatgacacaggttcttcttgtcactgggctcaaccggaagcttggcataagcgacgaatggttctccattggggattctttgattatcacagtccttggccaggcttcctttatgcctgtcctggtgttggctgcaaagttgtgccctgtgggagcggaagcaactttatttgccactttgatgtccatctctaacgccggaggtgttgccggaggtctggtgggcgcgggtctgacgcagttactgggagtcagcagagacaacttcgaaaaccttgctctgctgatcgcgatttgcaatctcagttccctgctacctctgcctcttctgggtctcctgccagatgaatcccgtaatgcagatggtgcacagaccaaaaatgactgatgcttgtatatctccacgcgtctttacaagacga

SEQ ID NO: 90877 - DNA, 2006 bp, Zea Mays
ggcgcggcgcggcgagactgctgagcccgaggaaacgggaagagaggagaaaagcaaaacgaagctcggaaccacgagacgacggagaggatgggcttcagcgtcctgctctcaccgccgccccttccgctcccgagcgccaccgctgcggccgacttgtacctaatattcggcggccacgatcgccgccgccgccgcccgctggaacacggctgccgctgcggccgccccccggagacggcgctcggcggcagctcaggccgccgcggctcgtacgatgacgacgggacggctccaggctccctcggcctcgacggcagcagcacgtcctcctcggtccgtcggacggggagtgcaaaaccaagatatcaagtaacttcgaaagaagaggacacacaaaatgcagaccgcgaggggtggcaatatagtacagaaggcctttcaaagagcatgtccaagtcaaggtacatcaaagtatttggggttgatttgtcccctgataatgtggctgttgctattgtttacttcgtgcaaggagttttaggcctttcgaggcttgctgtcagcttctacttaaaagataatcttcatcttgagccagcagagactgcagttatatctgggttctcagccttgccatggttggtcaagcccctctacggttttatcagtgattccatccctctctttggatatcgaagaaggtcgtacctatttctatcaggcatccttggagcactttcatggagtttgatggccgctgttgtggatgataaatatagtgcagcactctctattattcttggatctcttgcagttgccatatctgatgttgtggttgattctatggtggttgagagagctcgaggtgaatcacagagtacatctggatctctccagtcgctatgttggggatcctcagccttcggaggagtcgtgagtgcatacttcagtggttctttagtggatacttatggtgtaagatttgtttttggtgttacagcacttctgccactgatgacatctgctgttgcagttcttgtaaatgaagaacgcttacctttggggaaaagttcagtctcactttcagtttcaggttcagaattaattgagagctctaagcaacgtatcatgcagatttgggattcagtaaagcaacccagcatactcctacccaccttgttcatattcctttggcaagcaacaccgcaatcagactctgccatgtttttcttcataacaaataagctcgggtttactccagaatttctaggacgcgttacgcttgtcacatctgttgcatccttactgggaatcggagtgtataatttgtttctgaaggaagttccattgaggaaaatctttcttgtgacaacagtcttaggttctgctctcggaatgacacaggttcttcttgtcactgggctcaaccggaagcttggcataagcgacgaatggttctccattggggattctttgattatcacagtccttggccaggcttcctttatgcctgtcctggtgttggctgcaaagttgtgccctgtgggagcggaagcaactttatttgccactttgatgtccatctctaacgccggaggtgttgccggaggtctggtgggcgcgggtctgacgcagttactgggagtcagcagagacaacttcgaaaaccttgctctgctgatcgcgatttgcaatctcagttccctgctacctctgcctcttctgggtctcctgccagatgaatcccgtaatgcagatggtgcacagaccaaaaatgactgatgcttgtatatctccacgcgtctttacaagacgaaagggcatacacatacactcatcggcacaaagcagcgcagctgatgacgtgaacaaaacatggaagctgatgtataggatgtattatctatgatgtatagtaagtaacgttagattaattatgaaacatatttgtaataaatttaattgaaagtataaatactccttttcataaaacgaggtttaca

SEQ ID NO: 90878 - DNA, 1697 bp, Zea Mays
tactccactctggcataaccgaacctcacgtccgcccaaacccccgaacctgcgagactcctcgcgtccacctttcggtctcctcttctctgcgaatcccgtaatcccatctctctcgcctccactgccgcctctccgtctccagcttaccaccgccgccgctggatgtctacgcagtagatccatagaccctgatctcctcgaggtgattcccctcgtcgccagaggtatcctcgggcagcaatatccactggcgacgcagccgccacagccgctacgttccctcctccaccgccatcaccacggctaggtggaagcgctcggcgaggtagcggctcgggggaaagacatggtgctgatcgagctggagcccgaggaggcgacgcgcccctcgttgccggtggcggaggagcaggcggtcgccggggacgcggcgcgcccctcgtcttcagcggcgcccgaggaggaggaggcagccgctggagggaaggcgtcgagggcgccggaagaagaggaggatgcctttgaggacgcgctcaccgacgagcagctgcgagagaaagctagaatccaagcaaatgatgcaaaagcagaaggaaacaagctttttggtgctggacaatatgaggaagcattatcacagtatgaaatatcattgcaaattgctgctgagctggaatctgctgaggatatacgtgctgcatgccattctaatcgtgctgtatgcttcttgaaattgggaaaacatgatgagacgattaaagaatgctcaaaagcacttgagctcaatccaacatacctgaaagccctgcttcggagggcagaagcgcatgaaaagcttgaacattatgatgaagctattgccgatatgaaaaaggttgttgaagtggatccttcaaatcaacaagccacgaggtctcttttccgacttgagcccctggcagctgagaagagggaaaagatgaaggaagaaatgattgcaaagctgaaagatctggggaactctgtgctgggccgcttcgggatgagtgttgacaatttcaaagctgtcaaagacccaaacactggctcttacagcattcaattccaaaagtaacacgacgtgaagaaagacatggatgaatatggctgggcggcatatttcagttgtaattgttcaaggaacttgtgcgtcacatacctggacaatatccaaacagatatctgcaaatcgatctgaaggtgggacatggaagaggaattggagtattgcgtcgcgtttgcatttgtcgcacgttagactgttagagatgctttctcgagtgcgaacttgcatgatcattttgaactctgatattttcctcaatgcatggtcgttttttctttgttgtaacgatgccttccaaagactgcatttccgtgcggttcaaacatcccagtcgatggcgacacgtgcctgtagtgtcttggccctgatcgttgggaaagggctagcctgacctggcgtctagtcgtttttagggcgtttggctgactcggatatgtcggctgggtttcgtggatagactattagtttatggttctaggtgataagtaatggtgatagattattagtcatttggttacaattttagttattatcttatggctatagtcttatgtatttagtcattccgttacaattttagttattctggtacaattttagttatttcttt

SEQ ID NO: 90879 - DNA, 1417 bp, Zea Mays
tgatgaaaaatctatgaatccattattaatcttttgctgagaaataaaagttacagtatataccatgtgtatgcatttaccctttcgattttgacaccacaagctaggcaagggaagcaatcgcgagttaccacggttcacggatcagtatacaggcggcggaggagcatgcataggtggaggtggaggtggcgaagacggtggcgcgatgcacccgtgggcgtcgcagcgcaccctcggctggtgcaggaacgagatgcactcctcgcccgggcgctggtcggggcgcccggcgatgcagttctggcggtcgtcgacgcgcggcacctcgaggcaccggtgcggctcgccgcagaagaagttgtacgagtaggtgaagttcttgaggtgcggcaggccgcagacgctctccggtatctcgccggcgaggcggttgtgcgcgacgtcgagctgctccagcgcccgcatgttgccgatcgtgtccggcagggtgccggcgatgctgttgaagctgaggtccagcacggtgagcttgtccagcttgccgatctcgggcgggatgcaggaggagatgccgctgttgagcaggatcagctcgttgagcgtggcggccatgtcgccgatgctgctcggcaggcagccgctgacccgctgcaggttggccagcacgatcaccgacgccgtcgagttggtgaagctgtcgggcagcgtgaactcgaagtggttgttgttgatgaagagcgcgtcgaccttcttgtcgaagatggccgccggcacctcgccgcagaagttgttgaacctgatgtccacgtactggacgttggggaggcagaggagctgcggcgggaagggcccggagagctggttgttgctgacgtcgatctcgtggaggaggtggagggagcggagcgagtcggggagggagccgctgaagcggttggagttgaggtggaagacggcgaggtcggacaggaggcccagctcctcggggagcgtcccggcgaggtcgccgtggttgaggtccacggaggccaccgtgcgctggcaggggtcgtcgggcgccggcgcgcagaacacgccgaagtagctgcacacgtcgggcccgcaccagttcttggtcagcttcttggggtcgtccgtgatggcgcgcttcagcgcctgcagcgccacgtacgccttctccagccgggagttgttcgcggccggggacggcggaggcatgcccggcgctggctgcgccgaggccagcagcggacaggcggccgcgagcaccaggaacgccgccgccgccaccgccgccgccctcgagctcatcctcgtcatgcaacggtataaggcgggcactggaatgtttggtgtcttgcttgcttgctgctgtgtctagtgtgtgcttgcttcgtgtccagtgtgtgctgtt

SEQ ID NO: 90880 - DNA, 2845 bp, Zea Mays
gactcccaccgctgccggcggcgctggctaggtgaggctagcggcggctctctgcttcagccggagcgctactcggtgctgcccctcctcctcgcctcctggcctcgcaggaggacagagattctaaaattcagtacaaactgacgacctacacattcggagcttggcatggcgctgtcagtgtccatatagctgcctcaatggcgctgaaggttgcgtatcgcatacgctttgcgagatggcacctgctatcaggcagactcatgtactgttcgtgcccagattcgccctccgcgcgggcttctgccgagagagcaagttcttccgagtttgattctgcgatccggtcactcaaggacagtctccggccagagagtctagcccggattctcgattccacgtccgattcgagcttggcacttaggatcttcagatgggcttcgcatcagaggtataacatccagacggttgatacctacagctgtatgatctccaggcttactgttgtggaaaatcgtgatgagatggacagcctcctcagtgagatggtcaggctgagggttcctgcgctggagcaggcccttaataaattagttgagtccctgagcagtaagaaccgatgtgatgaagctttgctggtaatacagcatgctagatctgcgaagcttaagttgtcagtctcagcttgcaacggagtgctgcatggtatggtcaggcaaggaaggggtttgcggttgttcatgcttgcgtacacggagattatcaaggcgggagtcctccctgatgtggaggcattgaattttctgatccaggctttgtgtgagtctggtcgtttagatctggcactgattcagtttgacaggatgaacaagaagaggtgtactcctaatagtcatacgtttgagatactgatcacagcactttgtttccacagcagagcagatgaagcggtcaagctctttgataagatgctgcaacttagatgctcccctgatagcagcttccatgctcaagtgatgcccctgttttgcaagttcagtaaagttaaggaggtgattacgttgcatcgaataatgaaagaaggcaacattcagttgagtctgcagttgtacagtgccttggttagatgtttatgtgagaatgaactactggatgacgctaccatagtgttcaaagagatggtagcatcaggtcatgctccaatggcaattacatatgtggacatgataaattgctactgtacaaaatccaagttccacaacgctatgatctttctagaggaaaatggtgtcactgaattagaaccatataatgtgctcctgacatggttgtgtagaaatgacaggctgcaggattcagtaaactatcttgagaaattgcacagcagaggttttgttgattgtgagtcatggaacattgttataactcagttctgcaatgaaggaaacatcagaagagcatttgagctcattggtagaatggttgtttcttcatttgcaccagataagactacctattctgctgttatatcttgttactgtcgattaggatcttacatagatgccttgagtatgttcagaagggtaagtattagcaacatgtctttgaattcggaatctttctcacagcttgtagaggttttgtgtcactcaaagaggatcaaagaagctatcgaagtttttaaatatcactataatagaggttgcagtctgacaaacaagtcacttgatatgctaattcaagggagttgcttgtctggaaagattcaagaagcagtcaaattgcgcacgttggctgtttctgtttgcacaggcactttttgtacattctccacttatgacataattatccaagcactgttccatttgaaggaggggaaacatgtattggctctctttgcacaaatgttgatggaaggttgtccattggatgggtatgcatacaatattctgttgcgctctttcctcaccaaggaaacaattattgaggctgctatcttgttcaacagaatggttaaccattccttttttcctgaccaagagacgtttgaattattagtcaatgatatggccttgttttcttttcttaatatggttgcacaaagtttactgaaagtggtagatgcaagtggaacagtgagccctagaatgtataacattattatttacggacttattaaagaaggcttcaagagtgaggcatgcaagtttctagaccaaatgctggaaaaggggtgggtgcctgattcaaggacacatcgtgtcttggtcggcagctctgatctggtggaggctagagaacttgttgaagcctaccagacagtggatggtgataatgtggccaacatattgttggaaggactagattgaggtctgtgacatgttttggtttactgttgtagggaaaggatataccagtgctgacagtgtttccaggtaaagttttcatgaaatactgtcagtaatgaatactggtagcagaatctagaaaagtagaaaaacctgtagcagaaaagataagggagttgtacatacttgaaagaccttcagcaaagatgaaaacggcaaattgctctggataacgtcctgtacttttcagacattatcgtgccatttctaaggaaaaaaaacacaatctttgccatcagtaatagtctgtgtgatgacttgatgaattaaattgactttggtttcttgcctgaatttctgctattatatttgtggctattctgaacccaatatggaactaaaccaacaccacaaaacaaaacccaccagctaggcctctactaacagattggggtgtttaaaacttaaaacagtaatacatagtgacaagttacttt

SEQ ID NO: 90881 - DNA, 920 bp, Zea Mays
tttttttcccatcgcaactcacgtgtcggattcgctcgtccacctacccggacgcgcgcacgcaaagcagaacgctcccctcccggccttcccttcctccccgccctccgaagtccgaaggccagaagcttccggaagccagcccaagccatgaacgccgccagcaccgccgccgcggcccccgcgcctgccgcgaccgtgcaggtgccgcgcgggcaggtggatctgatcgacttcatcgactggaccggcgtcgagtgcctcaaccaggactcgtcccacagcatcgtcaacgcgctcaagcagagtttgagagacgacgaggggctgtacctcgccagcgattcggacgagcagctgctgatctacatccccttcatgcaggtagtcaaactgcattccgcgctattcaaaggtcccgaggaagagggtaagatttgcagctctctgtttgaattctgtgcgttgcggctagatttgtgcccgattggaggactactacttttctaagtaagattgaatagtgtagatcacctgattcatgttaggtctgcgaggatccttgtcatatcatgtaacatcggctgcgattccatgaattaacatttgattctgatcctgattcgtggtccattcacatgatgcattgtgacttgtgctgctggaaaaaaaatcttgtgttcagacttgcaatgaaggtgcttgcttgtttagatttctgatatttgcatcttgtttagatttctgatatttgcattagtattgtgagtgttaagccgccattttattggagacaatttcctatttgacaccacatgcaagattcagcccccttatttgacacgggtttttgctctcattcccattattatggcactgttgtaagcttttccatcaaaaggctgttgagtactatgtgc

SEQ ID NO: 90882 - DNA, 1039 bp, Zea Mays
tttttttcccatcgcaactcacgtgtcggattcgctcgtccacctacccggacgcgcgcacgcaaagcagaacgctcccctcccggccttcccttcctccccgccctccgaagtccgaaggccagaagcttccggaagccagcccaagccatgaacgccgccagcaccgccgccgcggcccccgcgcctgccgcgaccgtgcaggtgccgcgcgggcaggtggatctgatcgacttcatcgactggaccggcgtcgagtgcctcaaccaggactcgtcccacagcatcgtcaacgcgctcaagcagagtttgagagacgacgaggggctgtacctcgccagcgattcggacgagcagctgctgatctacatccccttcatgcaggtagtcaaactgcattccgcgctattcaaaggtcccgaggaagagggccccaaaacagtaaaactcttctccaacaaagagcatatgggtttcagcaatgtcaatgactatccaccaagtgacaccctcgagctatcatccgatcatttgatagagaataaacttttgccactaaagtatgtcaagtttcaaaatgttcgcagtctgactatatttattgaggacaaccaaagtggaagtgatgtctccaaaattcacaagattgctctttatggaacaactgtggacacgacaaatatgaaggatctgaagaagatagaagagcactgagacgattttaaggctgagcttattccagtccagtgggtgcatggcatactagaagcagtttagatgttgaattgagcaatttctagttgaccctgcaactttccccccctatttttatacatgaggagttaaaagagtgcgagtctggtgatgccgaagctattacctcttggtatcttgtaatcctgcaatttatttatgtggcttgggagtgacagtcagacgatccggatccatttcatgaatgaatcaaaattgctccatgcatcgatggtcttgcaaaagcttagatcgttcctgggaagttttgtttgtgttgaacatt

SEQ ID NO: 90883 - DNA, 904 bp, Zea Mays
aattagaaccagcatcaaacaagggaggctgttatttccattttatggccgccttctatgtgacctaactaaaaacataatgtgttaccaacttaatggcaagtctttttttttgcctgaatgtttgaattttctactaaatataaggttttttcttttaaaatgatgttttccactgcaacactttgtggcatgacattctggcagtttctttgttgagaactgtgatgctctgtcactgcaattttatggttgcccttctttctcaaacaataaagcccttttcccatcgcaggccccaaaacagtaaaactcttctccaacaaagagcatatgggtttcagcaatgtcaatgactatccaccaagtgacaccctcgagctatcatccgatcatttgatagagaataaacttttgccactaaagtatgtcaagtttcaaaatgttcgcagtctgactatatttattgaggacaaccaaagtggaagtgatgtctccaaaattcacaagattgctctttatggaacaactgtggacacgacaaatatgaaggatctgaagaagatagaagagcactgagacgattttaaggctgagcttattccagtccagtgggtgcatggcatactagaagcagtttagatgttgaattgagcaatttctagttgaccctgcaactttccccccctatttttatacatgaggagttaaaagagtgcgagtctggtgatgccgaagctattacctcttggtatcttgtaatcctgcaatttatttatgtggcttgggagtgacagtcagacgatccggatccatttcatgaatgaatcaaaattgctccatgcatcgatggtcttgcaaaagcttagatcgttcctgggaagttttgtttgtgttgaacatt

SEQ ID NO: 90884 - DNA, 454 bp, Zea Mays
tcactgtcggtttcttcacagatgcatatttgatgatggattgtctgtcctaaatctaaatcgctgggttcattttgcagtgtggacacgacaaatatgaaggatctgaagaagatagaagagcactgagacgattttaaggctgagcttattccagtccagtgggtgcatggcatactagaagcagtttagatgttgaattgagcaatttctagttgaccctgcaactttccccccctatttttatacatgaggagttaaaagagtgcgagtctggtgatgccgaagctattacctcttggtatcttgtaatcctgcaatttatttatgtggcttgggagtgacagtcagacgatccggatccatttcatgaatgaatcaaaattgctccatgcatcgatggtcttgcaaaagcttagatcgttcctgggaagttttgtttgtgttgaacatt

SEQ ID NO: 90885 - DNA, 286 bp, Zea Mays
gaactagctgtcatgccatgcatctgcaaagccatcaaatctcagcaggttgcaaactgcaccatttgatgggaatggggactgtttgaggccagcgccgaggtgatgggaacagagtcgtgaggaaatggagacggatgctgaaagccgagagacatggcaaggagagaagtggacggcgagcgtgttaggacttcagcgatggagatggtggctgagtggaaagatcaaagacaagcacaatgtttgcggtgagatgggccactggaccagcctgctaaatgag

SEQ ID NO: 90886 - DNA, 1211 bp, Zea Mays
atcttcgttctgagctctctctctctagtctctcccgtccctacccaccaaatctcgcagtcgcagcaggtccaggtgctcccgaggaatccattcccaatttgcgttcccactcccaccaccgcttcttcccgtatcccttgtcctccctaatttcctctcacaaaaagcgggtgcggcgtcctgccactcacctcggtctcggggggcgccgtgcggcgggcgcccgtgctgctggtttcgctccaggggagaaggggcagagggagtagagcaggttaggtccgtttgcgttttcttttgcgggtttgtaggtcaaaagctcggcgagcactttccgctccacctcctcacgctcggaatcaaatcgatgccccccctgatttggttcctggtatcggtgcatgagcttgctccaagagatctcccttttggttcggcgtcaggggttctgtgaggtcacgcggcttcttcctcttggcgctcctcacatgtccgggcgcttcgatctctgcccactgcgcgagtgattctgctgctgcagcagctgttaggtgcgcgcggtccgttatggggtgaaccgaagcgttcctcgcagggctgtgggtttattacgccgcctgtttgcttccccgctccatgtccttgtgcccatgcttctttgcttttgtcacgcctgaaccgtgtcttcttgtagtatctgaggcttggcagttggcaagtacaaactagcaacttgcttaggtataaagtataaaccagtgtctggtgcagagcccaaaggggtcacgaatcgttgatgcatagatctgcttctggctgagataaggctctaagttcgctctgttgatggggctaccatgagccacgggaacgggatgttgaattctgtcaaggtggagaggtggccagcagcagtcgctgcaaatggccagcctaggccgatggatgtgctccacgacggcagctcgccgccgttccttaccaagacgtatgacatggttgatgacccaaccacgaacgccgttgtgtcatggagtgccgccaacaatagctttgtagtttgggatcctcatatctttgggacggtgctgctgccaaggtacttcaagcacaacaacttctccagctttgttcggcagctcaatacttatgttgccgttcttccgtgtttgtttctgcggctgtggaaccatgcacggagggatgat

SEQ ID NO: 90887 - DNA, 2549 bp, Zea Mays
atcttcgttctgagctctctctctctagtctctcccgtccctacccaccaaatctcgcagtcgcagcaggtccaggtgctcccgaggaatccattcccaatttgcgttcccactcccaccaccgcttcttcccgtatcccttgtcctccctaatttcctctcacaaaaagcgggtgcggcgtcctgccactcacctcggtctcggggggcgccgtgcggcgggcgcccgtgctgctggtttcgctccaggggagaaggggcagagggagtagagcaggttaggtccgtttgcgttttcttttgcgggtttgtaggtcaaaagctcggcgagcactttccgctccacctcctcacgctcggaatcaaatcgatgccccccctgatttggttcctggtatcggtgcatgagcttgctccaagagatctcccttttggttcggcgtcaggggttctgtgaggtcacgcggcttcttcctcttggcgctcctcacatgtccgggcgcttcgatctctgcccactgcgcgagtgattctgctgctgcagcagctgttaggtgcgcgcggtccgttatggggtgaaccgaagcgttcctcgcagggctgtgggtttattacgccgcctgtttgcttccccgctccatgtccttgtgcccatgcttctttgcttttgtcacgcctgaaccgtgtcttcttgtagtatctgaggcttggcagttggcaagtacaaactagcaacttgcttaggtataaagtataaaccagtgtctggtgcagagcccaaaggggtcacgaatcgttgatgcatagatctgcttctggctgagataaggctctaagttcgctctgttgatggggctaccatgagccacgggaacgggatgttgaattctgtcaaggtggagaggtggccagcagcagtcgctgcaaatggccagcctaggccgatggatgtgctccacgacggcagctcgccgccgttccttaccaagacgtatgacatggttgatgacccaaccacgaacgccgttgtgtcatggagtgccgccaacaatagctttgtagtttgggatcctcatatctttgggacggtgctgctgccaaggtacttcaagcacaacaacttctccagctttgttcggcagctcaatacttatggcttcagaaaggtggatcctgacagatgggaatttgctaatgaggagtttctgagaggtcagaggcacctcctcaaaaacattaggcgtcggaaacctccacactcatctccaaatcaacaatctcttggctcttacctcgaggtaggacactttggatatgaagaagagattgatcagctgaagagggataaacagctcttgatggctgaggtagtgaagctgaggcaggagcaccaaaatactagatcagatctacaggccatggaagagaaattacaagataccgagcagaagcagcagcagatgatggcattcatggcacgcgtcatgcagaaccctgatttcatgcgtcagctgatctcccagcgggagatgaggaaggagctcgaggatgccatctcgaagaagagaaggcgccgcattgaccagggacatgaagctggtagcatgggcactggttctagcctggagcaagggccacagggagtgtttgaaccgcaggagccggtggaatcactcgccaacggtgtgccatctgatctggagagttcgtctgttgaggcgaagggattggaggttcgacagggtgtttcttcaggtggttctgagcatctgaatggcaggccaagcggagagttaaatgatgatttctgggaggaccttctgcacgaggggggacttggtgcagatgcaggcaatgctgttggtcaggatgatatgaacatggacatggacccagatgttagcctgcctcaactgaaacaacatggacccagacattagccgctcttgtgctatcacaatggctgtgactctgtgagtatctttacagttatgctcgttatacccctgtggtgtacctgtttcgatcgtcttcgaccaaatgtcacgtcgactgcagtctccagttgttaatacagtctgttcagcacgctgatttaagtatttgggtcaagatgttcatataatcctgtggtatccagagatattatagtttgttttcgtaactgtttgcgcagagaccatgctatgttgcctgcaggctatcagtgtatttgttctaacagatcgcaacgctggtacaacgcagtgacctgccagactgggccactatgagattgtagggaaagaccagatagcttgtgtatgtaaaagctgatccatagtagcctatcatgtgcaacgctattgccctttgggatttggcatttcactgtatataacatatcatcgccgtattgccgcatccatcgttgtcttggtttacccatttaagtttgttgtcttcccttttagcttacacatgtaccggctcggtcagtgcccgaggatctatttgcgtgcaaaagtgttcttttttcaatttctgaaatctagaggcttctgtcttct

SEQ ID NO: 90888 - DNA, 1606 bp, Zea Mays
tgaagaagaatattggcaaatatgttttataactgaaacatgttgtgagctgcaattggtgaaagataaataatttatatttttcatacgacccctcttcattttggtaatttatccaatctgaaatgatttcagcagttaattcttcctcaatgaaaaatggcgattgatatttctggtgactggattagcggattatttggtttggcagggcttcagaaaggtggatcctgacagatgggaatttgctaatgaggagtttctgagaggtcagaggcacctcctcaaaaacattaggcgtcggaaacctccacactcatctccaaatcaacaatctcttggctcttacctcgaggtaggacactttggatatgaagaagagattgatcagctgaagagggataaacagctcttgatggctgaggtagtgaagctgaggcaggagcaccaaaatactagatcagatctacaggccatggaagagaaattacaagataccgagcagaagcagcagcagatgatggcattcatggcacgcgtcatgcagaaccctgatttcatgcgtcagctgatctcccagcgggagatgaggaaggagctcgaggatgccatctcgaagaagagaaggcgccgcattgaccagggacatgaagctggtagcatgggcactggttctagcctggagcaagggccacagggagtgtttgaaccgcaggagccggtggaatcactcgccaacggtgtgccatctgatctggagagttcgtctgttgaggcgaagggattggaggttcgacagggtgtttcttcaggtggttctgagcatctgaatggcaggccaagcggagagttaaatgatgatttctgggaggaccttctgcacgaggggggacttggtgcagatgcaggcaatgctgttggtcaggatgatatgaacatggacatggacccagatgttagcctgcctcaactgaaacaacatggacccagacattagccgctcttgtgctatcacaatggctgtgactctgtgagtatctttacagttatgctcgttatacccctgtggtgtacctgtttcgatcgtcttcgaccaaatgtcacgtcgactgcagtctccagttgttaatacagtctgttcagcacgctgatttaagtatttgggtcaagatgttcatataatcctgtggtatccagagatattatagtttgttttcgtaactgtttgcgcagagaccatgctatgttgcctgcaggctatcagtgtatttgttctaacagatcgcaacgctggtacaacgcagtgacctgccagactgggccactatgagattgtagggaaagaccagatagcttgtgtatgtaaaagctgatccatagtagcctatcatgtgcaacgctattgccctttgggatttggcatttcactgtatataacatatcatcgccgtattgccgcatccatcgttgtcttggtttacccatttaagtttgttgtcttcccttttagcttacacatgtaccggctcggtcagtgcccgaggatctatttgcgtgcaaaagtgttcttttttcaatttctgaaatctagaggcttctgtcttct

SEQ ID NO: 90889 - DNA, 1254 bp, Zea Mays
ttgataatataatttgtattggattttgtgtagtgtgcaacttttcaaaatctatggagaaccaaaaccacctatgcaagaagacataacttacatgtctacattggggccatttccgaaatgggcctcgacagagaatagaatagcctaatcaattcagttggttatttcttatctagaagcaaaagagaaattgctaatgctatttttacccgttttgtctttatcctttccgcgtccgacgagtgcgcggcggccggtgatgactggtcgcgacaggtgtgccgcgggccccgcggtgccgtgccgtgtggatcagtcccgatccttctcccgccttcggccttccccgcgcgcgcgcgcacgcaccagcaccaccgcgatataaagcccgccaccaatccgctcgtggtcgtcgtcatcatcccgattcccgacacgcttgtgttgtcgcgattggcaagctcggcggctcgtggcagcgggaacttacgaggcgaaggagagcgagggcgaccgcgcggatcgcatcgcagctctgggcggaggtggggccttgcgcggagatgctagcggtgttcgatcgggcggtggcgccgagcccggaggggctgcggcagccgggcgccgcggggggcggctgcgcggcgggcctcgcggaccggttcagagaggcgcggcccgacgcggtcaccgtcaaccttggcgggtccggcgccctggcgtactcctcgagcaaccagaaccccctcctccccaggttgtttggcgcggtggacggcgtattctgcatgttccagggaacaattgcgaacgttgctgtgctgaagcagcagtatgggttgagcaaaggcgctaatgaggtcagcatcatcatcgaggcttacaggaccttgagggacaggggcccttatcctgcagatcaggttgtgagggacataagtgggaaatttgcatttgtcctgtatgattgctccactaagtcggtcttcatggctgctgtaagtgaactactcctatgttgtaccaaattgtttttttttggctattctcattattaacatcttatgagcagacattttgtcaataaattagtcagtgactcagtggtgttgtccttttaaaaaggattgtgcatagtggtgttctggttgctctatgtggatgagaactcaaatcatcttgggatgcacatagaatcggcatcatatatagtagacaactaaaggttttgcttaaggtcgaagtggcaat

SEQ ID NO: 90890 - DNA, 1699 bp, Zea Mays
ttgataatataatttgtattggattttgtgtagtgtgcaacttttcaaaatctatggagaaccaaaaccacctatgcaagaagacataacttacatgtctacattggggccatttccgaaatgggcctcgacagagaatagaatagcctaatcaattcagttggttatttcttatctagaagcaaaagagaaattgctaatgctatttttacccgttttgtctttatcctttccgcgtccgacgagtgcgcggcggccggtgatgactggtcgcgacaggtgtgccgcgggccccgcggtgccgtgccgtgtggatcagtcccgatccttctcccgccttcggccttccccgcgcgcgcgcgcacgcaccagcaccaccgcgatataaagcccgccaccaatccgctcgtggtcgtcgtcatcatcccgattcccgacacgcttgtgttgtcgcgattggcaagctcggcggctcgtggcagcgggaacttacgaggcgaaggagagcgagggcgaccgcgcggatcgcatcgcagctctgggcggaggtggggccttgcgcggagatgctagcggtgttcgatcgggcggtggcgccgagcccggaggggctgcggcagccgggcgccgcggggggcggctgcgcggcgggcctcgcggaccggttcagagaggcgcggcccgacgcggtcaccgtcaaccttggcgggtccggcgccctggcgtactcctcgagcaaccagaaccccctcctccccaggttgtttggcgcggtggacggcgtattctgcatgttccagggaacaattgcgaacgttgctgtgctgaagcagcagtatgggttgagcaaaggcgctaatgaggtcagcatcatcatcgaggcttacaggaccttgagggacaggggcccttatcctgcagatcaggttgtgagggacataagtgggaaatttgcatttgtcctgtatgattgctccactaagtcggtcttcatggctgctaacagatgcagctgttcagttattcccgaagacatatatctgatcacaggctactgctacgacgtacaatggtaccactggtattgaccggcaactgataggtagctcagctcgtgttcgtaacctcataacaggacaccgatggaaatgttccgttctactggggcgtggacaccgacgggcgtcttgtggtctctgacgacgccgaactcgtgaagagtgcctgtgggaaatcctgtgccccgttccccaaaggtaaaaaagaaaatatacgaacagaagtgtttctcgtcactcttcactctgctctcgcccgcgcgctagctgacgcctggctggcgtttcgacttggatgtctctcgactgcatcaggcttcttcttcacgacgtccggagggctgaggagctacgagcaccccatgcacgaggtgaagccggtgccgagggtggacagcaagggcgaggtgtgcggcacgacgtacacggtcgacgcaagcgccaggaaggagaccaccatcccaagggtcggcagcgccgccgactggtcttcgcagtactaaaattcgttatctttctctgtgtgtgttgaacgggttcgagcgcaggtagcagggcgtcgcacgggcgtggcccgtgtttgttcgcatggaaaccctagctgtctggtgtttatctgaatgaatagactgttctctatg

SEQ ID NO: 90891 - DNA, 1631 bp, Zea Mays
ttgataatataatttgtattggattttgtgtagtgtgcaacttttcaaaatctatggagaaccaaaaccacctatgcaagaagacataacttacatgtctacattggggccatttccgaaatgggcctcgacagagaatagaatagcctaatcaattcagttggttatttcttatctagaagcaaaagagaaattgctaatgctatttttacccgttttgtctttatcctttccgcgtccgacgagtgcgcggcggccggtgatgactggtcgcgacaggtgtgccgcgggccccgcggtgccgtgccgtgtggatcagtcccgatccttctcccgccttcggccttccccgcgcgcgcgcgcacgcaccagcaccaccgcgatataaagcccgccaccaatccgctcgtggtcgtcgtcatcatcccgattcccgacacgcttgtgttgtcgcgattggcaagctcggcggctcgtggcagcgggaacttacgaggcgaaggagagcgagggcgaccgcgcggatcgcatcgcagctctgggcggaggtggggccttgcgcggagatgctagcggtgttcgatcgggcggtggcgccgagcccggaggggctgcggcagccgggcgccgcggggggcggctgcgcggcgggcctcgcggaccggttcagagaggcgcggcccgacgcggtcaccgtcaaccttggcgggtccggcgccctggcgtactcctcgagcaaccagaaccccctcctccccaggttgtttggcgcggtggacggcgtattctgcatgttccagggaacaattgcgaacgttgctgtgctgaagcagcagtatgggttgagcaaaggcgctaatgaggtcagcatcatcatcgaggcttacaggaccttgagggacaggggcccttatcctgcagatcaggttgtgagggacataagtgggaaatttgcatttgtcctgtatgattgctccactaagtcggtcttcatggctgctatgcagctgttcagttattcccgaagacatatatctgatcacaggctactgctacgacgtacaatggtaccactggtattgaccggcaactgataggtagctcagctcgtgttcgtaacctcataacaggacaccgatggaaatgttccgttctactggggcgtggacaccgacgggcgtcttgtggtctctgacgacgccgaactcgtgaagagtgcctgtgggaaatcctgtgccccgttccccaaaggcttcttcttcacgacgtccggagggctgaggagctacgagcaccccatgcacgaggtgaagccggtgccgagggtggacagcaagggcgaggtgtgcggcacgacgtacacggtcgacgcaagcgccaggaaggagaccaccatcccaagggtcggcagcgccgccgactggtcttcgcagtactaaaattcgttatctttctctgtgtgtgttgaacgggttcgagcgcaggtagcagggcgtcgcacgggcgtggcccgtgtttgttcgcatggaaaccctagctgtctggtgtttatctgaatgaatagactgttctctatgaatcaacacggatttctctctaagttcacatgatttccgttgctgctttgctgc

SEQ ID NO: 90892 - DNA, 1552 bp, Zea Mays
ttgataatataatttgtattggattttgtgtagtgtgcaacttttcaaaatctatggagaaccaaaaccacctatgcaagaagacataacttacatgtctacattggggccatttccgaaatgggcctcgacagagaatagaatagcctaatcaattcagttggttatttcttatctagaagcaaaagagaaattgctaatgctatttttacccgttttgtctttatcctttccgcgtccgacgagtgcgcggcggccggtgatgactggtcgcgacaggtgtgccgcgggccccgcggtgccgtgccgtgtggatcagtcccgatccttctcccgccttcggccttccccgcgcgcgcgcgcacgcaccagcaccaccgcgatataaagcccgccaccaatccgctcgtggtcgtcgtcatcatcccgattcccgacacgcttgtgttgtcgcgattggcaagctcggcggctcgtggcagcgggaacttacgaggcgaaggagagcgagggcgaccgcgcggatcgcatcgcagctctgggcggaggtggggccttgcgcggagatgctagcggtgttcgatcgggcggtggcgccgagcccggaggggctgcggcagccgggcgccgcggggggcggctgcgcggcgggcctcgcggaccggttcagagaggcgcggcccgacgcggtcaccgtcaaccttggcgggtccggcgccctggcgtactcctcgagcaaccagaaccccctcctccccaggttgtttggcgcggtggacggcgtattctgcatgttccagggaacaattgcgaacgttgctgtgctgaagcagcagtatgggttgagcaaaggcgctaatgaggtcagcatcatcatcgaggcttacaggaccttgagggacaggggcccttatcctgcagatcaggttgtgagggacataagtgggaaatttgcatttgtcctgtatgattgctccactaagtcggtcttcatggctgctgacaccgatggaaatgttccgttctactggggcgtggacaccgacgggcgtcttgtggtctctgacgacgccgaactcgtgaagagtgcctgtgggaaatcctgtgccccgttccccaaaggcttcttcttcacgacgtccggagggctgaggagctacgagcaccccatgcacgaggtgaagccggtgccgagggtggacagcaagggcgaggtgtgcggcacgacgtacacggtcgacgcaagcgccaggaaggagaccaccatcccaagggtcggcagcgccgccgactggtcttcgcagtactaaaattcgttatctttctctgtgtgtgttgaacgggttcgagcgcaggtagcagggcgtcgcacgggcgtggcccgtgtttgttcgcatggaaaccctagctgtctggtgtttatctgaatgaatagactgttctctatgaatcaacacggatttctctctaagttcacatgatttccgttgctgctttgctgcacgcctgtactgtaacaagaattactgcctttgttatcaggaaataagtt

SEQ ID NO: 90893 - DNA, 138 bp, Zea Mays
atggcgtcacccacttctcttgctgttgctcccatcccatccgccgacaacgtggcgtcggatcctgagacggacgttccagatctgcgcataacatatgagccccagcccccaggagaggacttccggcgcggctag

SEQ ID NO: 90894 - DNA, 113 bp, Zea Mays
aacttacaaatatttgatgtgttagtaaacgaccaaactttagataaaaacatacattatattttactagattataggcccatgctaaccctacaatcacatgatgggagagg

SEQ ID NO: 90895 - DNA, 1231 bp, Zea Mays
aagtacaatgtataatgtgtttttaaaaacttttaaactagttcacctcgccttttaaatagtctggcattactcttgaccacgaaaggaaaaactgggatgtatatacatacaaatagtaagtgtgaactttaattagagccgaattgaagaacaaaaaactagccaggttctccaccatgcgatcatgacagccatgagcaacattgaggcagagttctcaggtcactatccacagcataaaagtgagcgaataaataaacggtaacagtattaaacatggtagatgtgagaagtatttctgtatctgtccaggaccgcaaaggaagaagatgaatagtaatgaagtagcagaaacgttggtggttgacaccagtattccagcccagatgcaaagggcataattcaaaatttttgtattgattctttgcactcgcagaaaagggaaactagtttttcccagctcagttttcttttctcaacgtactattaggttaagatgatttcactattactggcatatagtggatttccatttgctagtgctagttttatccgagataggcattctgtgaatttagtgcagggtttatttatataaaacaaaataaagaagtgatgtgcgggctctactaataaggaatcatctgctcttgctctcacggaacatgtagagtggatagcaacgacaatatgcagtcacatgccaaagcagcaaagctagtagagcgtctgctaacaaacagtcgatcaacaatcatgcagcaacggagtgagagtgcaaccaaaaaataagcaaatgattgaccttatcagttcaatgctctataatgaattgaatgaagcatgactgcatgagagtaccacaagcgcagtcagctatcgatcagaaacttgcactgggaacaagcgtgcagcaggaatatggaacgagggcgcattcaccattttatgatgttaccctcgtttcggactcggtagagaatgtcactatgcccgtgtccttgctaccgcgagtcaaggtcaatggttaacaacagatttgaaatgaaataaaaaaatgctcattcgacaaaaccacctaccattcagagcaaacaccagcagcaaaacatctagtaaaccgactgagcagtgaatctatcaatcagaatcaacaaaaaaaatcaagtggtctaagatcagaattgaactttcaaaagtatatggaagttgttggtactacctgctt

SEQ ID NO: 90896 - DNA, 114 bp, Zea Mays
caacaacaaacacgtcaaatcacataactaaccttagacctaaaccaaaacaaacttccaaacagaagtcgatagtgaacactaaaattgatatattcaatttctgaaagttga

SEQ ID NO: 90897 - DNA, 2128 bp, Zea Mays
atggcagtatgagtagatccgagaatctgacaatccaagcgtcctgcactcctgctccacctcgattcctccacagcacactcccaaaaccagagccacgccggccggcacaccgtcgcctcctttgactagcctcgccgccgcagcgacagccatggccaccgctgcccgctccctccacctccctggtccgacgcctcctaaatcctctaccccctcctcccaccgcctccctgtcccttgccacctccgcccccaacgccgccgcctggccgcctcgtcctccgacctcacctccttccccgaaccgccccccgccaccgaggcggagctgcgggagaacgggttccggagcacgcgccgcaccaagctcgtctgcaccgtgggccccgccacctgcggcgccgccgagctcgaggcgctcgccgtcggcggcatgaacgtcgcgcgggtcaacatgtgccacggcgaccgcgagtggcaccgcgaagtcatccgcgctgtccggaggctcaacgacgagaaagggttcgcggtcgccgtgatgatggacaccgagggcagcgagatccacatgggcgaccttggcggagcgccctccgcgaaggccgaggatggagaagtttggacatttagcgttagatcttctgacacgtcgctcccagatcgaatcattcatgtgaactatgatggctttgctgaagatgtcaaagctggtgatgaactatttgcggacggtggaatggccaggtttgaggtgattgaaaagttagggccagatgtgaagtgccgctgcactgatcctggtctgttgctgccacgggctaatcttactatatggcgcgatggcagtgtagtgcgagagaggaacgctatgcttcctacaatttcgtcgaaggattggattgacatagattttggaattgctgaaggtgttgatttcatcgccgtgtcatttgtcaagtctgctgaagtaattaatcatttgaagagttacattgctgcgaggagccgtggaagtgatataggggtcattgcaaagattgagagcatcgatgctttgaagaacctggaggagattatccgtgcatcagatggagtaatggtagccagaggggacttgggggcacaaatccccctggaacaggtcccttccatacagcaaagaatagttagaatgtgcagacagctcaacaagccagtcattgttgcttctcagcttctggaatcaatgatcgagtatcctacacctactagggctgaggttgctgatgtttctgaggcagtccgccagcgtgcagatgctctcatgctttctggtgagtcggccatggggaggtacccagagaaggctctcagcgtccttaggagtgttagcctgaggatcgaaaggtggtggagagaggagaagcgccaagaggcactggagcttcaaggtgtctcgtcttccttttctgacaagatatcagaggaaatatgcaattcagcagctaaaatggccaacaacttaggagtcgacgccgttttcgtttacacgaaggatggctacatgggctccctgctctcacgatgccgccccgactgcccgatcttcgccttcacgtcttcgacgtctgtcaggagacggctgaacctccagtggggcctcatcccgttccggctgagcgagtccgacgacatggagagcaacctcaaccgcaccttctccctgctgaaggccaggggcatggtgcagtctggagacctggtgatcgcgctctccgacatgctgcagtccatccaagtggtgaatgtgccctaggaatacgatccccatgtccagctggttccttgacctggaatgtagcatacaattaggaggggcttctttttttgtttgtttgtttgtcatttgagtgtatcccagttcgtagcatgtttctgcctcatgttgaggctctctggatgtcgatattgatttgcgtcagtgtggtttaggttcggactcgaatgctcgatttgaaaattcgaacagaactcggtttgcatcagtgtcatgattaactcaaaccattgttctgtactatatcagaacgtgttactacttatcttagtgtcattcctcagtttcacttggttttttttaaaa

SEQ ID NO: 90898 - DNA, 1523 bp, Zea Mays
cccttcttctctcttggtagttttcgcccctcgcgttgcgtgtatagactgtgaaaaagaggagtggggaaggggaaaaagaagaaagaaagagagagagagagagagagagagagcgttcaccgagaatggccgtcgcctccggcgaacgcccggcgtacgggcagtagcacgctgggactggtggttggtttaggccggtggtgtgttggtgcggttggctctgggttggttacttgtgcgagcgagattttgtggatgtaggcagtcgctgcgcctcatccctcatgcgatcgatgccgttccagctcaagaccggtcaccaccaccacggcgccgccatggaagggaagccgccgccgccgccgacgacgcagcagcctgcgccgacgccgagggtgtcgaggctccggaggctgctcgggcgggtgtcttcatcggagaagttcgccgcggatgggaaggacagggacaaggacgagaagctgccgccgccgccgccgccgttgccgcccgcgaccgacgatgcggacgccgcggggtcactggggctggaccgcatggtgctcagtttcatggaagaggcctccgccgtcgagcggccgccgcgggggcgttgcaactgcttcaacggcagtaaccacgaggaaagcgacgaggagtttgatttcctcccctccgcgcacgcctcggcgacggccgccgctggggcaggggacgccttggaggctctgaagagcgcgagcgtcgcggagcggaatctcctggcggacgcgtctaggctcgccgacaagtgcggcaagggctgcaagggcaaggcggagtgccggcgcgcggtggccgacggcctcaggtcgctgggctacgacgcctccgtgtgcacgtcgcggtgggagaaggccccctcccacccagcaggcgagcacgagtacatcgacgccgtggtggggaaggggaaggagcaggaggaggaggaggtgaggctgatcgtggaggtggacttccggtcgcagttcgagctggcgcggtcgaccaaggcgtaccgcgcggcgctccaggcgctgccgccgctgttcgtgggcaccccggaccggctcgggcagatcgtggcggtggtggcggaggcggcgcggcagagcctcaagaagaaggggctccacttcccgccgtggcggaagccggagtacatgcgcgccaagtggctgtccccgcacgtccgctgcggcggcgtcggaggcgacatggtcgccgtgccggccgccgccgccgccgcggcgacgcccgtccaggcggcgagtttttccggcgagttcgagctcgtgttcgacaggaagcgtagcagcgccggcgccggcgccgccgcggagggcggcgccgtcggcggcgagaagatcacggtggtggtgtcgccgtggcgcccgacggaggaggcgagcaagaagcagctgccgcccaaggcgaaggtcgtcacggggctcgccgccgtcctctgagcgtggcgtggtgatggacagagaataacg

SEQ ID NO: 90899 - DNA, 2001 bp, Zea Mays
cccttcttctctcttggtagttttcgcccctcgcgttgcgtgtatagactgtgaaaaagaggagtggggaaggggaaaaagaagaaagaaagagagagagagagagagagagagagcgttcaccgagaatggccgtcgcctccggcgaacgcccggcgtacgggcagtagcacgctgggactggtggttggtttaggccggtggtgtgttggtgcggttggctctgggttggttacttgtgcgagcgagattttgtggatgtaggcagtcgctgcgcctcatccctcatgcgatcgatgccgttccagctcaagaccggtcaccaccaccacggcgccgccatggaagggaagccgccgccgccgccgacgacgcagcagcctgcgccgacgccgagggtgtcgaggctccggaggctgctcgggcgggtgtcttcatcggagaagttcgccgcggatgggaaggacagggacaaggacgagaagctgccgccgccgccgccgccgttgccgcccgcgaccgacgatgcggacgccgcggggtcactggggctggaccgcatggtgctcagtttcatggaagaggcctccgccgtcgagcggccgccgcgggggcgttgcaactgcttcaacggcagtaaccacgaggaaagcgacgaggagtttgatttcctcccctccgcgcacgcctcggcgacggccgccgctggggcaggggacgccttggaggctctgaagggcctggtgcagagcgcgagcgtcgcggagcggaatctcctggcggacgcgtctaggctcgccgacaagtgcggcaagggctgcaagggcaaggcggagtgccggcgcgcggtggccgacggcctcaggtcgctgggctacgacgcctccgtgtgcacgtcgcggtgggagaaggccccctcccacccagcaggcgagcacgagtacatcgacgccgtggtggggaaggggaaggagcaggaggaggaggaggtgaggctgatcgtggaggtggacttccggtcgcagttcgagctggcgcggtcgaccaaggcgtaccgcgcggcgctccaggcgctgccgccgctgttcgtgggcaccccggaccggctcgggcagatcgtggcggtggtggcggaggcggcgcggcagagcctcaagaagaaggggctccacttcccgccgtggcggaagccggagtacatgcgcgccaagtggctgtccccgcacgtccgctgcggcggcgtcggaggcgacatggtcgccgtgccggccgccgccgccgccgcggcgacgcccgtccaggcggcgagtttttccggcgagttcgagctcgtgttcgacaggaagcgtagcagcgccggcgccggcgccgccgcggagggcggcgccgtcggcggcgagaagatcacggtggtggtgtcgccgtggcgcccgacggaggaggcgagcaagaagcagctgccgcccaaggcgaaggtcgtcacggggctcgccgccgtcctctgagcgtggcgtggtgatggacagagaataacgctcctactagtactactgctgcctagctagctagtacccgctcttctcgcaattctcccttcgttttcgtttcttttttgttttccgccgcgcctctcgatccgtttggggatctagttttcggtgttttggtgttttccgggttttattttcggaaaaggagaaaaaacactcgccgccgccttcttccttatggtttcctttttgttttgttttgacgcttgtaagttttggtcttggctggcatctcgaggggctttgtgatccctccgtcctgcccggcggccgggcaatatgtagcagcagtcgtcgtttcgatacctgcttgtaggcgcaagcgtgatcacgtcctatgtgctgctgcttgtaatttgtgtattgaggagacgaactgtgcgtgccgcttgttatattgttgccacggaaagagaagcagatatatgagcactgccttattgtcgcagat

SEQ ID NO: 90900 - DNA, 1785 bp, Zea Mays
cccttcttctctcttggtagttttcgcccctcgcgttgcgtgtatagactgtgaaaaagaggagtggggaaggggaaaaagaagaaagaaagagagagagagagagagagagagagcgttcaccgagaatggccgtcgcctccggcgaacgcccggcgtacgggcagtagcacgctgggactggtggttggtttaggccggtggtgtgttggtgcggttggctctgggttggttacttgtgcgagcgagattttgtggatgtaggcagtcgctgcgcctcatccctcatgcgatcgatgccgttccagctcaagaccggtcaccaccaccacggcgccgccatggaagggaagccgccgccgccgccgacgacgcagcagcctgcgccgacgccgagggtgtcgaggctccggaggctgctcgggcgggtgtcttcatcggagaagttcgccgcggatgggaaggacagggacaaggacgagaagctgccgccgccgccgccgccgttgccgcccgcgaccgacgatgcggacgccgcggggtcactggggctggaccgcatggtgctcagtttcatggaagaggcctccgccgtcgagcggccgccgcgggggcgttgcaactgcttcaacggcagtaaccacgaggaaagcgacgaggagtttgatttcctcccctccgcgcacgcctcggcgacggccgccgctggggcaggggacgccttggaggctctgaagggcctggtgcagagcgcgagcgtcgcggagcggaatctcctggcggacgcgtctaggctcgccgacaagtgcggcaagggctgcaagggcaaggcgtaccgcgcggcgctccaggcgctgccgccgctgttcgtgggcaccccggaccggctcgggcagatcgtggcggtggtggcggaggcggcgcggcagagcctcaagaagaaggggctccacttcccgccgtggcggaagccggagtacatgcgcgccaagtggctgtccccgcacgtccgctgcggcggcgtcggaggcgacatggtcgccgtgccggccgccgccgccgccgcggcgacgcccgtccaggcggcgagtttttccggcgagttcgagctcgtgttcgacaggaagcgtagcagcgccggcgccggcgccgccgcggagggcggcgccgtcggcggcgagaagatcacggtggtggtgtcgccgtggcgcccgacggaggaggcgagcaagaagcagctgccgcccaaggcgaaggtcgtcacggggctcgccgccgtcctctgagcgtggcgtggtgatggacagagaataacgctcctactagtactactgctgcctagctagctagtacccgctcttctcgcaattctcccttcgttttcgtttcttttttgttttccgccgcgcctctcgatccgtttggggatctagttttcggtgttttggtgttttccgggttttattttcggaaaaggagaaaaaacactcgccgccgccttcttccttatggtttcctttttgttttgttttgacgcttgtaagttttggtcttggctggcatctcgaggggctttgtgatccctccgtcctgcccggcggccgggcaatatgtagcagcagtcgtcgtttcgatacctgcttgtaggcgcaagcgtgatcacgtcctatgtgctgctgcttgtaatttgtgtattgaggagacgaactgtgcgtgccgcttgttatattgttgccacggaaagagaagcagatatatgagcactgccttattgtcgcagatata

SEQ ID NO: 90901 - DNA, 118 bp, Zea Mays
ctacaaagttatagatctcttcgagctctacaattttcatataaactttatcttcatccgatttcatatgtaaaagttatgattttataactatattattatgcagaaaaagaaaaaa

SEQ ID NO: 90902 - DNA, 2456 bp, Zea Mays
ccgtgctcccccgaatttttttcctctccccttccgagttccgacctcgtcgccccgcggctccagctcttcccgttcattccctcgcgccgaagcaactccggaatccgcctgcgcgccaaaaccctagccccagatcccgcgccgcgccgcgccgcccggtgcccagtcggcggcgcccgcgccggccattgccgctcgccgcattgggggcgcttacggcgtctcctccgctcccgaagcagagatctgggccgaggagacctggttgttcgtgggcggtgcaggggatggggcgcgggcggtgggcctcggggatccgcgcggcggcgctggtcctgctcgcggtcgcggctgccgccggagccgccgcgggggatcctgatcccgacgagctcgagcgcgcgtttccaatagtggagccagaccacgggcacacaaaacttcgtctctcagaacaaggtctagaagcaattcgaaggattgaaactcctattgctgttgttggtgtcattggtccatatcgatctggaaaatcttttctcctcaaccagcttctctccttatcttgtgataaaggttttggagttggtcatatgcgagatactaaaactaaaggtatttggatttggggtactcctgttgagatggatgttgatggttccaaagtttctgtcatttatctagacactgaaggatttgaaagtgttgggaaatcaaatgtgtatgatgataggatatttgctttggcaactgtcctaagttcggtgcttatctacaaccttcctgagacggtacgtgaagctgatatatctaggctttcatttgccattgaaattgctgaagaattctatggaaggtttgaggggcaagatgttgcttttgagccagcaaagcttctctggcttatccagagggatttcctccaaggaaaatctgttcaacaaatggtcaatgaagcccttcaacgggtgcctaatgataatggtgacaaatatattgatgaggtcaatcaaatacgagattcgttggcagttatggggaacaacagcactgcttttagcttgcctcagccgcatcttcaaagaacaaaattatgtgatatggaggacaaagaacttgaacccttatatgtaaaacggcgggagcaattaaagcagcttgtttcgtctattgtaaaaccaaaaattgtgcagggcagaactctaaatgggaaggactttgtgtctttcttgcagcagattcttgaggctttgaataaaggcgaaattccatcaacagggtctctagttgaaatttttaacaaagccattcttgatcgctgtctgaaggcgtacagggagaaaatggatggcttaggcttaccagtaccggtagacaaactgcagaaacttcatgagatggcaaatggtgatgctagaattctctttgataagcagcactttggcaaacatcatgctgctcagtcagctctcaagcttgaagatgatattaaaaaggtgtacagaaacttacttctagctaatgaatatcaatcgtcaaagctgtgtgaagctcgcttttctgagtgtgaagataagatggatcaccttcaagtcttgaaacttccttcgatggcaaaattcaatgcaggctttactcactgcaaccaaagtttcgtaaaggaatgcgttggacctgcaaaagaaagctatgaacgtagaatgtcaaagatgcttgccaagtctcgtgctcttttcatcaaggagtacaataacaagcttttcaattggttggtgaccttctctttggtcatggtggtcatcgggcgctttgtcatcaagttcttcctacttgaaatcgccgcttgggtgatgttcatcttcctagagacgtacacgagaatgttctggtcagcggaatcgctgtactataatccagcttggcacatcattgtttcttcctgggaaaccatcgtgtacagcccaattcttgatctggacagatgggccgtcccaattgtcataatgctattatttggggttctttactggagatgcttcggtggtagaaggaagcggggaaggggttcgctcctcccattgtacaagaattcttataactcgagtcgtcgctcgagatcagactagttatacacgcaatgttgaagttattttcttttaaagaatggtacaaaatatctgcctgtagaagaggctaaactgccgaatgtggatcatctgcaagtgcttttggatgggcatgttttgaattttgatggtgccctgccaatgtatctccaattctttttggtggatgaagagaggcggtgaagctgctagtatgggggcggggcacctgcacaaagcctctgttgtaattcgtaccggggtactttttgtgtagctaggttatccttacatgtcacggtcccaattgattgattattgtttacgtccactgcaattttttttggc

SEQ ID NO: 90903 - DNA, 2451 bp, Zea Mays
ccgtgctcccccgaatttttttcctctccccttccgagttccgacctcgtcgccccgcggctccagctcttcccgttcattccctcgcgccgaagcaactccggaatccgcctgcgcgccaaaaccctagccccagatcccgcgccgcgccgcgccgcccggtgcccagtcggcggcgcccgcgccggccattgccgctcgccgcattgggggcgcttacggcgtctcctccgctcccgaagcagagatctgggccgaggagacctggttgttcgtgggcggtgcaggggatggggcgcgggcggtgggcctcggggatccgcgcggcggcgctggtcctgctcgcggtcgcggctgccgccggagccgccgcgggggatcctgatcccgacgagctcgagcgcgcgtttccaatagtggagccagaccacgggcacacaaaacttcgtctctcagaacaaggtctagaagcaattcgaaggattgaaactcctattgctgttgttggtgtcattggtccatatcgatctggaaaatcttttctcctcaaccagcttctctccttatcttgtgataaaggttttggagttggtcatatgcgagatactaaaactaaaggtatttggatttggggtactcctgttgagatggatgttgatggttccaaagtttctgtcatttatctagacactgaaggatttgaaagtgttgggaaatcaaatgtgtatgatgataggatatttgctttggcaactgtcctaagttcggtgcttatctacaaccttcctgagacggtacgtgaagctgatatatctaggctttcatttgccattgaaattgctgaagaattctatggaaggtttgttcatgggcaagatgttgcttttgagccagcaaagcttctctggcttatccagagggatttcctccaaggaaaatctgttcaacaaatggtcaatgaagcccttcaacgggtgcctaatgataatggtgacaaatatattgatgaggtcaatcaaatacgagattcgttggcagttatggggaacaacagcactgcttttagcttgcctcagccgcatcttcaaagaacaaaattatgtgatatggaggacaaagaacttgaacccttatatgtaaaacggcgggagcaattaaagcagcttgtttcgtctattgtaaaaccaaaaattgtgcagggcagaactctaaatgggaaggactttgtgtctttcttgcagcagattcttgaggctttgaataaaggcgaaattccatcaacagggtctctagttgaaatttttaacaaagccattcttgatcgctgtctgaaggcgtacagggagaaaatggatggcttaggcttaccagtaccggtagacaaactgcagaaacttcatgagatggcaaatggtgatgctagaattctctttgataagcagcactttggcaaacatcatgctgctcagtcagctctcaagcttgaagatgatattaaaaagaaacttacttctagctaatgaatatcaatcgtcaaagctgtgtgaagctcgcttttctgagtgtgaagataagatggatcaccttcaagtcttgaaacttccttcgatggcaaaattcaatgcaggctttactcactgcaaccaaagtttcgtaaaggaatgcgttggacctgcaaaagaaagctatgaacgtagaatgtcaaagatgcttgccaagtctcgtgctcttttcatcaaggagtacaataacaagcttttcaattggttggtgaccttctctttggtcatggtggtcatcgggcgctttgtcatcaagttcttcctacttgaaatcgccgcttgggtgatgttcatcttcctagagacgtacacgagaatgttctggtcagcggaatcgctgtactataatccagcttggcacatcattgtttcttcctgggaaaccatcgtgtacagcccaattcttgatctggacagatgggccgtcccaattgtcataatgctattatttggggttctttactggagatgcttcggtggtagaaggaagcggggaaggggttcgctcctcccattgtacaagaattcttataactcgagtcgtcgctcgagatcagactagttatacacgcaatgttgaagttattttcttttaaagaatggtacaaaatatctgcctgtagaagaggctaaactgccgaatgtggatcatctgcaagtgcttttggatgggcatgttttgaattttgatggtgccctgccaatgtatctccaattctttttggtggatgaagagaggcggtgaagctgctagtatgggggcggggcacctgcacaaagcctctgttgtaattcgtaccggggtactttttgtgtagctaggttatccttacatgtcacggtcccaattgattgattattgtttacgtccactgcaattttttttggc

SEQ ID NO: 90904 - DNA, 1701 bp, Zea Mays
atggagatgctaatgagggtgccagggcaagatgttgcttttgagccagcaaagcttctctggcttatccagagggatttcctccaaggaaaatctgttcaacaaatggtcaatgaagcccttcaacgggtgcctaatgataatggtgacaaatatattgatgaggtcaatcaaatacgagattcgttggcagttatggggaacaacagcactgcttttagcttgcctcagccgcatcttcaaagaacaaaattatgtgatatggaggacaaagaacttgaacccttatatgtaaaacggcgggagcaattaaagcagcttgtttcgtctattgtaaaaccaaaaattgtgcagggcagaactctaaatgggaaggactttgtgtctttcttgcagcagattcttgaggctttgaataaaggcgaaattccatcaacagggtctctagttgaaatttttaacaaagccattcttgatcgctgtctgaaggtgtacagggagaaaatggatggcttaggcctaccagtaccggtagacaaactgcagaaacttcatgagatggcaaatggtgatgctagaattctctttgataagcagcactttggcaaacatcatgctgctcagtcagcactcaagcttgaagatgatattaaaaaggtgtacagaaacttacttctagctaatgaatatcaatcgtcaaagctgtgtgaagctcgcttttctgagtgtgaagataagatggatcaccttcaagtcttgaaacttccttcgatggcaaaattcaatgcaggctttactcactgcaaccaaagtttcgtaaaggaatgtgttggaccttcaaaagaaagctatgaacgtagaatgtcaaagatgcttgccaagtctcgtgctcttttcatcaaggagtacaataacaagcttttcaattggttggtgaccttctctttggtcatggtggtcatcgggcgctttgtcatcaagttcttcctacttgaaatcgccgcctgggtgatgttcatcttcctagagacgtacacgagaatgttctggtcagcggaatcgctgtactataatccagcttggcacatcattgtttcttcctgggaaaccatcgtgtacagcccaattcttgatctggacagatgggccgtcccaattgtcataatgctattatttggggttctttactggagatgcttcggtggtagaaggaagcggggaaggggttcgctcctcccattgtacaagaattcttataactcgagtcgtcgctccagatcagactagttatacacgcaatgctcaagtttttttcttttaaagaatggtacaaaatatctgcctgtagaagaggctaaactgccgaatgtggatcatctgtaagtgcttttggatgggcatgttttgatggtgccctgccaatgtatctccaattctttttggtggatgaagagaggcggtgaagctgctagtatggggcggggcacctgcacaaagcctctgttgtaattcataccagggtactttttccgtagctagattatccttacatgtcacggtcccaattgattgattattgtttacgtccactgcaaatttttttggcaagaattttgttttttaacgtcatagatagaaggtagctgttagagcgtgtaccgtgtcaatcatatgctcaaagttataatctggtggtggaat

SEQ ID NO: 90905 - DNA, 152 bp, Zea Mays
tgtacgggggaatgagaatggaaatgggctttgcggggagggggaatgagaatgacagatatagaatggtggcagaacatgggaatggctgtgcgcggggaggagggaatcggaaaggcagaacacggaatgagcagaacgcggaatggccg

SEQ ID NO: 90906 - DNA, 603 bp, Zea Mays
atgagagtgggtatgaaccagctctatgttgtgcataatggcctcgctcctcagcaacgctgtctcctccaaaggaagatcaggcactacaagtccatgtatgccagcttgtttgatagtagacatgaagtttcccacaccacgtttcagaattggattatagtatgtgaaaagaacaatggggcaagaaagctcaggtgtaacccccttcagcatctctatgacagaatcaagtgtagtgcctttcttaagcgcccgtgttgcagaagcctgaataactggcccatcagccagtggatccgagtatggtacgccaacctctataacatccgaaccgcaggaattgagaatcttcaatgctttcgatgtggttaccaggtcaggatcaccagcagttatgaacgggatgaatgcactcttgccttgctccctgaggttggagaaggtctcggcgacggtgagcttgccggccgcagcgccgccgttggccatgggcgcggatgtgtccaccactccacccgacagagggccacctccgagcgctgcctttgtggggtcaggagtagccggcgaggaggaggtctcggcggcggcgggcggtga

SEQ ID NO: 90907 - DNA, 497 bp, Zea Mays
ttggggctaaaccgcacgacccactcggcccattccaagtcccaccttgcgtacgtgagccaaacgctcctggtcctggcagtctccatctccacctagggttccggcgatggtgcacggcggctacccgcgccgcgacgccgccgtccgccggcccaagtcctcgtcctccgccgtagttgccgaccgcaagcggaagtggaccgccgccgccaagaacacctcacttaaaaaccagatccgttccactgagcgctttctccacaaggtaccttcggactcagaattacgaacatgaagtgcggtcaggacgaagcctgaaccagacgaaggacgggctgattaccaagctccacgaaggatggtgcacagccgaagctgtgcgcagggaagcttcgtcgcgatagcagagaggggaaccgacttaaagatgaaaagactacgtgggccttgtcagatttccataagtcattgacaaatgtaatggacataaatgt

SEQ ID NO: 90908 - DNA, 1463 bp, Zea Mays
ttggggctaaaccgcacgacccactcggcccattccaagtcccaccttgcgtacgtgagccaaacgctcctggtcctggcagtctccatctccacctagggttccggcgatggtgcacggcggctacccgcgccgcgacgccgccgtccgccggcccaagtcctcgtcctccgccgtagttgccgaccgcaagcggaagtggaccgccgccgccaagaacacctcacttaaaaaccagatccgttccactgagcgctttctccacaaggtacttaccgacacctgggggctggggtcttctcgactgagctcggaacctctagtttagcgttgttcctacccagtggatgggctttggctgttgcttgtggagcgctgggtgtttctctaggaacctctccattttctagttgattgggaagcttccccgaacgtagctaggaattttagcacgaaagtctttctacaatgatgaattgttcaaccacaaatatttatttacttgttgcttctgtagggggctaggggcaaattgatgcttcaactgaggcctctgtttgttgcattccgctcagtagcctaattcatggtgtagctggattactgcagcttgcataggtgattaggtgctattaagtatcaagtattgattgaaaaactatcagactgaaatgttaactatgttgctcaaacggttagtcagaaatgctgtgaaagggcatttgttcttgtcagaggagaagtgacgaagcctaattgaccttgtgttggtgaagatattcactcaaacatcaaaatcataataacaagtttgattgaatatcgatttcatgcccatgaatagtacatgtcagggggtatttatagaggtccttgctttcgtaattgcttatacaaagtctaaaatacccctaacttgttagattacaattgttcgtccgcgcaaggacagtttggtcatttgtcctctctgttgggggccttcgtcctccgaaggtcctcaaaaacatgatttgacaatgttttccaagtggattatgtgaacaggtaccttcggactcagaattacgaacatgaagtgcggtcaggacgaagcctgaaccagacgaaggacgggctgattaccaagctccacgaaggatggtgcacagccgaagctgtgcgcagggaagcttcgtcgcgatagcagagaggggaaccgacttaaagatgaaaagactacgtgggccttgtcagatttccataagtcattgacaaatgtaatggacataaatgtaattttacgtgggctgcgtcccgcgtctataaatagatgaacagtactcccgtactgttcacgctgacttggcatttgcttttgcgtcacgcttgtactttttaccttctctcaggaccgaaggtacatctgtaatttgaaatcatttctatttttccatattaataaaatagaaatgattctatga

SEQ ID NO: 90909 - DNA, 1222 bp, Zea Mays
ttggggctaaaccgcacgacccactcggcccattccaagtcccaccttgcgtacgtgagccaaacgctcctggtcctggcagtctccatctccacctagggttccggcgatggtgcacggcggctacccgcgccgcgacgccgccgtccgccggcccaagtcctcgtcctccgccgtagttgccgaccgcaagcggaagtggaccgccgccgccaagaacacctcacttaaaaaccagatccgttccactgagcgctttctccacaagggggctaggggcaaattgatgcttcaactgaggcctctgtttgttgcattccgctcagtagcctaattcatggtgtagctggattactgcagcttgcataggtgattaggtgctattaagtatcaagtattgattgaaaaactatcagactgaaatgttaactatgttgctcaaacggttagtcagaaatgctgtgaaagggcatttgttcttgtcagaggagaagtgacgaagcctaattgaccttgtgttggtgaagatattcactcaaacatcaaaatcataataacaagtttgattgaatatcgatttcatgcccatgaatagtacatgtcagggggtatttatagaggtccttgctttcgtaattgcttatacaaagtctaaaatacccctaacttgttagattacaattgttcgtccgcgcaaggacagtttggtcatttgtcctctctgttgggggccttcgtcctccgaaggtcctcaaaaacatgatttgacaatgttttccaagtggattatgtgaacaggtaccttcggactcagaattacgaacatgaagtgcggtcaggacgaagcctgaaccagacgaaggacgggctgattaccaagctccacgaaggatggtgcacagccgaagctgtgcgcagggaagcttcgtcgcgatagcagagaggggaaccgacttaaagatgaaaagactacgtgggccttgtcagatttccataagtcattgacaaatgtaatggacataaatgtaattttacgtgggctgcgtcccgcgtctataaatagatgaacagtactcccgtactgttcacgctgacttggcatttgcttttgcgtcacgcttgtactttttaccttctctcaggaccgaaggtacatctgtaatttgaaatcatttctatttttccatattaataaaatagaaatgattctatgatgatgctt

SEQ ID NO: 90910 - DNA, 1741 bp, Zea Mays
cttagaaccaaaaccgtgttagctcgtaccaaagtaatacgtgccgaaccgtactctaggctactgatttcgggtcggcccgacccattctccacttcttcagcactagtcgcgggctcgcggtcgcggccgaggatatcgaagctgcgagcaacgcgatcgagcgcgacgcgggtgagacccgagagagccgtgagggagccagggagggaaccccgaacccccgtcgtcgtctcgtgctcggtctctccggctggcggcatggagagtgccgtgctcgcctgcgaggcgccaaccgccgccgccgctgcggcgcctggagcgggaggggacagaggagccgagggcgtggtgatgctgaggcggtcgggcctcgcggcgtgcctcacgtgtccgctctgcggccgtctcctccgcgacgccgccaccatcaccgagtgtctccacaccttttgcaggaagtgcatatcagaggagtttgtaaataaggaagtgtgctgctgccctgtttgtagcattgacttgggctgtgctccactggagaaactcagaattgatcatagcctacagtatgtaaggtcaaaggtatttccttctaaaaaacgaaaggttgaggatccagaagtcacatcgccaattacatcacctataaagacgaaagtacggtctttatcttctttgacaaaacatgctcctcaaatgtctatgcaaaaatgcttgagaaagaggagaacaaaagcttcatgcttacaaaacctccctttgcactcaaccttgcggggcagtagtaatatcacaaaaaaatctggggggtggagacctttagggtgtcactttcgagcagctaaaaagaaaaggtctcttagacctaaatcagacgatataaagacagctggaaaaaggactgatgatccagttgatgtaactcttgccagtcaagcaaagactaggaagcagattacaagacgtggaaatctggagaagagaactggaaccaagaaagtattgattttaaagggaaaacagaaaaatacgaagacaaagaatacgcctaataagaggagattgccagcattatggttctaccttcttgctgcttttgaccagaaaggacatcctcctctgccgcagataccatcaaaatttctgaggatcaaggatgtaaatttgcctgcttccttcatacagaaatacctcgcgcagaaacttaatctttcaagtgaaactgaggtggagatattctgcggtggcagaccagtgagcccagggatcaccctgcacgacctagcagaccactggattggcaaacgatcgaagggccgagtgcggtcatctgtgggcacgcccgccgctgaattcgtgctgaaggtattttacgccaggtcaggagcgccccttccaaaaactgaaagcaaccaagactgatggagagcttcgagcttcccttcgtttcagaaccagcagtgtatcgtttgactcgtaggaccaattgattaatggtatcttagtaacatgtacatagatgttagtgtcacggattagaagctcccatgggcttactgttatatatatccccctagttcagtgcatttttaccgcttatatttttactgacaaagtgtgtagtatctaggctgtgtaattaaaactggatgagatgtcgagatagagtcaaatttcaagttgcactggttcagctggtatgaatcctggctgaaccggttttaaacctgctcaactt

SEQ ID NO: 90911 - DNA, 1751 bp, Zea Mays
ttttgtatttggcaaagttcaacgaatttttggtgcttgcatacactatggagtgtatccgtgaagatgaattctgagtcataaacaccgccagtgccagccgttccaagctcgtcgctagtcgctacgatgaatcattggttcgccagccttcacgtcgcctatcgcgcgcggctgcctgaacagcagccaccggtgtctgtggactccggacacgcggaaacggccaccgtaccgacgggcgcgcccacggttgaagccgtcgtcttcctcccggctgccgcgccatggcctgtcggcactctttttccggtccggctcgtgtcgtcccggcggattggagtggaagtgtggaacggcgttccgcggggcgatcacgaaagtgggcagcgcggacatggcacgtgcctgaccgcccaaaactgcatgtctgcatggaaacggtcgacatcgagatcgaaatcccagggccaggggtgaggggaatatccagggaaaagcagacgggcgaacagatccaaaaaaaaaaaaacccgccgacaaaacgcgcaccacaccacggcaccaccccacaccgcgtcaactggggaatacagccccaccgggaataccgaatatcctaaggccaattcggacttgagacgaaaatcgagtgaccaacagcttgagtagacaaagtgggcaaacgtcggatagatctgttacaaaatattgtatttgtgatcaatccaaggggtgcgacagataattcccaagggacaccccttgagaacgcaccccttcacctgtatataaacagaattctccctgcaataaaagatacaactgtcatttgtctctctctgaactctttttgccactgagtacttcaacacgttatcagcactgctgcgggatcagagaaattggcgggatcagagaaattgaagaaagagaacatgtcgcttgaaagaaggaacagagacttcgatcatcaaaaatcgtacgtatgtatgatgcacctagtttcttttgacttctaaagaacggtgttgcttgagtacgaatggggatcgctggcggaggcgctgtgcagggaatgcacacccacgcacctgtgcctgcatgcacacggacgtcacgcccgcgccgtgtcaccggagacgcgtccatggcgcatgccgccttgccgttactgcgcaccggggctccgtcatcacgtgctgaggccacggtcgtgcgcgcagatcagggacaggtcgccatgcctatgcccgcgcgcagtcgaggtcgtgtgccaacgccgccagacggtctcagcagcgcgcgccgggggtccttcgcccgtacgcgccgaccgccgggaccgcgctggccaggggcttccgcgcagccgggaccacacccccgcgcgcgccgctaggggcctgctcgcccgagacggcgggggcacaaccgcccgtgccgctgggccgtgcacctgggccgctgcccgctccgagccgcggggggcctcgcgcacacgctgggcagccgagccgccggggcgccgcgcgcccgcgcctggaccgggctgccgcgccgccgcagggccgcgcgcccgcgccgtgccgaggccgccagcgcctgtccgggaccgcgtgggccgccgggacagcaccccgagccgccggggccgcacgccatgggccgccgggagccaagcagggtcgcgcccaccgcactcgtaggcacgggcagcagggagccgcgcccgcatgtcgggcgggcgc

SEQ ID NO: 90912 - DNA, 115 bp, Zea Mays
taccgattacgtaaattttacccggaaaaactacgctcagtaccaaaaccaagtaaaaatcaccctaaattactcagcacgaaaatcgctatacataggatgcagaccagaagag

SEQ ID NO: 90913 - DNA, 327 bp, Zea Mays
atgaggagaaggcggtggatcttggcggcgagcgcgcctgcgcctgtgccggtggcgcggagcgccgcaatatcggcggcgggggtgagcgcgaccgagcaccctgagctgcgccgcggcgacggcggggtccaccctgtcgcccccggcacgcgggttggtggccagcgcggagaggtacccgaggagggcctcggcctggagcgcacgcctggcgaaggccgcgtccactgccgccccgggcgcgccgtcacggacgtcggcgttgtcgatcgcctgcgtgctggtggtggcctcgttgtccccgccgcctccgcggcagcatga

SEQ ID NO: 90914 - DNA, 1901 bp, Zea Mays
atggcgtcttcctcctccagcccctcgtcaacttcgccctccaccgcttcacgttctgaataccaagataccgatcatttggccgctcagtccctctacgagacgacgtatcctccgctccccacccgtgaagccgctccaacaacgagcgccgccctcggcgtcgcaccaggcgccatcaacgcctcggccaccgcgcccggcgtctcccgctccaacacacgatctcaaatataccacaccctctggggcggcaccaaacgcgtccccctgcccaccaacatctccctcgccctcgcgcaccagaggagatgtcgaggtcggactcggactcggaactccgcggatgtctcccagccccgccggaataaccccgtgggcttatcccagcacgtctcctacgcgtcgcgcctggacctggattcggggtggggtaccgcaccggccccgacgtccgcgctcgccccgatgaggtcgtccaccgcgaacccgtcgccgcctacgtcggcatggaccaggcccttcctctcgtcgagcaccgtggcctcaacccggacggacaacaggatagccgtcgccgccacgccgccacccgacaccacgctggtgcccgacgcgccaggctacgcgcccgccgtggcgacgagcgttgacaccgagccggagccgaacgcgtccatctccaccacctatttcgcgcccgccgtggcgacgagcgctgacaccgcgccggagccgaacgcgtccatctccaccacctctttcgcgcccgccatggcgacgagtgctgacaccgcgccggagccgaacgcgtccatctccaccacctctttcgcgtccgccgtggcgacgagcgctgacaccgcgccggagccggacgcgtccatctccaccacctatttcgcgcccgccgtggcgacgagcgctgacaccgagccggagccggacgcgtccatctccaccacctctttcgcgcccgccgtggcgacgagcgctgacaccgcgccggagccgaatgcgtccatctccaccacctctttcgcgcccgccgtggcgacgagcgctgataccgtgccggagccggacgcgtccatctccaccacctctttcgcggccggcgtgacgacgagcgctgacaccgcgccggagccggacgcgttcatctccaccgcctctttcgcgcccggcgtgacgacgagcgccgaccgcgcgctagagctagacgcgctcacctccgcctcctcttctgcacccggcgcagacccagacatctccagcattatagacgacttggagaccttgttcgttgcaggatcgggcatgcaagcgatcggcgacagaggcgtgcaccccgtcgacgacttctatccggacctattccaggcgtggcgagaggatgtcgcgtcgcgggcgtggcgagaggatgtcgccccgcgggctgggcgagagcatttcgcgtcgcgggcgtggccacaggatgtcgcgccgcggacgttcggctactacgacatacctgccgccgacatcccgctctgttcggagtgccgcatccgatccgcacagatcgaggctagacattacgaccatttggacatctgcgcccggtgctacgccaaaaagttcgtctgcccgatatgtggctatgatttgggagtgccgccttcgaccggcacacatcgaggctagaccttacagccgtttggttcgtctgcccgctgcttattacctggctactgtagcgttcagatacgcatccattcttgctggtagcatatttgcgaattgcaaacgatgctctgttctgtgaattgaattcttgctggtagcatattgcgaattcttattacgaattgcaaacgtagttgcactgtgaatttctatcgattcttgctggtagcata

SEQ ID NO: 90915 - DNA, 1716 bp, Zea Mays
tccctgtataagatcacagaaagatctggcaaagactctttccaacgccaccacgccattgctgcaattctcgcaacctttctacctctccactcaatcatagcatagcacctggaacaatttcatgtgcaaatctagattgattagtggttgcaatctcgttgggtgattcgatcgaggctaccagtgtgctactactagcacttggatttgccggtgcaagtttttctctctctttttgaaagccatggaggcggtggaggaagccaaccgggccgccgtggagagctgcaagaagctcgtcgccgtgctctcgctatccggcggcgacgcgttccggcctatgcctgtggccgcggagaccgacgaggcggtcgcccggttcggcaaggtggtagccgtcctgagcggcaggctcggccacgccagagcaagggttggcaagaggagcccggcgcctcccgtcgtcgatgcaagctgcctcttggatcacccgtccttggcagtggcaccgcgccacactcccaacggcggccacctgctgctcagtgcaactactcctcctctgccacctctgccaccgcatctgctgcctccagctagtatggcgatgcgaagcgctgcggtaccgatgacgatgagaagccaagaagcggcaccggcgccggcggtgctgctggtgccgccttgtgccagcaacgttacactgacgccggccaagaagttcgaccggagcatgttcctagagacgccgctgctggagctgaactcctgcggcgtgcctccctcgccgtcggcgtcgccagccatggccgcggttcagaggaacagcacgaaggtcgcggcggctgtccccgcgcccaatccttgcaccagcgccccgcgcatccagttccatccgccgcaccagcagcagcagcaggcggcgaagaagcagaagagcttccagttcgaccagacgccgagcggcgagcagttccacatcgaggtgccggtgccgctgccccgtgccgcccccgccgccaaggaggtgatcagcttcagcttcgacaacaactcggtgtgcacgtcgtcggcggcgacatccttctttacgtccatcggcagccagctgatcagcatgtccgacgccgcgacgagctccgccgccacggcgaagaaggcgtgtggcaagagagcggaggacagcagcggcgtgaggtgccactgcccgaagaaaaagaagccgagggagaagagggtggtgagggtgccggcgatcagcgacaagaacgccgacataccagcggacaactactcttggaggaagtatgggcagaaacccatcaaaggctctcctcacccaaggggatactacaggtgcagcagcaagaaggactgcccggcgaggaagcacgtggagcggtgccgcagcgacgccgccatgctgatcgtcacctacgagaacgaccacaaccacgcgcagccgctggacccctccgtgctcaccgccgcgaacgcggaggcttgagagcccgtccgacggatcggattcggagcctctgccagcgtcgtgcttgagcgacgccgccattcttttcattgaaaacaagatgtacagtagtgacaacttgagtgcgtttcactgcttctgtttctccgtgtctgtttagatgaaatccattcagatgaggcctcttgtttaatctgtgcatgccaaagaggcaaagaccaacc

SEQ ID NO: 90916 - DNA, 1622 bp, Zea Mays
tcgatcgcaaatcgggaggagaagcacactctgagccccagcatcgcgaccccggcggccggctgcgcctgcggggcaggaatccgcggcaccgcgtgggcgcgatctggcggccgttggatgtggatggaacggacgggccaggttcaacgtgggggcgttgatgggagcgatccgaggcgaggccgtgtggaccaatcagcgcgctgcgtgggactctgctcgtcttcgtgccgtcgccactatttaagcaccgcttcgtctactccggcctactcacccagcaccgcagagctctcatcctctctctctctctctttctcgcgctcgctttgcttcctcgtcgaggtccaagttcctgcattgatggcgaccgaggtggctgagactcccgcgccgttggcggaggcggtccccgagacccccgcggaggcaccggcggcgcccgccgccgaggcgaagcctaccaaggccaagaaggcctctgcgcccaagaagcgtgccaacccgacccacccgccgtacgccgagatgatctcggaggctgtcacgtcgctcaaggagcggacggggtccagccagtacgcgatcgccaagttcgtcgaggacaagcacaaggacaagctcccgcccaacttccgcaagctcctgctcggccagctcaagaagctcgtcgccggcggcaagctcaccaaggtgaagaactcctacaagctgcccgcacgcgccccggccgccgccaagccgaagcccaagtccaagaccgctgtgaagaagcccaaggccggtgccaagaagcccaaggccgccaccaagcccaagccgaagcccaaggccaagtcccccgccaaggcgaagcccgccgcaaagcccaaggcagccgcgaagcccgccgctaagccgaaacccgcagcggccaagcccaaggcggccgccaagccgaaggccaagccagctgccaaggctaagccgaaggctgccgcggccaagccgaagccagctgccaagaaggccggccgccccgccaaggccgccaagacgtcagccaaggacacgcccgggaagaaagcggcgcccgccaagaagcccgccgctgcggccaagaaggcccctgccaagaaggccgccccagccaagaaggctgcgaccccgtcgcggaaggtgccgtcccgtaaggcgaagaagtagagcggtggtcttggcaggaatctagggtttcgtgctccttcgattttagatgtttactcgtttttgctctagttgtgggtggtgcgcggggtgggttactaggttgtaaatttgatgtcggaggctggggtacacatgggcattctgtaccagcggtggaaggcgccggcgacgatgacgaaccagtgtgtgttattattattagaagacaacgttgtatttctgtagctgaattgttgagttgcggatatcattgtgctgctaaggttaatgtgacgataaagttaatgtcaagagttaccttccttcgcgtgtatgtactctgattattcaggctgtttttggctgggattaatctggtcttatctgaattccctatctgaaatagagaattgttcggtgtgcattttgtgaccaacctgctcatgcaaaca

SEQ ID NO: 90917 - DNA, 1451 bp, Zea Mays
tcgatcgcaaatcgggaggagaagcacactctgagccccagcatcgcgaccccggcggccggctgcgcctgcggggcaggaatccgcggcaccgcgtgggcgcgatctggcggccgttggatgtggatggaacggacgggccaggttcaacgtgggggcgttgatgggagcgatccgaggcgaggccgtgtggaccaatcagcgcgctgcgtgggactctgctcgtcttcgtgccgtcgccactatttaagcaccgcttcgtctactccggcctactcacccagcaccgcagagctctcatcctctctctctctctctttctcgcgctcgctttgcttcctcgtcgaggtccaagttcctgcattgatggcgaccgaggtggctgagactcccgcgccgttggcggaggcggtccccgagacccccgcggaggcaccggcggcgcccgccgccgaggcgaagcctaccaaggccaagaaggcctctgcgcccaagaagcgtgccaacccgacccacccgccgtacgccgagatgatctcggaggctgtcacgtcgctcaaggagcggacggggtccagccagtacgcgatcgccaagttcgtcgaggacaagcacaaggacaagctcccgcccaacttccgcaagctcctgctcggccagctcaagaagctcgtcgccggcggcaagctcaccaaggtgaagaactcctacaagctgcccgcacgcgccccggccgccgccaagccgaagcccaagtccaagaccgctgtgaagaagcccaaggccggtgccaagaagcccaaggccgccaccaagcccaagccgaagcccaaggccaagtcccccgccaaggcgaagcccgccgcaaagcccaaggcagccgcgaagcccgccgctaagccgaaacccgcagcggccaagcccaaggcggccgccaagccgaaggccaagccagctgccaaggctaagccgaaggctgccgcggccaagccgaagccagctgccaagaaggccggccgccccgccaaggccgccaagacgtcagccaaggacacgcccgggaagaaagcggcgcccgccaagaagcccgccgctgcggccaagaaggcccctgccaagaaggccgccccagccaagaaggctgcgaccccgtcgcggaaggcgccggcgacgatgacgaaccagtgtgtgttattattattagaagacaacgttgtatttctgtagctgaattgttgagttgcggatatcattgtgctgctaaggttaatgtgacgataaagttaatgtcaagagttaccttccttcgcgtgtatgtactctgattattcaggctgtttttggctgggattaatctggtcttatctgaattccctatctgaaatagagaattgttcggtgtgcattttgtgaccaacctgctcatgcaaacatgttgctttcgttgtacg

SEQ ID NO: 90918 - DNA, 1648 bp, Zea Mays
aaaatagcaaatttctccacacggacacagcagcgagagaagagagtccactgtccaccccaccagaaaaacgcattccgcagacgcgcggcgagggagtaggaggggacggcgggtgccgaggcccgcaggcacggggaagctacctgcttgcgtagccgggcgggctcgcgctgtgctgtcgctccatgtcggtcgccggcgagagcggcggggatccggcggcggcacgccgccggtgggatctctccaacaagggccccgacagcactccaatgttgaaagaggctgtggaaatgtctacagatgaagaatcggatggcgttgttatatgccatccgaatggtaacactgatggatgtgacgaagccattagtggcagtcatgatgatgatagcccagaaggccaggaaactagttccatcaaggaccctgatgtagaaggtgacacacaggaagacaagtgtgtaaatcaagattcactgaagttgattgatcaagagacgtctgctccccccaagtccccagcgaagtccgcgactgcgagttctggaccagagaagcctaaacgtgttgtcacccaaccattgtctctttctactcaacgaaggtcatctggagtaaatggtggtgtgaccaatccatcacccaataaggataaatctggtgataaaagtagcatctctccagcaagcatgacaaagaagtgtacgccgttggcacctaggaagactttgcagcctgagcaagcatttcaccctctggaagaggactcttgttctgtgacttcctcgactacaacatcatcaagagctggcagaactaagacaactgttcctgttgccccatcatttgtgtgtgctaaccgtgctgacaagaggaaggagttctacacaaaattagaggagaaacataaagctttggaagcagagaaggacgaggctgaggccaggaaaaaggaagagcaagacgttgctataaagcaactaaggaagtcattggtgattagagcgaaacccatgccaagcttctatcaagaaggccccccaccaaaggctgaacttaagaaggtgcctcctactcgtgccaaatcaccaaagtttacaagctcaaggagaaagagctgcaatgacacaccacagacacccgagggaaaaaacaccaacgcaacatctaccacccggccacatcgtcacagcatcggggcttctaaagatgccagcagagtacagtgctcgccgaagagcggcgtggcgaccaaaactagatctgtcaagcctgagctgaaggccctctgaagcgcatgcgtagcattcaagtgctgcgattgtctctgtacaaacagaatcgcctgactcttagccgtttccatttgcatgcattttttttgttttgttttgttctatacccagcatctccaccaaaaagaaggctgtagggccaatgacgttgttcgcgctgctggaccttgtctccattttcgtcttgtactcgttaagaactctgttgctgctgggaccatgtgacattcattccatgtaaattacctggggatcccggtagggagctcgactggtgttttggtcttgtgaagtcctcaatgccttaactaatctgtgagctgaaaaactatcgatttggcattgtt

SEQ ID NO: 90919 - DNA, 2060 bp, Zea Mays
aaaatagcaaatttctccacacggacacagcagcgagagaagagagtccactgtccaccccaccagaaaaacgcattccgcagacgcgcggcgagggagtaggaggggacggcgggtgccgaggcccgcaggcacggggaagctacctgcttgcgtagccgggcgggctcgcgctgtgctgtcgctccatgtcggtcgccggcgagagcggcggggatccggcggcggcacgccgccggtgggatctctccaacaagggccccgacagcacatgaagaatcggatggcgttgttatatgccatccgaatggtaacactgatggatgtgacgaagccattagtggcagtcatgatgatgatagcccagaaggccaggaaactagttccatcaaggaccctgatgtagaaggtgacacacaggaagacaagtgtgtaaatcaagattcactgaagttgattgatcaagagacgtctgctccccccaagtccccagcgaagtccgcgactgcgagttctggaccagagaagcctaaacgtgttgtcacccaaccattgtctctttctactcaacgaaggtcatctggagtaaatggtggtgtgaccaatccatcacccaataaggataaatctggtgataaaagtagcatctctccagcaagcatgacaaagaagtgtacgccgttggcacctaggaagactttgcagcctgagcaagcatttcaccctctggaagaggactcttgttctgtgacttcctcgtatcctttttctgtgtgctaagattttgttgagcatctcatccctttttatgctatttcatagctatgcagctaatatttttaactttcggtatataaccttcggatgtttcatacctatacttacataaggatggaatagtaaatattcatgtttgtagatgaccataaaatcacatggtgtttttctcttaattaagcaccagattcttcgatgtttcacagtaaataatgatgaacgctcatactcatgcacttctcttctgtgaacatgaaaaagttttcaaaacgatgcttttctgtatctactgaacttacaatgttttgtggtgctcaatattttttcaagatgatgaccatttcatagttaaatgtttaaattcagaaacacatgaattttacaagtgttctgagttgcatgtggcccttttcctaagctgtgtaaaggactacaacatcatcaagagctggcagaactaagacaactgttcctgttgccccatcatttgtgtgtgctaaccgtgctgacaagaggaaggagttctacacaaaattagaggagaaacataaagctttggaagcagagaaggacgaggctgaggccaggaaaaaggaagagcaagacgttgctataaagcaactaaggaagtcattggtgattagagcgaaacccatgccaagcttctatcaagaaggccccccaccaaaggctgaacttaagaaggtgcctcctactcgtgccaaatcaccaaagtttacaagctcaaggagaaagagctgcaatgacacaccacagacacccgagggaaaaaacaccaacgcaacatctaccacccggccacatcgtcacagcatcggggcttctaaagatgccagcagagtacagtgctcgccgaagagcggcgtggcgaccaaaactagatctgtcaagcctgagctgaaggccctctgaagcgcatgcgtagcattcaagtgctgcgattgtctctgtacaaacagaatcgcctgactcttagccgtttccatttgcatgcattttttttgttttgttttgttctatacccagcatctccaccaaaaagaaggctgtagggccaatgacgttgttcgcgctgctggaccttgtctccattttcgtcttgtactcgttaagaactctgttgctgctgggaccatgtgacattcattccatgtaaattacctggggatcccggtagggagctcgactggtgttttggtcttgtgaagtcctcaatgccttaactaatctgtgagctgaaaaactatcgatttggcattgtt

SEQ ID NO: 90920 - DNA, 210 bp, Zea Mays
gccgccgccaccattgcccagccccgtcccgaggacctccagccccgtcccgacgcccagcccgcacccgaccggcgactccaccgccgcccaagcgacaccaccgcgtcgaccggcaactccaccgccgcccaagcgacaccggagccgccccgacgctgcccgcggccgccggagcctctgcccccgtccccgacgccaccggtgccc

SEQ ID NO: 90921 - DNA, 1077 bp, Zea Mays
atggtaaatgaagctgaaggagagtgcaagatcgatcgactgaaacaacaaatcgatctccctggaccgcaggtcgatcagatcaagcccaagcgtccgaagcgccacacgctgaatccgcgctacatgctacacctcaatccatcggaatcgaggagctctcaagttttggccgcttctacctccaatctgcaccttcaagctgaggtcgaaggctacacgatagatcggttactcgtcaaccacacgcgcctttcacgtcccaaggaacatgctggctctggcatctccagaaatagatcgctcgctggttttgaggacgagaagacctataagtatgatttccggttaatggagaaggggggcgaaattagtaacgaaaggctaaacaatgtgttctatgaaatgccacttgagaatgtgatttgggacgaagaacttcaacagttagatagagaaatggatgacctgctggagtgcaaacaagcgatgttcaaggcatcaactatgcccaaccgtgatgtcgaggaaattagctcaaagtggagattatcagattactatgatgagctcaaccaggacagcgacactccttttttcttgagtctcggtatgaattatttggtggagatgtcggttagctcgtccagccttggcatgaatgaggacttgccatttgtacctgacacacatagctcattattgcagcaagcggcatgggacagggagcacttcgattatgaaatgcgaaagtctattgctgagattgtcctagaagatgagctctttgatgttggtagttccgttcacagtgttgattcatgcatgcagttcagggatcaaatttgcatgtctaagttactcatcgattcttatcgaatggagttgaagtacaagatagcatacatttctatgtgtcaatgggatcctggaattttgtcactaggtgattggcctataggagggaattttagtccaaggaaatctgatttgatcgggtactgttatgagaaaatgccaccttggaatttaactgtaaacaacgacgatggttattggttatggagatgccagtga

SEQ ID NO: 90922 - DNA, 291 bp, Zea Mays
gtcgtcgacgcgacccgtcggccttcgatcatgaggccatcgtcgtcgacggttgcagcagcggttcttgtcctcgccgccgtcctcgcctccggcggtaccgtcggcgcggcggcgcggccggtggtggggcacggcggcggcgatcgcgccgccgtcttcgtcgcggtggaggtggcgacgggcacggattcctcggcgcagccgtccaactgcacctacgggaacaacgtcggcggcgtgtgccctccctttccccccacccccagcgctcccaatgctgggcactag

SEQ ID NO: 90923 - DNA, 1054 bp, Zea Mays
atcaatgccgaccgtttgggtcgctagacggtcgccacgcccgcggtccagcgttggcatccgtcctgcaagcctgcaacccaaccttgaaccttgcctgttcttcttcgatttattagcccagcgttctccctctctcgtgggcgtggcgacgacttggaggccatcgctgccgccctacgccaggtgcccagatcatctgcggccccttcgccggcgacgatcaccatccatcagaaataggatcaagcgcttgaacttacagcgagatggaaaatgatagaaggcaacttggtcagatcgatccaagaagagcccgctttccttgctgcatagtatggactccaataccattcatcacttggttggtgccctttatcggtcacattggcatctgcagagaagacggtgtaattctggacttctctggtccacattttgtatcagttgacaattttgcattcggagctgttgcgcgctacattcaagtaaactgcgatgagtgctataagcttattgaacctgaaggagatgccacgtgggacggcgcgctgaagaaaggcacgcaggagttccaaaacaggaactacaacctgttcacctgcaactgccactcctttgtcgcaaacaatctgaacaggctgttttattccggccacgacgaatggaatgtggtcagcttggctgctgtgatgttcttacgaggccgctgggtgagcacggcatcggtggtgaagaccttattgccatttgcagttgtgctttccatcggtaccttccttggcggcacgaccttcctgaccggccttcttgctttcgccgctgcgatgactgtctggttccttgtgggcacctactgcatcaaaggtctcatagagttgtgattagagtatgttagactcgttgtagggggttcaagggtggcatatttttaagagttcaagcgtggcacatttttatttgtattgcattcctgtataatggattcttgatgttattcatgcacctatatgttccaaattccgaatgaattgatgcacttgtctgttgattc

SEQ ID NO: 90924 - DNA, 1911 bp, Zea Mays
atgaggattgaccccacccgcagcagcaataacacaactaaaacgttatctggtggacctgcaggctccgttttgaaagttgaaactcgtggggtgcgccgctccgcagttcgcaagtccaacggcaacgcccattggctctgcagttcaaacaagcttgcaccgccgagactcgaggtcggcacggccggttgcgcttgcgccgggaaggcagctacgtgccaggctgacgcgtgcgcggccggctgattcgcacaatgcacgagccgtcagcttgcgccagcgcatgcagatgcaggcgcgccgcgcgcggccggcccgagcatatccactggatgcgggcgtcgattccgtggcgcactccgccagccttgccccctcctccgtccaacgcctcgcgccgcggcggccggccgcctccctcgtctcgcctgcagtctactccctaaaaagaagcaaatgctaagccaccaagcagagcagagcagagctgcggaaccgcaccaaggtccatcgcccgccagtccaccaccgctgctgtcctatggcggggaccggcggcgagggtgcggtcgggaaggtgacttgcgcggcatggatacggcggcgggacgactacggcgggccgcccggcgtctcccgtcttctcgtggcgttcggccgccggtccacggcctcgtccccgccgctcgtcgacctcctcgagttcgacgccaaggcatccgcactcgcctccgagtccgagcccctggcgagggtcaccgtgggtgaggatgcagcggacacgccgcgcgcgatcgccgtgcatcccggcggccgggagctcgtctgcgcaaccgccaaagggtgcaggctctttaatctagtttataaagacttcggtgttcaccttatttcaagagatgcttcacctctccaatctgttgggcctcaaaaatgtttagcattcagcactgatggtgctaagtttgctgttggtggtgaggatggacatctcagaatatttcattggccaagtcttattacgattttagacgaacctaaagctcacaaatccttccgtgacatggacatcagcttagactcaaagtttttagtttcatcatccactgatggctctgcaagaatatggaacattgatgaggggtctccactaaccaatttgacaagagcttcggatgagaagattgagtattgccgcttttctagggatggagccaaacctttcctgttttgcacacttgtaaaaggtcatgatgttttgactatggcggtggacataagtaattggaagagaatcggttacaaaagattttcagcaaagcccatttccacactcgcaattagcttggatgggaagtatcttgcactaggaaaccgtgatggcgacttttgcgccgtagaagtaaagaagatggaggttgctcactggagcaagaaggttcatcttggcttcccagtttcctccattgagttctgccctagtgaaagggttgtaatctccacctcacatcaatggggagcagagataacaaagctcgacgtccctcctgaatggaaagtgtggcagatctggctggcgctgctgagcctcttcgtgtcgtcggccgtcctcttctacgccttcttcacgcacgcgaggctcaacctgaggccgtagaagaagacagccagtcacctctcaaaatctctgatggcgagtcctcaaggcatgagggctgttgccgactgcgaccacacctcgctgtttgctgcggcgtgctttgtacctgaacccgttcctggttttcacaccttgtgttacagatagacaacagatgagattgctcttgacctctctcaataataattgacggaagaagcacggtgcattctgccctgcttcgctgggcagcgtactattcaacccga

SEQ ID NO: 90925 - DNA, 2627 bp, Zea Mays
cataatgttcctatggtcaaggttcaaccctggagcttgaggagtgactgagtgaggtgcgagataatttggcgctcacacacaaactactaaccaacctctgggctctggctctcttccttctgcctctcctccacagaagagtcagtcatcgcaactcacacgagcaacttgaccagcgagtcacagtcagagtcagcgcaggccgctccccttcggcttatcatatattccacaggcgcgcgagctatgtcactcaccgggccagagccagagaagcggcaaagcagagagtcggcgaggacgagactacgagtggaggaggagcgcgtgtgctttggtttggagcgagcgatggtgttcgcgtccgggtccgccgccggcgggccgcaggtgctgacggcgcggttcgtgcggcaggtggtgcagggccggtggttcatggtgttcgcgtgcctgctcatcttgtcggcgtcgggcgccacctacatcttcagcatctactccgaagtgctcaagtcgacgctggggtacgaccagcgcacgctcaacacgctctgcttctacaaggacctgggcgccaacgtggacgtgggcgtcatttcgggcctcatcaacgaggtcacgccgccgtgggtggtgctcgccatgggcgccgccatgaacctggcgggctacctcatgatctacctcgccatcgacgggcgcaccggcaggccccccgtctggctcatgtgcatctacatctgcgtgggcgccaactcccagtccttcgccaacaccggcgcgctcgtgacctgcgtcaagaacttcccggagagccgcggcgtcgtgctcggcctcctcaagggcttcgtcggcctcagcggcgccatcttcacgcagctctacctcgccatctacggcgacgacgccaagtcgctcgtgctgctcatcgcctggctccccgccgccgtcaccatcctcttcgtccacaccgtccgcatcatgccgtacccgcgcgccagccgacgccggggcccgtcagcggcagccaccagcaacgacgccttcttctgcttcctctacatctccatcgcgctcgcgacctacctcctcgtcatgatcgtggtgcagaagcaggtcaacttctcgcacgccgccttcgcggtctcggccgcggcgctgctcctcatcctcttcctgccgctcgccgtcgtcgtcaagcaggagtacaagatccagaaggagctggaggagtccctccgcgaggaccccacggtgaccgtggagaaaccggccaccgcagcttcgctgcagctggtggcagcagcagcagcagcacctgaaccagcggtggctcagagcatgactacgggaacagaggccaagcggtccagctgcctggggtcttgccttcggcacatgttcagcccgccggcgcagggggaggactacaccatcctgcaggcgctggtgagcgtggacatgctggtgctgttcctggccaccatctgcggcgtgggcggcacgctgacggcgatcgacaacatggggcagatcgggcagtccctgggatacccggccaagagcatcaacacgttcgtctccctcatcagcatctggaactacgccgggcgcgtcaccgccgggttcgcgtcggaggtgttcctggcgcggtacaagttcccgcggccgctcatgctcacgctggtgctcctgctctcgtgcgtcggccacctcctcatcgccttcggcgtgccgcagtcgctgtacgtggcctccgtggtgatcggcttctgcttcggcgcgcagtggccactgctgttcgccatcatctccgaggtgtttgggctcaagtactactccacgctctacaacttcgggtccgtggccagccccatcggcgcctacgtgctcaacgtccgcgtcgcgggggcgctctacgacgtggaggccgccaagcagcacggcggctccctggcgggcggcgcagacaagacctgcatcggcgtgcagtgcttccgcaaggcgttcctcattatcacggccgccacggtcgccggcgcgctcgtgtcgctggtgctggtgtggcggaccaggaacttctacaggggcgacatctacgccaagttcagggacagcgccgacgcggacgccgccgaggaaagggcggaggcggagatcgggtcaacggaggttaacgggaggaagcagtagggtagtatagtacagatatagagcacggctcgcactaatgtccatggcggccgccggccggggcccggcggttgcgttgactcggtctaggtcgaagcagccacacacccacaccgtcagtccgtcacacagtgctagctaacgcttcttctgactttggcatacgtgtcatcatctgtcatctcccaatcctagctgttcttgttctggagcccaaattggatggcaactggctgtggaaggcctcagcaggagcagtctaatgggtctctgaaagtagctgtcactgctaactgaaggcgattaggtgcacgtttactgtgtagtcctttatcataaaaaaactgttttttacttctgcttgtaccttttgtgttttatactctatatttaaatataaatgaaaatcattacaatgtacaggtact

SEQ ID NO: 90926 - DNA, 1948 bp, Zea Mays
aattcggtttcaggctactccaacgattcaaacccctttggtgatcccaacctgacagagaagtttgtgtggcgaaagaagatagagcatgatgtatctcagggacagaaggtggacttttctgtcaaatccgagaagaagaaacagctagaaagaatggctgaaatagagaaggttaagaaaagaagggaagaaagagctattgaaaaggcacagcacgaagaggaaatggcgttaatagctagagaaagagcacgtgcagagtttcaagactgggagaagaaggaggaagagtttcattttgaccaaagcaaggtcaggtctgagatcaggttgcgggaggggcgtacaaagcctattgatgttctccttaagaatcttagtttctcagatgaatttgacattgagttaaatgagccttatctggtgttcaagggattaacagtgaaagaaatggaagagctatgtgatgacattaagatgcatcttgatctggacagggaaagccaaacaaatgttaagtactgggaggcactcatggtggtatgtgaatgggagctaggtgaggctcggaaaagagatgccctagatcgggctagggtccgtggtgaggaaccaccacctgaggttcttgcagaagagagaggtttgcatgcaagtattgagggggatgtaaaaagtctcctggatggtaaaacttccacagagcttgaagatatgcaaagtcaaattgagtcccaaatgcgctctggaactgcgaaagttgttgaatactgggaggctattctgaaacggcttcatatttacaaagcaaaggcttgcctgagggagatacatgcttctatcctaaggaagcatttacatcgattggagcatcctggtgctgctgaacaggatgtggattctgagaaagaagttgataataaactggaggatgaaatgcatgaggacgaagatgataaacgatattcacctgagcctatgcctcagcagacagataacgaatttgaagaggcagatggatccttttctccacagctaatgcatggcaatgaagatgaagatgcaattgatcctgaagaggacaaagctgagctggaccgaaaacgtgaagctgtagttttggagcatcaaagaaaagttcaggaagccatgaaaacaaaggcaagagtacctgatgagatggagatgaaggccataaaaacaatgggagctatggaggaaggagatgcagtatttggtgccggtgctgaagtgaaccttgattcacaggtgtactggtggcacgacaagtatcgaccaagaaagcccaagtacttcaatcgggtgcacactggatatgaatggaataaatacaaccagactcattatgaccatgataacccaccaccgaaaattgtccaaggctacaagttcaatatattttaccctgatcttgtggacaaatcgaaagcaccaacatacagtatagagaaagatggaagcgccggagagacttgcttcataagatttcacgctggacctccatacgaggatattgctttccgtattgtgaacaaggagtgggaatactcacacaagaaggggttcaagtgtacttttgagcgtgggattctccatctctatttcaacttcaagcgttaccgttacaggcgctgaaatggctcaagaggcaggggaaaactggatcgattggactggtgcgtcatgattctgctgtatgctgtggcatggataccagtcgagtatgtatcttcagtataattaggtactatgctaaatgggaacacactttttggttttactgactgattccccccttttttgaggttgtacaataatacagcatagcaagctgatagttttctaacaaactagcatgtagtctgtgctaacgctaagatctcggtaatgagaggggttgatggcggtggcaacacgagtaaga

SEQ ID NO: 90927 - DNA, 2906 bp, Zea Mays
gatcagatccacctcagccgtctcggatggcgtcagcatcgacggcggtgcggatgctccccgacggcggcgctgacgacgaggagcggtggctcgccgagggcatcgccggcgtccagcaaaacgccttctacatgcaccgcgccctcgattccaacaacctcaaggacgcactcaagtactcggcgcagatgctctccgaactgcgcacctcgcgactatcgccgcacaagtactacgagctgtacatgagggcgtttgatgagatgaagaagctggagatgttcttcagggaggagactcgccggggcagctgctctgtggttgatatgtacgagcttgtgcagcatgctgggaatgtcttaccgagactctatctcctgtgcacggtgggatctgtgtacatcaaatcgaaagaggctcctgctaaagatgttcttaaagatctcgttgaaatgtgccgaggcattcagcatccccttcgtggcctttttctgagaagttatctttctcaaataagcagagacaagttgcctgatattggttccgagtatgaaggggatgctgaaactattaacgacgcagttgaatttgttcttcagaatttcatagaaatgaacaaactctgggttcggatgcaacatctggggcctgcccgagaaaaggaaaagcgtgggaaggaaagaaatgaactgcgtgatctggtaggcaaaaaccttcatgttctaagccagattgagggtgttgaccttgatatgtacaaagaaactgttcttccaaggatattagagcaggtggttaattgtaaggatgaccttgcacagttctacctgatggactgcataatccaagtctttccagatgaataccatttacaaacattggaaacattattgaatgcatttccccagcttcagccaagtgttgatatcaaaacagtactctctcaacttatggacagattgtctaactatgctgcctcaagtcctgaagtgttaccagagttcttgcaagttgaagcttttgctaagttcagtaatgctattggaaaggtgatagaagcccaacctgacatgccagttgttggagccgtaactctatatgtatcgcttctgacttttactctccgtgtacatcctgaccggcttgattatgttgaccaagtgctcggtgcatgtgtcaagaaactttcaggcaaagcaaaacttgaagatagcagggcaacgaagcaaattgttgcacttcttagtgctcccctagaaaaatatagcaatattgttactgcattagaactttcaaactatcctcgggtcatggattatcttgataatgctacaaccaaagtgatggctgtggtaataattcaaagcataatgaaaaacacaacctgcatatctacttctgacaagattgaggcactattcgatttaattaaggggctgataaaggatatggatggggctcaagatgatgaacttgatgaagaagattttaaggaggaacagaactctgtagcacgtctcattcacatgttgcacaatgatgagcctgaagagatgttgaagatcttatgtactgtacagaagcatatacttcagggaggccccaaacgtttaactttcactgtgccttctttagtattctccgctcttaagctggtcaggagattacaaagccaagatggagatgtcactggggaggatgttcctgcaactccaaagaaaatattccagatattgcatcagactatcgacgcactttcttgtgttccttccccagagttagctctgagactatatttgcattgtgcagaggctgccaatgactgtgatttggaaccagttgcttatgagttctttactcaagcgttcatattatatgaagaagaaattgcggattcaaaggctcaaatcactgcaattcacctgataattgggacccttcagcggatgaatatatttggggtggaaaatagagacactctcactcacaagacaacagggtactcagcaaaacttctcaagaagcctgatcaatgccgagcagtttatgcgtgttcacatcttttctgggctgatgaccaagatgggataatggatggtgaaagggttctgctttgtttgaaacgtgccttgagaatcgcaaatgctgctcaacagatggctagtgctacaaggggaagcagtggatccgtaactctatttattgagattttgaacaagtacttgtacttctttgagaaaggaattccgcagatcacaaataccgtgattcaagatttgattgaattgattagaacggagaagcaaagtgataactctgtagctgatccatctacagaggcattcttttctagcactttgcggtacattgaatttcagaagcagaaaggtgggagcataggcgaaaaatatgaacagataaagacgagttcatgagtcagaactagcgcggcgccacgactggtttcgattttgttgagaattgggtcgtttgtttggcatggttcagtgaaatagaaaccataagttttagctcgctccatgtaaaagatgtttatacgagctgttaattctcaaatctcacggtctgagcgggtctgttcgcccattggcaacactttcaggtttagtcaggtggcaataagctgtgtcctttggggagcacaggtctgtacaggattacttgtgttcgtgatcagttctactgctacctgaatttcatcgttgtatatttccgccccttatgcgaagcttatggattttagatctctgtaacattcggagtacatgccttcatttctgagttctgactggacattgatgattgtttcagagtggccagtgcaggacttgaacattttggatgcccgttcgttgacattttaatgttacccattactctgc

SEQ ID NO: 90928 - DNA, 2878 bp, Zea Mays
gatcagatccacctcagccgtctcggatggcgtcagcatcgacggcggtgcggatgctccccgacggcggcgctgacgacgaggagcggtggctcgccgagggcatcgccggcgtccagcaaaacgccttctacatgcaccgcgccctcgattccaacaacctcaaggacgcactcaagtactcggcgcagatgctctccgaactgcgcacctcgcgactatcgccgcacaagtactacgagctgtacatgagggcgtttgatgagatgaagaagctggagatgttcttcagggaggagactcgccggggcagctgctctgtggttgatatgtacgagcttgtgcagcatgctgggaatgtcttaccgagactctatctcctgtgcacggtgggatctgtgtacatcaaatcgaaagaggctcctgctaaagatgttcttaaagatctcgttgaaatgtgccgaggcattcagcatccccttcgtggcctttttctgagaagttatctttctcaaataagcagagacaagttgcctgatattggttccgagtatgaaggggatgctgaaactattaacgacgcagttgaatttgttcttcagaatttcatagaaatgaacaaactctgggttcggatgcaacatctggggcctgcccgagaaaaggaaaagcgtgggaaggaaagaaatgaactgcgtgatctggtaggcaaaaaccttcatgttctaagccagattgagggtgttgaccttgatatgtacaaagaaactgttcttccaaggatattagagcaggtggttaattgtaaggatgaccttgcacagttctacctgatggactgcataatccaagtctttccagatgaataccatttacaaacattggaaacattattgaatgcatttccccagcttcagccaagtgttgatatcaaaacagtactctctcaacttatggacagattgtctaactatgctgcctcaagtcctgaagtgttaccagagttcttgcaagttgaagcttttgctaagttcagtaatgctattggaaaggtgatagaagcccaacctgacatgccagttgttggagccgtaactctatatgtatcgcttctgacttttactctccgtgtacatcctgaccggcttgattatgttgaccaagtgctcggtgcatgtgtcaagaaactttcaggcaaagcaaaacttgaagatagcagggcaacgaagcaaattgttgcacttcttagtgctcccctagaaaaatatagcaatattgttactgcattagaactttcaaactatcctcgggtcatggattatcttgataatgctacaaccaaagtgatggctgtggtaataattcaaagcataatgaaaaacacaacctgcatatctacttctgacaagattgaggcactattcgatttaattaaggggctgataaaggatatggatggggctcaagatgatgaacttgatgaagaagattttaaggaggaacagaactctgtagcacgtctcattcacatgttgcacaatgatgagcctgaagagatgttgaagatcttatgtactgtacagaagcatatacttcagggaggccccaaacgtttaactttcactgtgccttctttagtattctccgctcttaagctggtcaggagattacaaagccaagatggagatgtcactggggaggatgttcctgcaactccaaagaaaatattccagatattgcatcagactatcgacgcactttcttgtgttccttccccagagttagctctgagactatatttgcattgtgcagagttgcttatgagttctttactcaagcgttcatattatatgaagaagaaattgcggattcaaaggctcaaatcactgcaattcacctgataattgggacccttcagcggatgaatatatttggggtggaaaatagagacactctcactcacaagacaacagggtactcagcaaaacttctcaagaagcctgatcaatgccgagcagtttatgcgtgttcacatcttttctgggctgatgaccaagatgggataatggatggtgaaagggttctgctttgtttgaaacgtgccttgagaatcgcaaatgctgctcaacagatggctagtgctacaaggggaagcagtggatccgtaactctatttattgagattttgaacaagtacttgtacttctttgagaaaggaattccgcagatcacaaataccgtgattcaagatttgattgaattgattagaacggagaagcaaagtgataactctgtagctgatccatctacagaggcattcttttctagcactttgcggtacattgaatttcagaagcagaaaggtgggagcataggcgaaaaatatgaacagataaagacgagttcatgagtcagaactagcgcggcgccacgactggtttcgattttgttgagaattgggtcgtttgtttggcatggttcagtgaaatagaaaccataagttttagctcgctccatgtaaaagatgtttatacgagctgttaattctcaaatctcacggtctgagcgggtctgttcgcccattggcaacactttcaggtttagtcaggtggcaataagctgtgtcctttggggagcacaggtctgtacaggattacttgtgttcgtgatcagttctactgctacctgaatttcatcgttgtatatttccgccccttatgcgaagcttatggattttagatctctgtaacattcggagtacatgccttcatttctgagttctgactggacattgatgattgtttcagagtggccagtgcaggacttgaacattttggatgcccgttcgttgacattttaatgttacccattactctgc

SEQ ID NO: 90929 - DNA, 1764 bp, Zea Mays
cgtgagcgtgcacgccaaccacgctcatcaacggtcgtaacgcgcaggaaaggaaacccaaccgcatccggtcccggcccgggcgcccaatttccgcgaacagcccaccttcccgccagctccgcctcatccgtagccagacaaagccaacgaggcaaccggcaacaacgtgcccccgcggccctgccggccggacgaacgaacgaagcagtcaaaacccccgcaccccaccgggcctccacacgcagcagcgacgcccccgccccgcgtcttctactcttcttcatcttcactgctcaccaacccatccatcccccagtcctcctcactgctcacccgtctcccatccccacaccaccaccaccaccatcttccggtcttcccctccccacacccggcgggatccccaccatccccttcccccgatggagctgttcgcgcgcgccaaggtggtgcggctcaagagccaccacgacaagttcctgtacgcggacgaggacgaggcgcacgtgacgcaggagcgggacgggtcgtcggcgaacgcgcggtgggccgtggagccggcgccgcacaacccgggcgccatccgcctgcggagccggtacggccactacctcaccgcctccggggagccgttcctgctggggatgacgggccggaaggtgacgcagacggcgcccgccgcgccccgccccgccaacgcgtccgtggactgggagcccgtgcgggacggcttccaggcgcgcctccgcaccagggcgggccacttcctccgcgccaacggggggctcccgccctggaggaactccgtcacccacgacgtgccccaccgcaccgccacgcaggactgggtgctctgggacgtcgaggtcgtgcagctcctcacgccggcgccgcccgaccgcgccggctccgcgcccctcgccaagttgccggactcgccgcccgcgccggagctcgccaacccgccgcagccgcatcaccgtccctccaagtcctacgccgcgccaccgccaccgcccacgctggagcccgaggcgccgccgcccaggctctccaagctcgagtcctccgattcattctctgcccccttgcacaaggtagagggacgtgccatccattatcacattgcagatgatctgggcaatgtgcaagatggcacagtgggacactcctttacattcaatggcagcaacttggaggagcttgcccacaagttgcaggaagagactggcctggataatatcatcatatgcacacgcagccctatcaacgggaagctcactcctctccgtctgcaactgccaccaaacaatgcagctatgcatattgtgctcgtccaggagtcctcaaaggtggctagatcatttgcacggccgtacggttcataaatcacaaacatttggcgaagacacggggggccttgagttctggtggattgtgcttgtgcgtgtcgctcgaagcccgtacatcattggatcaggtcatgccggttgtgcggtcacgctgggtgtcagaagcaacctagcttaaacctcattcgtgcacatgtaaaaggagcaccccccccccccaccacccacacacacacacacagtatagttaaaaccagcggagattcatcgcgtgatatgtggagagatgtgttccattgattaatttatactagttgagattctggccctgtatcttatatcattggttttgtattagttggtcaatagaatttgtactccgtgctgcgagccggctggttcttccccc

SEQ ID NO: 90930 - DNA, 1602 bp, Zea Mays
ccgcgccgaaatgcggccgcatctcctccgcctcctctcgctcctcctcctcgtcgccgcctgcctcccgcctccggccgcgtgccggcacatccacccgccgccgcggcagcagcagcaacacggcggcacgaacgtgctcaccgtggcgctggccgccgccgcgtcgatcctcgtgctgctcctgctctacctctgcgcggccatcgcggtgcgccggttccgctcgcgcggcgcggtggcgcgggagccggcggcggcgtcgcgcgccgcggcgttcctccgcctgcacgggctccaccaccaccgcccgtccttcacctacgagcagctgcgcgccgccaccgcgggcttcgacgcggcgcggaagctcggggacggcggcttcgggacggtgttcctcgcgtacctcccgccctccgcccgccccgccgccgtcaagcgcctgcacgtcccgccgtccccgtccccgtccccgtcgttcccctctgcctccgccaccatcaccaagtccttctgcaacgaggtgctcatcctctccgcgctccgccacccgcacctcgtccgcctccacggcttctgcgcggacccgcgcgcgctgctcctcgtctacgacttcgtccccaacggcacgctctcgcagcacctccaccgccgccgtgccggccctggcgtcgcgggcgtgccgctgcccccgccgctcccctggcggacccgcgtcgcgatggccgcccagatcgcgtcggcgctcgagtacctccacttcggcgtcaagcccgccgtcgtgcaccgcgacgtcacctcctccaacatcttcgtggaggccgacatgcgggcgcgcctcggcgacttcggcctctcccgcctcctggcgccgccggacgcctgcgccacggggggcgcccgcgacctcgtgtgctgcaccgcgccgcaggggacgccggggtacctggacccggactaccaccgctcgttccagctcacggagaagagcgacgtgtacagcttcggcgtcgtggtgctggagctcgtcacggggctgaggcccgtggacgtgggcagggagcggcgggacgtcacgctggcggactgggtggtggccaagatccaggtcggcgagctcagggaggtcgtcgacgcgccggtgctgggcgagggccccgccgtgatggccagcgtcgaggcagtggcggagctggcgttccggtgcgtggcgcccgacaaggacgaccggcccgacgcccgggaggtggtggccgagctcgcgaggatccagacgatgctccccgagcttcccggccggatcgcacagaattgagctaaccacatcctgacaacttggcttctatgctgctatcttgactaaggattagcatcacatcctgaaggaacactccaaggaaggcagaccaatgtggagctcacatcttcccgtgctggttctgtgacatgaatctgtatgtatgagcattggccagatctgttagttgtgttaccggtcagcactacactcgtcaggttatgtgtagtcttgttctgctggaaactggaatgtacaagctctccccccaaaagtaattttgtccgatccattttcctggg

SEQ ID NO: 90931 - DNA, 2722 bp, Zea Mays
gtgcccgccatgaagtcatcgtcatgcttgcgagctgcggggtggggcattgggattgaaacagaagtgggccccactcaaagatcgctgacaggcgggccccattgcgctgtacgaactgcgcgagcacgaccgagcccgaaggcccatttgtgtagcggctattgaagtccacccgtggcccagctgtaccggtctatgtctatccgatctccccgaagaattacttcctggagccacaggcccacaccacagcgaggcccgctgcagacggtgccatcgcgtcgcccatgccatgcacccactcacgctctcctccaccgcgctcctccgcctaatcaagtcgctctcgccggcggcggggccgagggcccacctcgcggccgcggagatccacggcctcctcttcaaggaagggctcctccacgccggggcgcacctccccacggcgctgctctcggcctacgccgcgctggggaggccgcggcacgcgcgggacctgttcgacgagatgcccgacccgggcctcgtctcccgcaccgccatggcgcgcgcgcacgcggcgtccgggcaggccgcccaggcgctcgccgtgttccgggacatgatcgcggacggcgtgctcccggacaacgtggccctggcggtcgctctggccgcgtgccacacgacagcctcgctccctgcagcggggatggcggcggcaaggagacctgggaagatggtccatgccatcatcgtgacaagcggcattgtgccggatgtgttcgtctccaccgagctgatcagggtctacggggagtacggtgagctggcgctctcccggaggttgtttgatgcgatgccggtgaggagcaccgtttcgtggaacgccatggtgcatcagtatatcaggcatagtaatgttggcgatgcttacgagctgttccttgcaatgccaaggagggatgtagtgtcatggaacacgatgattgccgggtattcccttgttggtcgatttatggaggcgctagagttgtcccgccagatgatatcgccgtcgtcatgtccagtgtatccaaatggacctacaatgagcactgtccttgctgcttgcgcaggtgccggttgtttagagactgggatttgggtccatgcctttgttgacaggaaccgcatgaatgatgatggctcattggatcggtccttgatagacatgtacgtcaaatgtggaagcatcgaaaaggcacttcaggtgttcgagaaggcacctgaggcgagggatctgtactcatggacgaccatgatttgtggattggcaatgcacggcagggctgctgatgctctaaaaatgtttggtatgatgcaagacaatggcatacaccctgatgatgttactcttgttggggtcctaaatgcttgtgcacactgtggacttgtggacgaaggccttcgacacttctactccttggagaagtatgcaatcacacccaaaattgaacactatggatgtgtcattgatcttcttggtcgtgttgggcggctgcaagaagcatacaacattatcaggaccatgcgcatgaagcctaatgcagtaatctggggtgcattcttgaacgcatgcaaagttcacagcaacgtggagcttggcgagatcgcagcagctgagctcaccaggttagatccaggtgacccctgggcaaaggtgatgctgtccagcttgtatgcaaaattgcaggactggaacagtctagccagggagagacgggagatgaacaacctgcagataaagaaaacaccagggtgcagctcaattgagcttgatggggaggtgcatgagtttgttgctggtggttttcaacatcctcaacatggcgaaatttgcactgtactagagaacgtcgaagcacaaacacatactggctaaagagatgtggaggcctcatgccctcatcagctgagttttttgttctatcaatgaatgttagcatgtagtagcaagtttcatgggcactggcagattaactgacctttgtgtgttccattagcctgtgaagttcgaaactggtcatattgctaagaattctaggaggttactattagggcccagagtaaatgactacgtgctgatgaaaatctgttcagattaatcattctggaacttgtactaacaattgaagcaagtggaggcatagcaccaattgtgtctgtgctgcagctctggatgtcagtagacaagaggtgtatcagagagaagcacttcaaggttaatttgttgagcaaattggagatgctggattttgtattttggcaggtgatgtatgcttttcagcatgccgtgttttattgaactcgtcaagtcctgcagaagctgaaactgatcatgtataagactttgccttgtgtcacaatgggtgcatttgctggtggtccttggatcaggttgctcatgagtggtgaatggtctgacgacttcagaagaggatagatctgagattacctttcatgcatgttaaggaagttaagtagttgatgccttcaaataaatggagaaacgtcaggtgaaccgcgagcagaattctgtggcgcatttgttagcgcagttagctaggactctgttcatacagctgttcgattaagccaaatacctaactgtattgcccatctagtagaacctaactgtaacttgtcctcttaattaatactagcaattagcaaacatgtctgtacgttgcgatcggag

SEQ ID NO: 90932 - DNA, 582 bp, Zea Mays
cggcccagcacgcacctgctccattacccgtctgccgtcggcataacataatcgtcgtcgcgtgcagtccccattcccttttccagtggtctgttgctcgcgcttcgtccagcttccccggaagaggtagcacggcaagggcagaggatgagtgaccccaagtacgcctacccctaccccgcgcaaggttactaccaggggccgtaccagggcccgccggtgatggcgccgccgcagtacgccgcgccgccgcccagaagggagccgagcttcctggaaggctggtacgtattcccggccggccaactctctgaccctctctctattattcctctgccgcaagtttactgtgcaggctctgtcgtctctgtactgtgtggttaattccaagtgatggctctcgcttcatctgttacgttcttgcgccatcataatctaatcggttattctgcagcctggccgcgctgtgctgctgctgcttgatcgacgagtgctgctgcgacccgtccatcatcttcgtcagctagactagacgaggaagaacctattggtatatataatatgtatgtatccagttgtact

SEQ ID NO: 90933 - DNA, 863 bp, Zea Mays
cggcccagcacgcacctgctccattacccgtctgccgtcggcataacataatcgtcgtcgcgtgcagtccccattcccttttccagtggtctgttgctcgcgcttcgtccagcttccccggaagaggtagcacggcaagggcagaggatgagtgaccccaagtacgcctacccctaccccgcgcaaggtacttccacgctacatacacaccacgctgctcgtctcgatccatcatcgtcctcatcgatttgatccgatccgtgtgaagaaacgaatagaactgcttggtcgatccggtgctgacaggttacttttcgtttcttggttgatttgtgtacccaaaaaaaaacaggttactaccaggggccgtaccagggcccgccggtgatggcgccgccgcagtacgccgcgccgccgcccagaagggagccgagcttcctggaaggctggtacgtattcccggccggccaactctctgaccctctctctattattcctctgccgcaagtttactgtgcaggctctgtcgtctctgtactgtgtggttaattccaagtgatggctctcgcttcatctgttacgttcttgcgccatcataatctaatcggttattctgcagcctggccgcgctgtgctgctgctgcttgatcgacgagtgctgctgcgacccgtccatcatcttcgtcagctagactagacgaggaagaacctattggtatatataatatgtatgtatccagttgtactcttagctttattcctgcaaccttcaagctcgagatgatctgtatctcggtcgagttggtgtgtatctgtcatggtattgcttctaatttgctgctgaatcgagaacatattcgccg

SEQ ID NO: 90934 - DNA, 536 bp, Zea Mays
cggcccagcacgcacctgctccattacccgtctgccgtcggcataacataatcgtcgtcgcgtgcagtccccattcccttttccagtggtctgttgctcgcgcttcgtccagcttccccggaagaggtagcacggcaagggcagaggatgagtgaccccaagtacgcctacccctaccccgcgcaaggttactaccaggggccgtaccagggcccgccggtgatggcgccgccgcagtacgccgcgccgccgcccagaagggagccgagcttcctggaaggctgcctggccgcgctgtgctgctgctgcttgatcgacgagtgctgctgcgacccgtccatcatcttcgtcagctagactagacgaggaagaacctattggtatatataatatgtatgtatccagttgtactcttagctttattcctgcaaccttcaagctcgagatgatctgtatctcggtcgagttggtgtgtatctgtcatggtattgcttctaatttgctgctgaatcgagaacatattcgccgttgagttc

SEQ ID NO: 90935 - DNA, 1965 bp, Zea Mays
cacgagcctgctgatccaaacactgtgaagattctataagtacaggcagcgggcgaggccgtgttccagatccagcctcgagcaccgggacctgccgcgtgcttcttactggcaacttggcaagtggcacggccgcacggatccatctccatcgtcgaggcgaggacgaggaagcagatcgaagcacccaaccacaccacactggtggtgagtggttgctggcgatggcgatggaagcgatgatgagcgggctcaactccggcgtggtgctcagcctgatcgccgtgctgtggacggtggtgtggcagaacctgcagcacctgcagctgcagcagttcttcgcgcggcagctgagccggcgcgcgcggcggctggcggcgatggtggacccgtacctgtcggtcaccatcgccgagtacgagggcgggcggatgaagcgcagcgacgcgtacgaggaggtcaaggcctacctcagcgacgccagcgcccacggcgtgcgccacctccgggccgagtccgccaaggacgccgacaagctcgtgctcagcatgtcggacggcgaggaggtggaggacgacttcgagggcgcgagggtctggtggtgggcctactccaagcagccgccgcgctcggacggcgccgcggcgtggtggagcggcggcggcgccgccgcgcaggaggagcgccacttctaccgcctcttcttcctggagcaccagcggtcgcttgtgctggacacgtacctcccgcgcgtccgccagctgggccgcgccgtcatggtgaagaaccgccagcggaagctgttcaccaacatctccacgcaccagtggagcgacggcgggttcatgaggtcggcgtggacccacgtggtgttcgagcaccccaagacgttcgccacgctcgccatggaccccgccgagaagaagagggtcatggacgacctcgacatgttcaagggcggcagggactactacgcgcgcgtcggcaaggcgtggaagcgcgggtacctcctgtacgggccccccgggacggggaagtcggccatgatcgccgccatggccaactacctcgactacgacatctacgacatcgagctcacgtccgtgcactccaacaccgacctccgcaagctcttcatcgagaccaccagcaagtccatcatcgtcatcgaggacatcgactgctccctcgacctcaccggcgcgcgcgagaagaagaaggcggcggaggaggacggcgacaaggacaagaaggacggcggcggccccagcaagcccggcgagaagaaggacaccagcagcaaggtgacgctgtcgggcctgctcaacttcatcgacgggctgtggtcggcgtgcggcggcgagcggatcatcgtgttcaccaccaaccacgtcaagaagctggacccggcgctcatccgcagagggcgcatggacaaacacatcgagatgtcctactgcggcttcgaggcgttcaagttcctggccaagacgtacctcgacgtggactcgcaccctctgttcgacgccgtcggcgagctactccgggaggtggacatgacgccggccgacgtcgccgagaacctcacgcccaagagcctcgacgacgggccggactcgtgcctcgcggacttggtgaaggcgctggaagaggccaagaaggctagcggagccggagaggatgaagaggaccagcaatatgagccatgaggaggaaaagctctagattattcagttcattattactgccagtttgtcgttagtcggtaactctgctgatttgtctgctgtgctacagtagtgcagaggctaatgataaaagttacccctagaataaattaattagctaggggtttgtgtttgtctaaatttatcttatcctagagaagagaagccccgttcttttttttctataaataagtctagataagacagtttttttccataaaagctgttagttcccctc

SEQ ID NO: 90936 - DNA, 1896 bp, Zea Mays
atccagcctcgagcaccgggacctgccgcgtgcttcttactggcaacttggcaagtggcacggccgcacggatccatctccatcgtcgaggcgaggacgaggaagcagatcgaagcacccaaccacaccacactggtggtgagtggttgctggcgatggcgatggaagcgatgatgagcgggctcaactccggcgtggtgctcagcctgatcgccgtgctgtggacggtggtgtggcagaacctgcagcacctgcagctgcagcagttcttcgcgcggcagctgagccggcgcgcgcggcggctggcggcgatggtggacccgtacctgtcggtcaccatcgccgagtacgagggcgggcggatgaagcgcagcgacgcgtacgaggaggtcaaggcctacctcagcgacgccagcgcccacggcgtgcgccacctccgggccgagtccgccaaggacgccgacaagctcgtgctcagcatgtcggacggcgaggaggtggaggacgacttcgagggcgcgagggtctggtggtgggcctactccaagcagccgccgcgctcggacggcgccgcggcgtggtggagcggcggcggcgccgccgcgcaggaggagcgccacttctaccgcctcttcttcctggagcaccagcggtcgcttgtgctggacacgtacctcccgcgcgtccgccagctgggccgcgccgtcatggtgaagaaccgccagcggaagctgttcaccaacatctccacgcaccagtggagcgacggcgggttcatgaggtcggcgtggacccacgtggtgttcgagcaccccaagacgttcgccacgctcgccatggaccccgccgagaagaagagggtcatggacgacctcgacatgttcaagggcggcagggactactacgcgcgcgtcggcaaggcgtggaagcgcgggtacctcctgtacgggccccccgggacggggaagtcggccatgatcgccgccatggccaactacctcgactacgacatctacgacatcgagctcacgtccgtgcactccaacaccgacctccgcaagctcttcatcgagaccaccagcaagtccatcatcgtcatcgaggacatcgactgctccctcgacctcaccggcgcgcgcgagaagaagaaggcggcggaggaggacggcgacaaggacaagaaggacggcggcggccccagcaagcccggcgagaagaaggacaccagcagcaaggtgacgctgtcgggcctgctcaacttcatcgacgggctgtggtcggcgtgcggcggcgagcggatcatcgtgttcaccaccaaccacgtcaagaagctggacccggcgctcatccgcagagggcgcatggacaaacacatcgagatgtcctactgcggcttcgaggcgttcaagttcctggccaagacgtacctcgacgtggactcgcaccctctgttcgacgccgtcggcgagctactccgggaggtggacatgacgccggccgacgtcgccgagaacctcacgcccaagagcctcgacgacgggccggactcgtgcctcgcggacttggtgaaggcgctggaagaggccaagaaggctagcggagccggagaggatgaagaggaccagcaatatgagccatgaggaggaaaagctctagattattcagttcattattactgccagtttgtcgttagtcggtaactctgctgatttgtctgctgtgctacagtagtgcagaggctaatgataaaagttacccctagaataaattaattagctaggggtttgtgtttgtctaaatttatcttatcctagagaagagaagccccgttcttttttttctataaataagtctagataagacagtttttttccataaaagctgttagttcccctc

SEQ ID NO: 90937 - DNA, 1265 bp, Zea Mays
gaaggaccgtcatgcaaaactccatcaacaaaatttgattttcctttcctttccttttccacccccgactattacccctcctcccactccacggagaagcgaaaccgacctttccccctcccccgcattccacctcgcggagatccagtccagccctagggtttcgccagcggcgagccaaactccacgagcgggggaagaggggaaagcagggacgacgagggggcagccatggggcagcagtcgctgatctacgcgttcgtggcccgtggcacggtcatactggccgagtacacggagttcaccggcaacttcaccaccatcgcctcccagtgcctcatgaagctccccgcaagcaacaacaagttcacctacaactgcgacggtcacactttcaattacctcgtggaagacggattcacatactgtgttgttgctgttgaatcggtggggcaacaaattcctattgctttcatggatagggttaaggaggatttcacaaaaaggtatggtggtgggaaagctgctactgctgcagctaacagcctcaatcgagagtttggatcaaaacttaaagaacacatgcagtattgtgtggatcaccctgaagaggttagcaagctggccaaagtgaaggcgcaggtttcagaagtcaagggtgttatgatggaaaacattgaaaaggttctggatcgtggagagaagattgagctgcttgtcgacaagaccgagaatcttcgctcacaggcacaagatttcagacagcagggaacaaatgtcaggagaaagatgtggttacagaacatgaaaatcaagctcatcgtcctgggaataatcatcgcactcattctgatcattatcctctctgtctgtcatggtttcaaatgccattaagcacagaccagaatactgatacattcaactgcacctattatactgctgcttggagcaaaaaaaagtatgatcttttgttgtttcgctagtgtgctgtggcccggtcattatgcataggtgttttacattgtcgtagtgtttgataaatgatggatggtgactgggtttgttgtgtcaactgtcataactattgtgcatttttggacgctatatgtgtagccttgatatgaatagatttactgtacttataagggctggtgtgactcagccgtttgctcctttgggcaatgtgcgcatttgggagcatcttgcatttacctcgtttacctcagaaatgcagcttggaaaatatgagcacggaatcgattttc

SEQ ID NO: 90938 - DNA, 633 bp, Zea Mays
atgcactgcgatctggtgattgttgatgctcgttcatcgttggtgctcctcgctggtcggctggtgctcctcgcctcctcggatcgagttgtagcttcacagctggacggctggtgctccgtgcggtgctggtgcgtgtgcgtgattcccttcctgattcttctctgtctccggtccggtggtccgtggctctgcgccttgtatggtcactggctcactcctcactgcctcactggtgcggtagtgcccctgctggctgcttggacatctataattttgttctgttttcattttcctcccattctcgtcctccttctaacctgtctggttgcccgactttctttggtgctcggctggtccttgcttgctgttgctggtcgatctgcgcctctgctcggctgctcctcggaccttggctccgttccgtcgtctctggtgctccggcttggaaagccgttaaacctccttgtcgtcgggcttgtgtccattgtagccgtcaggctcatggaccttgacatggctgcagaggaggaggagcgcaggctcgaggactttaatgagactgaggatgctaggttcttcattggtttcggtgagaatgaaacccatggcgcctctgctagggatgattga

SEQ ID NO: 90939 - DNA, 446 bp, Zea Mays
cggagatcccggtgctccgttctccctctcctctctactctctcctgtcttcttctccccctccggcctccggtgtgatctgcgcttctgcggagatcccggtgctccggcttactccgttgaggaaccgggactccggggtccggtacggcggcactggcactggcactggtactctcctctctcctagctccggtctccctctcctatcttcttctccccctctggtactgtccggcagaccggcactggcacacagatccggtctccctctccccctccggcctccggtgtgatctgcgcttctgcggagattcatctcggtgctccggcttactccgttgaggaaccgggactcctctctcctatcttctagctacggtgctctggtctccctctcagcctctcctctctcctagctcatgtctccctctcctctctcctag

SEQ ID NO: 90940 - DNA, 116 bp, Zea Mays
caccgaacgcgttcagttacctttagagagaatgtgctaatttacattctctcaaagttcctgagagcacctagagggggggtgaataggtgatcctgtaaaaacttaacttatag

SEQ ID NO: 90941 - DNA, 2123 bp, Zea Mays
ctagcccacacctactgccaagtacggttcttgtcgcctgtagggttgtaaggttagggtcttagggagggtgagaaatggtctgcacccaagtggattgatgtggggagagaaagaaaaaaagcatcagaaaagcgagatttgcgtgtcatgggcggcatcaggcttactcatgcgatattagcccggtcacgagactcagcagtcagcagccgcagccgttgcatcacacttagcgccaccccatgccatgagaagaagctcttagaagaccagcgttgtcgctcgccaggagaggaggaggaggaggccgctctacggaagaagaagacgacgctgcgctgcgcggcgacggacgactggtcggtgggtgtcatgagaaggtcggccgtgtccgtgaggcgggcggcgccagcggcattggccatcttgttcggagcgctccttctggtgtcgttcgtcgtggacggcgtcaggaaagcggctccgccggcggcgatcggcgggaggaggatgatgctgggcggaggcgccggagggctgaggaccctggaggatttcaaggctcatgatcccttccaggacagcaagagaagggtgcccaatggccctgatcctatccacaacaggtactttgatctacgtacagcttactgcgctgcaagctttggttttggtgtttgagttggcccccccttttttccccttgtacccaatgcactggtttcttgaaactagaagctttaggattttcaaaaaaaattactacgtacgatatgaggccaaatgctgcagccttcacctaacttgaactagcagaattccaacgcttgacgtttttttttgtcatggcttgtttgtttgttaagcttgcgttacggaatgaagggaatgttcttgtttcaccagtttctgactggtggtatgcaaaggtgaatgttttgcagtgcgtctgttgtgatcattttgtcttgccatatgctcccatttaccatgttttgttggatattttcacgtaggataggtcaggaaagaaagaaagaaaaaacaatacttttcataataatataaaataaatgataacggataaaacgcagggagagggaagaaaaaacaaagggagacgacgcatatgagcaaaagatgccatgcgctctttttccctcaccactcccacattcccctatgatgatatgctataatctttcagcaaaagcaaccacacaagtcctattcccccagtgagcaacgtagatgcacatatcattcctgaaatcattagtctacatccatgaaagcagtcaaaacaaagcacagcacagcaccacacccacggttcatcatgatggtaaactacaggaaagccttaacggtttcagtgcatcacctgccgaaacaaagactgtgctgctgtctcagtccctgcttcagcttcagcttcagcttctaacccggtttcaaatcctgcagaggaaccggcaagtcaggacgatcgccgggacgagcatgacgtcgggagcgcgcatgccgaggcgtggaagcttccgaacccgaagaggccggcgatagcgacgtgttgggagcggcggctagcaaacagaagatgcgttgcgttgcatacttgcattgcatggaggaagaggaacagacaagaggtgcatcgtggggtggtgggtctggctgggatgctgggtgtaactagggggaggtggcctgccctatcttcttctaagcactgctatttaagacggttttaagcatgatgagaactttagctttttgggggaggggaaacaaaggctattctattctattcaattctattctgccagtgggggtttgtttgttttgttttgttttgtttttttgtaaagagagcagtaagtaccaagcttccctgtcacatggaaacaagcaagcatcagagattcttcttgacaaagggatgtgggcaagaagagctcctcctcctcctctccctgtcttttggccgcagctgctttatacatctcagtacaagtaccctgtgtttctttgaggtgttcattcttttgcattggcactgtatggtctgcagcacatcataagtttgctaaaggagtcatgggtctggactctgaaaa

SEQ ID NO: 90942 - DNA, 1132 bp, Zea Mays
atgggcggcatcaggcttactcatgcgatattagcccggtcacgagactcagcagtcagcagccgcagccgttgcatcacacttagcgccaccccatgccatgagaagaagctcttagaagaccagcgttgtcgctcgccaggagaggaggaggaggaggccgctctacggaagaagaagacgacgctgcgctgcgcggcgacggacgactggtcggtgggtgtcatgagaaggtcggccgtgtccgtgaggcgggcggcgccagcggcattggccatcttgttcggagcgctccttctggtgtcgttcgtcgtggacggcgtcaggaaagcggctccgccggcggcgatcggcgggaggaggatgatgctgggcggaggcgccggagggctgaggaccctggaggatttcaaggctcatgatcccttccaggacagcaagagaagggtgcccaatggccctgatcctatccacaacagaggaaccggcaagtcaggacgatcgccgggacgagcatgacgtcgggagcgcgcatgccgaggcgtggaagcttccgaacccgaagaggccggcgatagcgacgtgttgggagcggcggctagcaaacagaagatgcgttgcgttgcatacttgcattgcatggaggaagaggaacagacaagaggtgcatcgtggggtggtgggtctggctgggatgctgggtgtaactagggggaggtggcctgccctatcttcttctaagcactgctatttaagacggttttaagcatgatgagaactttagctttttgggggaggggaaacaaaggctattctattctattcaattctattctgccagtgggggtttgtttgttttgttttgttttgtttttttgtaaagagagcagtaagtaccaagcttccctgtcacatggaaacaagcaagcatcagagattcttcttgacaaagggatgtgggcaagaagagctcctcctcctcctctccctgtcttttggccgcagctgctttatacatctcagtacaagtaccctgtgtttctttgaggtgttcattcttttgcattggcactgtatggtctgcagcacatcataagtttgctaaaggagtcatgggtctggactctgaaaa

SEQ ID NO: 90943 - DNA, 1568 bp, Zea Mays
cacgaactgcgcacgcacgcaacgcaacgcaacgcgatctcagctcccaaccaaccttcatcaatccagtaccatcggaagcgtacatgcatacataccatacgtccataccatacggccggaccacgcccagcaaccaatcaataatactcctagtccgccaccagtcgctccgcctcggcgccatcgcacggaaagcttgctgttgctggcgacctcgcggcggggcgccggagcagccatgcctataaaatccgggcgagagcacccacccattcgtaccctatcacccgcctcccctgcctccggtcctctcccgcctctctctctctcttgcacacacacgacgtcgtacgcggcagctagcagcacgcacgatcgatcgccacagcgtacgtactagcacagaggacgacgaccgacgccatggcggcctccttcgcgcgcggcggcgtggcagcggcggcggcgacggcgctggtgatggtggcggcggtgctggcggtgtcgtgggccggcgtggcccgcgcggacttcgcccaggaccgcgccatgtgcgcggaccggctgatggggctggcgacgtgcctgacgttcgtgcaggacaaggcgacggcgcgcgcgccgacgcccgactgctgcgcggggctgaagcaggtggtggccgccagcaagctgtgcatgtgcgtgctggtcaaggaccgcgacgagccggcgctggggttcaagatcaacgtcacccgcgccatggacctgccctcgctctgcagcaaccccgccaccttctccgactgccccaagatcctgggcatgtcgcccgacgcccccgaggcggagatcttcaaggagtacgcgaagaagcacgagagcaacaacggcaccaccattcctgccgctgcaaccggcgccgccgcggcgaccgggaagagcacgagcgcggcgccgacggcggacggcgccgggaggcagcccggcacggtcttcttctacgtcgtgtcggcgctgctcgtctccgtcgcggtcctgctgtgctgatggcttaacggccggccgcggcagcgcatgcattcatggccggccggccggcagggagatggaggtgctactgcacgctgcacgactggaaggaagcccggagacacaattcaagtctttgagatgagcaaactaaaggacacgagtactctttttttttctctttcctgtagcctttttgtgtgtgtgtggcgtgttgtggggagtttgtgagacgtcggcttgtgctagtgctgacggtgcaccagcgacgcagctctgtactacttcccagctgttgggctgtggccttccagcctggggattttaatgtggtggcccgagactgccgacatgtctgtctgaatctgatgattctgatccactatgttggcacattgtatgtttggtttctttggtttcagttttagttctcgtcttcttgcttttttttatttaaagtaatattgtgtaagcaacatgcatgtaactagaaggacctttgtttgtatacgcttaagaaacagtttcgatactaaattttagttcccgtc

SEQ ID NO: 90944 - DNA, 993 bp, Zea Mays
cgcgcgcgcgcaccacacatacacttgctccggtttatatagccatggcagcatacctccaaaacgccaatcgaagctcagcacgatcatcgacagacacacatatcgatcgatcgtgtcacgccagcagagcacgagcacggtgctccaatccagagccatgtcgaagccagcgtcgtcttcgttcctcctcctgctgctgtcggcgacgctgctcgccaccgtctgccgcgccgacccggacccggtgcaggacttctgcgtggccgtggcgccgggcggccacaacaacgcgtcctcctcctccagcacctacccgggcttcccgtgcaagccggcgtcgacggtggtctcggacgacttcttcttcgcggcgcacgcgggcggcgcgagcacggacaacccgatgggcgcgggcgtgacgccgggcaacgtggaggcgttcccggggctcaacacgctgggcctgtccatcaaccgcgtcgacctcgcccccggcggcgtcaacccgctgcacacccacccgcggtccgccgagctggtgcacgtggaggccggcgagatgctggtcggcttcgtcagcacggagggcaggttctactccaaggtggtgcgcgccggggagagcttcgtcatcccgcgcgggatggtccacttccagtacaacgtcggcaaaggcgccgcgcgcgccatgaccgtcttcaacagccagctgcccggcgtcgtgctcgccgcgcagaccctgttcggggccgacccggagatccctgacgacgtcctggccaagagcttccaggtggacgccgacaccatcaagctcctcaagtccaagttccagaaaggatagcgcgcgcggccgacctgctcgctagatttgcaatttccttacagttttgtttcatcagtacataactaatgttgtttcgcattattaaataattttatttgatcaataataaagttgtgtgatttagccacaacacgaggtaaaca

SEQ ID NO: 90945 - DNA, 123 bp, Zea Mays
atggatcctttcatgtacgagtgtactggcctccatagggagtgcgttgttatgttttttgggtctcttagacctttctctcttcttaatatatatctaaaacgcagtcctcctgcgtttttt

SEQ ID NO: 90946 - DNA, 1800 bp, Zea Mays
ctcccacgcggacgcgctcgcagagtcgcaagagaagagccgcatcgcgtccattaggtccatagcatctggaggggacccgtctggcgtctgtctgggaccgggctgcccagccgctcgatcgacgtttggcgaggacgctgctccggtactccggttggttggaccggaggcgcggcgatgggggcgctgtcgcggccggaggaggtgctggcgctggtgaaattgcgggtggcagcggggcagatcaagcgtcagatcccgcccgaggaacactgggccttcgcctactccatgctccagaaggtctcccgcagcttcgccctcgtcatccagcagctcgggcccgaactccgcaatgccgtgtgcatcttctacctcgtgctccgtgccctcgacaccgttgaggatgacactagcatcccgaccgaggtgaaggtgcccatcctccaggaattttatcggcacgtctacaaccgcgactggcattattcatgtggaacaaatcactacaaagtgctgatggataagtttcacctcgtatccactgccttcctggagcttggtcaaggctatcaaaaggcaatcgaagaaatcactaggcgaatgggagcaggaatggcaaaatttatatgcaaggaggttgaaactgttgatgactatgacgagtattgtcactatgtagccgggctagttggttatggactttccaggctcttttatgctgctgggacggaagatctggctccagattcactatcaaattcaatgggtctctttttacagaaaactaatataattagggattatttggaggacataaatgagataccaaagtcccgcatgttctggcctcgagagatatggagtaaatatgcagataaactcgaggatttcaaatatgaggaaaataccgaaaaggcagtacaatgcttgaacgatatagtgacgaatgcactgattcatgctgaagagtgccttcagtacatgtcagccttgaagaaccatgccatcttccatttttgcgcaattccccagataatggcaattggaacatgtgctctttgctacaataacgtgcatgtctttagaggagttgtaaagatgagacgtggtctcacggcacgaataattgacgagacaaattcaatgtcagacgtctataccgctttctatgagttttcttcattgatagagtcaaagattgatgacaatgatccaaatgctgctctaacacggagacacgtgaattcaataaagcaaacttgcaagtcatctggtttggtaaagaggagggggtaccatttggacacatcaccttacaggcctatgctgatcatgattgtcctcctgctggtggctatccttttcggggcactgtataccaagtgacttgtagctggcctttttcccctatggagacgagacaaactctgccaatctgatccttttcgtactctgtagtccccaatgactgcaggaagttcggaattactggctgtagaagtgtagatcatacggcagcatgctactgcttccatgactccgttactgctctcgattcgtttcttcattatgttttttcgcgcgttgtatcgtttgaagctgttttaagcaacggaaaaaaaataccatgtgacacgtgtatcctacgaacatgggtttctgtttagttagcagtgggcgcactgtattatgttgtcttgttgacatgtcatgttttcaaagctgacgtgtttgtgtttaccagaattgtgtagtggagaagaacatttgccgcgttgaccttgatgagttact

SEQ ID NO: 90947 - DNA, 1690 bp, Zea Mays
gcatgatggaagcaaggagccaagttttgatagttacacatcggagacaatttgtatgaggacaatgtttgtttttatacttttactagcaaatgtgccgttccctaaattaaacccaatgcataatgatgtattgtccaatgctgatgctgtatctaaattatccatttcaggactagttttttaatgttgtcatagtaatattaatgcagaatatgtacttgaagttttatctccgtcctttgattttctttgcagatactactttagtaaatagtattgtggtaaataatgttctcatttggatacatggattttaagaatccggatttaaaaaatctcataatcctggaatcccttcgggacattctagattctagtagattttaccacacaagcacggaatccaataaaacacattagatcttttttatccagattcttaacttatttggttttcagctatcaaaaggcaatcgaagaaatcactaggcgaatgggagcaggaatggcaaaatttatatgcaaggaggttgaaactgttgatgactatgacgagtattgtcactatgtagccgggctagttggttatggactttccaggctcttttatgctgctgggacggaagatctggctccagattcactatcaaattcaatgggtctctttttacagaaaactaatataattagggattatttggaggacataaatgagataccaaagtcccgcatgttctggcctcgagagatatggagtaaatatgcagataaactcgaggatttcaaatatgaggaaaataccgaaaaggcagtacaatgcttgaacgatatagtgacgaatgcactgattcatgctgaagagtgccttcagtacatgtcagccttgaagaaccatgccatcttccatttttgcgcaattccccagataatggcaattggaacatgtgctctttgctacaataacgtgcatgtctttagaggagttgtaaagatgagacgtggtctcacggcacgaataattgacgagacaaattcaatgtcagacgtctataccgctttctatgagttttcttcattgatagagtcaaagattgatgacaatgatccaaatgctgctctaacacggagacacgtgaattcaataaagcaaacttgcaagtcatctggtttggtaaagaggagggggtaccatttggacacatcaccttacaggcctatgctgatcatgattgtcctcctgctggtggctatccttttcggggcactgtataccaagtgacttgtagctggcctttttcccctatggagacgagacaaactctgccaatctgatccttttcgtactctgtagtccccaatgactgcaggaagttcggaattactggctgtagaagtgtagatcatacggcagcatgctactgcttccatgactccgttactgctctcgattcgtttcttcattatgttttttcgcgcgttgtatcgtttgaagctgttttaagcaacggaaaaaaaataccatgtgacacgtgtatcctacgaacatgggtttctgtttagttagcagtgggcgcactgtattatgttgtcttgttgacatgtcatgttttcaaagctgacgtgtttgtgtttaccagaattgtgtagtggagaagaacatttgccgcgttgaccttgatgagttact

SEQ ID NO: 90948 - DNA, 156 bp, Zea Mays
tggtggtgttattgtgtcgcttcggcgagtccagggctgaaaggacactcgcattctctcgcccttctcggactgacgcctggtgcgggtgcctcttggtctggagctgctccggctgggcttctttcttcgcctgcgtgctctctccctatatat

SEQ ID NO: 90949 - DNA, 1720 bp, Zea Mays
cttcttccagctacgagtctacgaccagttcggcagcacggcgagcatcccgtccgaccatccgctcgctcctcagagctagcctccaaactcgcaattatataactaccgtcccttgcaactttccagaccttttgcccccctgcttcctccgcctgcaccctctcacgagcgcccgcccgcccagatctagggttccatccgcgggcaagatgagcagcccccatggcggcctcgacgaccagatcgagcggctcatgcagtgcaagccgctcgctgagcccgaggtaagggctctgtgtgagaaggcaaaggagattctgatggaggaaagcaatgttcagcctgtaaagagtcctgttactatatgcggtgatattcatggacaatttcatgatcttgctgaactcttccgaattggtggaaagatacgaactacctgtttatgggagattatgttgaccgtggttactactctgtcgaaactgtcacacttttggtgtctttaaaagttcgatatcctcagaggatcaccattctcagaggaaaccatgaaagccgacagattactcaagtttatgggttctatgacgaatgcttaaggaagtatggaaacgcaaatgtctggaaaacatttacagatctatttgattacttccccttgactgcattggtcgagtcagaaatattttgtttgcatggtggattatcgccatccattgagaccctcgacaacatccgcaacttcgaccgtgtccaagaagttcctcatgaaggtccaatgtgtgatcttctgtggtctgatccagatgatcgatgtggttggggtatttctccacgtggtgctgggtatacctttggacaggatatatcagagcagttcaaccataccaatagcctaaggcttattgctagagctcaccaattggttatggagggtttcaattgggctcatgagcaaaaggtcgtgactatatttagtgcacctaattattgctaccgctgtgggaacatggcatcaatcctagaagtggatgattgcagggaacatactttcatccagttcgagccagccccgagaaggggagagccagatgtaacccgtaggacacctgactattttctgtgatgcaaaagtgacgtggatctgcagcaaaggtttgatagataggcgcagtttcctggttgcagatatatatatatctatatatattggctggagttcctccgcgtgctattcttatattatttctcgcccatggcgctcttggctgtcgccggctgctttgctgcatcgtggttcaagtgtataccctactacagctggaaggactggatcgtgctcttacctgtctctaactggttgattggcttagggtgggctgcggtggtgtgtgtgtgtgtgggggggttcaagcatcaggcagccatctgtattatgggaggaaagtgttcccgttgtattcattttgttcccctttcttcctcatctgattttcttctcttttttttatttcttccttctctgtgattcttgtagagttcagcacttgtatggttctatgttgggccattagttttttttaactctctttctctgactgcctcgatttgccgtatagaattacatttctaagcgcaactagccaacctgtagcattttctgtcatcagcatttgaagttttgaactgagccctggtcgtgtccctgaggtctgat

SEQ ID NO: 90950 - DNA, 1969 bp, Zea Mays
cttcttccagctacgagtctacgaccagttcggcagcacggcgagcatcccgtccgaccatccgctcgctcctcagagctagcctccaaactcgcaattatataactaccgtcccttgcaactttccagaccttttgcccccctgcttcctccgcctgcaccctctcacgagcgcccgcccgcccagatctagggttccatccgcgggcaagatgagcagcccccatggcggcctcgacgaccagatcgagcggctcatgcagtgcaagccgctcgctgagcccgaggtaagggctctgtgtgagaaggcaaaggagattctgatggaggaaagcaatgttcagcctgtaaagagtcctgttactatatgcggtgatattcatggacaatttcatgatcttgctgaactcttccgaattggtggaaagtgtccagatacgaactacctgtttatgggagattatgttgaccgtggttactactctgtcgaaactgtcacacttttggtgtctttaaaagttcgatatcctcagaggatcaccattctcagaggaaaccatgaaagccgacagattactcaagtttatgggttctatgacgaatgcttaaggaagtatggaaacgcaaatgtctggaaaacatttacagatctatttgattacttccccttgactgcattggtcgagtcagaaatattttgtttgcatggtggattatcgccatccattgagaccctcgacaacatccgcaacttcgaccgtgtccaagaagttcctcatgaaggtccaatgtgtgatcttctgtggtctgatccagatgatcgatgtggttggggtatttctccacgtggtgctgggtatacctttggacaggatatatcagagcagttcaaccataccaatagcctaaggcttattgctagagctcaccaattggttatggagggtttcaattgggctcatgagcaaaaggtcgtgactatatttagtgcacctaattattgctaccgctgtgggaacatggcatcaatcctagaagtggatgattgcagggaacatactttcatccagttcgagccagccccgagaaggggagagccagatgtaacccgtaggacacctgactattttctgtgatgcaaaagtgacgtggatctgcagcaaaggtttgatagataggcgcagtttcctggttgcagatatatatatatctatatatattggctggagttcctccgcgtgctattcttatattatttctcgcccatggcgctcttggctgtcgccggctgctttgctgcatcgtggttcaagtgtataccctactacagctggaaggactggatcgtgctcttacctgtctctaactggttgattggcttagggtgggctgcggtggtgtgtgtgtgtgtgggggggttcaagcatcaggcagccatctgtattatgggaggaaagtgttcccgttgtattcattttgttcccctttcttcctcatctgattttcttctcttttttttatttcttccttctctgtgattcttgtagagttcagcacttgtatggttctatgttgggccattagttttttttaactctctttctctgactgcctcgatttgccgtatagaattacatttctaagcgcaactagccaacctgtagcattttctgtcatcagcatttgaagttttgaactgagccctggtcgtgtccctgaggtctgatgtgctcttggtgtactactcgtatttgctaattggaaaggatcttttgtgggtttactagcgtttggcactaacgcccacgctagaatgttttgacgttgtccatgtgacctggatggaagctgtgatccgtgattggctttcgtgttacctggttgcccttgcccgtctgaggccggcgtctgtacagcctgtggtctgtgccagtattttactgttgcctttttgaaaagaaaaaaaaaa

SEQ ID NO: 90951 - DNA, 516 bp, Zea Mays
atgtataaccgaggctttttttcacgttacaatacatgcatcaaatattgcctttgtggtacaaccgagcacattgtagtattgtatggtttagggccgggccgtcggtcaatcttcgctcttgggcctctcctcttctttcttctcaaagaacccctgcgccctagcccagcgcgacagctggtagagctgaacgcactcgttgcagctgtgggttaccatgaggaaatagttccgaggtcgcaccatccacgcgaacctgacgaagagcgcagagtacacgcacaacactcctgtcatgttgccggatatcatctcaggaggctttttcgtgtctgccacgctcgcgaggatgatgccccagttggagacgggtccccagaagtgggtcgtcttggggcccactgggctattcaggaacgccttgaacgccgccgacatggctggcggcgagcccggcgacgaggaagaaggctgggtaaggtacgattccgcggagtggttggagtagagtga

SEQ ID NO: 90952 - DNA, 1938 bp, Zea Mays
ttctaccattgccaagcgacgagtgctgatcacctgatccaacagctaccggcccacaggagcgggcgtccccgcgacgccacgactcccgccaaaccatagccacgagttccctgctcccccggcccccgctaccccgccaatcctgtcccgggtttctgccgccggccgccatcacgcgatggatcccctctccctcctgcagctccctcgcgcctcgcgcccaccgatgcccctggccgcggccgccgcgccattggtctccgcgaggctaagcgtaagcggcggcgcgcgctccgttcggaggcggcgacggcgccgcgccgctgggctgtcggtgttcgccgtggcgaccgagacgccgcggaccgaggagcagcagccgtcgccgtccggggaggagcggttcgactggctggaccagtggtacccgctggcgcccgtgtgcgacctcgacccgcgcgcgccgcacggcaagacggtgctggggctcagcgtcgtggcctggtacgaccgcggcgccggcgagtggcgcgtcttcgacgacgcctgcccgcaccgcctcgcgccgctctccgagggccggatcgacgacagggggcgcctccagtgcgtgtaccacggctggtgcttcgacggcgccggcgcctgcaagttcatcccccaggcacccgccctcggcccgccggtgcacacgagcagcagggcgtgcgtggcgtcgtacccctgcgtggtgcagaacaacatcctgtggttctacccgagggctgaccccgagcatagcgacgtgctgcagaggaagcgcccgccgctcatccctgagattgacgacccggacttcgtcaccgtctatggcatcagagacctcccttacgggtatgatattttggttgagaacctcatggaccctgctcatgtcccgtatgcacacaaggggatcatgcgtggcattcgcaagaaggaagatcctggaagagtcgactacgataaagagggcggcggtccagtcaagatgaagatcgagcaggcaaacatagaagggtttgtgtcaccgcaagagcggggctacttccagttcgtcgcgccctgcacgttcttcggcacgccgtttgtgcaggagggccagaagaagaaggcgcctcgggtcatgctggtgttcttctgcatcccggtcggtcctggcaggagcagggtgatctgggcgttcccgaggaacgtcggggtctggctccaccatatcacgccacggtggctgtaccacgtcggccagaaccttatattggattcagacattttcctcctccacgttgaggagcgtaaatttgctgcggcagggctggataactggcagagagcttgttacgtgccgacgtcgtcggacgccatggtggtcgccttcaggaactggttcagaaaattctgcaagaaccaggtcggctgggcaaccttacaagtcgaccagctgccaccaacgcgtaccaaggaccagctcatggagaggtactggtcgcacgtggtgcagtgcaggagctgcaacgcggcgctcaaggccatgaaggcgctcgaggctgccctgcaggtggcctcggtcgccgtcgtcgggttccttgccgtcgctaagggaacggtcctcacgtcaactgttcagagggccgcagtcgtgtcggcgaccgtgctgtgcttcgctgcctcccgttggcttgccaacttcatccagaagaatttctactttcaagactacatccatgcctacaagtgacacgctcatgaatacgtttttaaaggtttttgttgctaggagattgttgtttttactgtgaatgcatattattaggagaattgggtgggtagaaagcagtatctatactgcattaacttgtatataataatgcatataatcgataataaaacggaagacacgcggcttcagttgtgttt

SEQ ID NO: 90953 - DNA, 1932 bp, Zea Mays
ttctaccattgccaagcgacgagtgctgatcacctgatccaacagctaccggcccacaggagcgggcgtccccgcgacgccacgactcccgccaaaccatagccacgagttccctgctcccccggcccccgctaccccgccaatcctgtcccgggtttctgccgccggccgccatcacgcgatggatcccctctccctcctgcagctccctcgcgcctcgcgcccaccgatgcccctggccgcggccgccgcgccattggtctccgcgaggctaagcgtaagcggcggcgcgcgctccgttcggaggcggcgacggcgccgcgccgctgggctgtcggtgttcgccgtggcgaccgagacgccgcggaccgaggagcagcagccgtcgccgtccggggaggagcggttcgactggctggaccagtggtacccgctggcgcccgtgtgcgacctcgacccgcgcgcgccgcacggcaagacggtgctggggctcagcgtcgtggcctggtacgaccgcggcgccggcgagtggcgcgtcttcgacgacgcctgcccgcaccgcctcgcgccgctctccgagggccggatcgacgacagggggcgcctccagtgcgtgtaccacggctggtgcttcgacggcgccggcgcctgcaagttcatcccccaggcacccgccctcggcccgccggtgcacacgagcagcagggcgtgcgtggcgtcgtacccctgcgtggtgcagaacaacatcctgtggttctacccgagggctgaccccgagcatagcgacgtgctgcagaggaagcgcccgccgctcatccctgagattgacgacccggacttcgtcaccgtctatggcatcagagacctcccttacgggtatgatattttggttgagaacctcatggaccctgctcatgtcccgtatgcacacaaggggatcatgcgtggcattcgcaagaaggaagatcctggaagagtcgactacgataaagagggcggcggtccagtcaagatgaagatcgagcaggcaaacatagaagggtttgtgtcaccgcaagagcggggctacttccagttcgtcgcgccctgcacgttcttcggcacgccgtttgtgcaggagaagaagaaggcgcctcgggtcatgctggtgttcttctgcatcccggtcggtcctggcaggagcagggtgatctgggcgttcccgaggaacgtcggggtctggctccaccatatcacgccacggtggctgtaccacgtcggccagaaccttatattggattcagacattttcctcctccacgttgaggagcgtaaatttgctgcggcagggctggataactggcagagagcttgttacgtgccgacgtcgtcggacgccatggtggtcgccttcaggaactggttcagaaaattctgcaagaaccaggtcggctgggcaaccttacaagtcgaccagctgccaccaacgcgtaccaaggaccagctcatggagaggtactggtcgcacgtggtgcagtgcaggagctgcaacgcggcgctcaaggccatgaaggcgctcgaggctgccctgcaggtggcctcggtcgccgtcgtcgggttccttgccgtcgctaagggaacggtcctcacgtcaactgttcagagggccgcagtcgtgtcggcgaccgtgctgtgcttcgctgcctcccgttggcttgccaacttcatccagaagaatttctactttcaagactacatccatgcctacaagtgacacgctcatgaatacgtttttaaaggtttttgttgctaggagattgttgtttttactgtgaatgcatattattaggagaattgggtgggtagaaagcagtatctatactgcattaacttgtatataataatgcatataatcgataataaaacggaagacacgcggcttcagttgtgttt

SEQ ID NO: 90954 - DNA, 904 bp, Zea Mays
agcctgttttcaagatatggagtccgtggtttcccagccattcttcttgtaaatgagactacgatggttcgatatcggggttcaaaagatcttaactctctggtcgatttctataaagaaactacaggtctcgatccaattgcatatattgatgttgttgaacaagagagcacaggaagcttgagctcagttatgccatgggatcgttctattcgtgaaatggccaaagatgagatgtatttgttagttgcagttctttttattatcgtgaaggttgtagcacacttcatacctgttgtcatgtctcatctgagagctttcttagttgttcgtgtccaaaacttgaacctagggatccgtaggggatcaaaccagctcctggaacgagccttgaatgttcttgatgtaaggaggctttggagcaagctgaggctgagcaataaggcaacagacttgaggaagggagcaaataatgctcgagcgtgggcttcctcatttccttctgtttcactgggtgaaccgtcatcttcaagacaagcttagccatcttagagatgtttgttagggtagctgctcacatgtttctgtgcaaaaccatttaatctttgctccccactgtttctgtgcagtcaggaagggggggaaaccttgcatgcatgtaaattttgaggaaatcatgtgctgttgtatattaggaatacctttgcatttgctggtgcctaatctttctgtctattaaccagagttatttggcaatgtatcatgaacatctttgtaggggttttttaggatttctctcttgtttgtggtgttgttttactttacactgtaatcttcattaaagaacttggtttcacttcgttattatactccaatttgaagagcttgaagcttagtccctaca

SEQ ID NO: 90955 - DNA, 1262 bp, Zea Mays
gaaggaagcaaagtatccttccactcctcgttttgattcctgggaagcatgaagcatccattcttgaccactctaggtatcatcgctgcaagcgaacgtcctactatatagatccctcatccaaactcaactcgcacatgagcacgagagcagagcgcgtccggccgtttccatggacaccatcagccttgacgactgggaggtcctgcctggccacaggagctccttcctcatggacgcggcggagtgcaggcatggcgtcggcggctgtgttaaggaccagctctggctcggggccgagctggtcgtgatcgacatggaccacttcggccctacgtcgtcgtcgtcgtctcactctcaccctcctccctgtgaccactgcgtcctagacgaggaagccaagcagaaaccgctcctgctaccaccgtcagaagacgcctatgcgtgtgaatgtgatggtgatcgtcgcatcgccattgacgccgtgccggacgaaccagagcgagcggaccttgtgagcgaggcgaccgaggtactgatctacgaagcggacgaggaggagatggctaagtccgtcgaagaggccgatcaggacgacgacgcgctgctggttggagctgctgcgcctgatggcggcggcgtcagtctcagtcagtgcactccggaggaggaggaggaggagggcgtcggcaaggctggctttggcgtggggagcctgagactgagagtgaacggtgctggtggcgcgctctgctcgttcggggttgcagttgcagccgccacgttctgcttctgcgtcttcctgattggtggcggtggtggcaagcagcagcagcagcagcaactgctgcgcaaggggcaggatccagctccagcagatgtatgcccgcgatgaggttcgtggctctcttccctcgtgtgaaacacgttacttggtctgggtgcagggaaagagagcgtggaagatgttttccgtagaacatgttagctgttggttgttacagatgaagcgtccgaattgaatttgtgtatacgtgcgcgaagtgagcctttgtacatatgataggttctcgtaggcatgttcttgattgagatattgctaatgcattcaagtttccctttcgagggcttcagatcatatttggcgactattttaaaattaaatagcaaaggattttttccaaatcccttgtcagggtttttgtcagtgcgtggccgagtgttcatcgctggatgtctgtcggtcggtcggttagcacagc

SEQ ID NO: 90956 - DNA, 126 bp, Zea Mays
agttggggtgtgcttcttaagctagaggaactaagcaggctggagaagatcatggagctggtgaaacgctggttgcaaaaatttcagccaacagtggggaaggggatagacatcgtagtgctctga

SEQ ID NO: 90957 - DNA, 244 bp, Zea Mays
cacaggagtaggtcttgcagagctgatgcgccagccaagcaccaagcactacactcctcaatcacagcactcaatcacagcacgcataacttgctgggggcaggggacaatacacttaaagacacaagcatttcggtgtttccaaatctcccaagcaaccaaaatgagaggaaccaacgaggaagaccaagaggtcctcccaagtacagatcaaaacactataggaccaaccagaaaaacaaaa

SEQ ID NO: 90958 - DNA, 2498 bp, Zea Mays
gcccagcaggaggcgagagcggggctggaggcgggcgagagcgacccggcgggcgctactgctaccgcccggcgataggcaggcgagagcgggacgacgcgttggcgatggcgtcttcgcgggcgagagcgaggggcgacagtgagtggcggcttctgattggtctacgtgtgctatagcctgaggctgtagcctgctgcagcctgtgcactggagcagcaggggcgagagtgaagacgagagctgacgtggcaggggcgagagagaggcggtgcactggactcagcctcacagtgacagtggcggcgatggaggcagtcacagaaagagaggagcggcgagccagcggctgcagctcttcctcctcctgccggcctgcctgagctgcttagatgccctccatctcatctccaatcctccatctccgtctacatccccatgagcatgagctgacgaagtgaagtgagttggctgccagcgcgtgctgtatcttgtatggctgtactgtatcccctcctctcgcccacaaaattttgtctccttccctccccacgtttccacccctcctcccaccactacttctgagctccctgcggctgcggctgcggcttggtgcttgcttccctcatctctagcctgtacactggttgcggttggagtggttgccagtgtcctcaccacttgctcctctcgatccactcccccacggacatgagcgtgcaaccatacatctaccggtgattgcttccttcttctgccctgaagctgaaaactcggcctgccgcgcctagcctgaccttgccttgcctgggggaaaaacttctgttttgctgctaccgctgctgtggtataaaagtggagtcccagcggagggaagattgctccgtcgccgcggtttcgcttcgcggcgggaaggggccgtgaaggaatcttgcaccgagattaatccctcctctgcccctccatttccggccggctgtcggtgctgccttccgcagcaaaaggtgggatctcgcgtccgccggcggtggcattgccggatcgagatatctccagcggcggcctgcgtatctccgtggccgatctgcgctgcggcttccccgggcggtgcggactgctgcggtgaggagcgttgctctgcgctgtggtccaagcgagggggcgggggggactgcacgccaggtgttcgacgaagaacccggcccgaggcagccatgagggacttcccttcctgcttcggcgagagcggcgtccagatcgcggacgcgtcgtcttcgtcgtcgtccagcgccggcaagggcgcggcgcagaacctggtgacctgcctctaccagacgcacttctcaggcaggccctgcgtgatctcgctcacgtggagcaagagcctgatggggcagggcctcagcgtcggcgtcgacgacctgtcgtccggccactgcctgtgcaaggcggacatcaagccgtggctcttctccaagaagaaggggtccaggagcctcgacgtcgaggacggcaaggtcgagatcttctgggacctgtcgggcgccaggttcggcgccgggccagagcccgtggaggggttctatgtcgcagtggtgttcgacctcgagctcgcgctcctgctcggcgacatgaagaaggatgcctacaggaagaccggagccagccagtcgacgctgaatgccgccgcgttcgtggcgaggagggagcacatatatggcaagaagatctactctgccaaggcgcagttctgcgacaacggccagttccacgacatcgccatagagtgcgataccgtcggcttcaaggatccgtgtctcgagatacgagtcgataagaagcccgtgatgcaggtgaagcgcctggcgtggaagttcaggggaaaccaggcgattctcgtggatggcttgcccgtggaggtgttttgggatgttcacagttggctctttgggtcaacggcaagcaacgcggtgttcatgttccagacacgccaggcccctgagaagtcgctgccatggtcctactcgcagaattttagggagtcccagctgcaaggccttggtttctcccttatcctgcatgcgtggaaggttgaatagtctgttcttcttcttcttcttttgcaggatcacaatttgcttctgcacctgcctcattttctttgctttgctgctaacaaaaaaaaagacgttttgttgagtgtctgttcatcagaatgctatggaggctctccaatatatgtctttctgttttgtttttgttttgccatctcttataaacgctttggtttgatagctggcaagctatgtgatgttccagtggattttccactctgttccttctcacccttcttcttgtgtcttgggtgaggataatcctgatgatcaagtagtccaacggtggcaatgctgtagaaagagaatgttgttgtcattatgtaaagtatatcaaacctccgattattcgtcggcgatagttacgcccaacggcttgagttc

SEQ ID NO: 90959 - DNA, 2720 bp, Zea Mays
ctcgattggtttgcctaaccttttgaagcttatgcgattgtggggtctccggtaagtgcggacaaatgcatggccgcctccggatggcgacctttgagaagaaccccacccactgatggttgttattgtctgctgatcgctaccctgactgtgagttcgtttgttttcctgttgaagtcgtttgactgcaatgcgaactctttagttcaggcaattgttcttggttctctgcacccgctgagttttggccgtatgggcgcctaagtatactacctttaaaatttctttccttcctaattaaaaaaagacagctttttttaaagcaaactacatctaaggccctaagcttgtaaatttgtattggcttgatctctaaactcttaacatgttggatcttttatgggcttggtctatttattgaataaactctatggtgtgtaatgatggagaataccaatagtaccacattggaagtccaagggtcctttgccttgacttatatggtgggatttattccacttaacttgagaagtcaagaaatggacaagggcgtgccacacgcgcgcgcgcgccgccgccgccgccggccgggcgtggcgaggcaggcaggcgtggttgtgttaatttttagcactcactaaccgcgtacgtcagccgagtgaccctgtctcttcgtctgccgagtgaccctgtctcttcgtcagccagccgagtgacccttctccttcagctgccgatttatgacgtgactcggcgagagctggccgactcatggcataactcggctagagctggccgactcttggcgttactcgtcgacctttctccttcagcttccctctgcgagaggttaaatagaggagcaccactgtcactcggtacacgcaagaaaacactttcagaacacagtccagcagccgagtgagggtatttccatctcgtgactctgcgcgcacagagaagcgagagggcaggtgcctccggagcccttgccgttcgagaccttgcacgagtgatcggcaattaggtttttagggagcgtctacgcgactgcccaaagtcttcttcctgctgacatgacaagtgaagtcggacaaggatctagatcctcggagcgcatggcagggtatgatcaattcatctccttactgtttttcattctgcaaattatatatgttcatacctgctgttttatttatagccataaatttatccaatctgttttgtcgtattatatcatgacgtgtctgatgcctgatcatactagtaatatgataaatctgtttgtcttaattttacagtcatgttgtttatgttgctatctgtctattttcagttgttccataataatacatgttccatgcttatttgcttattatatttatatgattcatatgtttcatgttctcttgatccatattgttatggatatatttgagataatgatttctatgattgaacatattttatatgtcatcatcataatgctaatttatggaattaaaataatacggaaaatgtctatatttctaacattccaaaaacctaatgttaggcatttttctgtcagaggttttgctgctgtgctaaagcctgatccttttgatggtaaaaacttcttgatatggaaagctaaaatggaattgtggctaactgcaatgtcttgttttcatgccgctgagggcaagcctgcaaacttacctcctgaggatgaggctaagtttaaggctgaagacaaactctttcgaggagcagtaattagcgcactggatactaaattccagaaaagctatatcatccttcccacagggaaagagttgtgggatgcacttgtcggaaagtttggagtaactgacgccggtagcgagctgtatctcatggagcagctgtatgactacaaaatggttgagaaccgatctgtagtggaacaggctcatgagtttcaggcactagctaaggaactcgaactttttccttgtcctttgcctgacaagtttgtggttggcggtataatcgccaagttgccaccttcttggaaggactttgctacctctcttaaacataagagacaagagttcaatgtggaagagctcattggtactcttgatgttgaggaaagggctagaactaaggacaatggaaaaggtgtggagacctctactgctaatgtggtgcagaagagaaacttctgcaagtttaacaagaagaaaaactagaacaaaccagagaacacaaataaacttgttcaaccagcacagtttaaaaagaagaacaacaataacaagggaaagggaggatgctttgtctgtggcagtgatcaacattgggcaagagagtgccctgatcgcaagttcactcaagacaagaaatcagctcatgttgtaaccactgaaactgaaggaggaacatctgggtcgggaggtctggcgccttgttgatgggtaatgggtcgcgtgctcatgttcttggtgttggtacggccattctgaaatttacttcgggaaagacggtgccattgaagagcgtgcagcatgtgccctctatcaagaagattctagttagcgcttttatgctatgtcgagatggatacaaagttgttcttgagtataataaatgtgttgtgtcgaaacatggtacttttgttggtaaaggatatgactgcggaggcttgttccgcttatcactgcatgatgtgtgtaataaactggtgaattctgttc

SEQ ID NO: 90960 - DNA, 780 bp, Zea Mays
cgacaccgcgtccacgtacgcccacgaccgctcctcctcttctctgccccaggccagaatcaagggagggtgaagcaccgccgccgtctccgctgccgcacaaagacgagaggaagaggttcccggcgcctccaccaccatgtcgtcgatgatgaacgcgctggcgaactggctggcgaacccgcgccgcaacccgctggcgcgcctccacatgcacgccgtctcctcgcgcctcaggaaatacggactgaggtacgacgacctctacgacccctacttcgatctggacatcaaggaggcgctcggtaggctgcctagggaggtggtcgacgcccgcatccagcgcctcaagcgtgccatggacctctccatgaagcaccagtacctcccggaggacctccaggcacagcaggttccattcagaggatatttgggtgacatgttggcgttggtgaaaaaggaaagcgccgagcgtcagtcactgggagcccttccactataccagaggacacttccctagggtgttggatagacatggtcgcaagtattctacctctttaccgcaaatcagaacgcatcaaataaaatgcagtggatgaaactgttttttttttgttccaaccaaagtctaattttacttgttcatgccatggtgcattaaccatgggctgtagctgttgttttcagcaaatttgtcttcaaccattattaacctgtgaaatcttcgatcgtgagtgccgttatgacaccgggtgaccggaaatgtcttgactaatgtcg

SEQ ID NO: 90961 - DNA, 882 bp, Zea Mays
gcatttaagtaggggtaggcatggaagaatgaggggaaaatgtgcgttggaatgaatttggcattggagggagcattaagcaattctacttgaggttattggttaatcattatcatatcacgtggcatccaatgttaatgttcatcttggggtccagatgtcatgacttatttttgtgtgtgtccatggccttcacttctcttactgttattttcttaggttttctctccttttcatggtcattatcgagttgatgctagtttactgtctgaaaccaatattcagtgcaagataggaattatagcttttaaaatttattgaataacttattatatatggtgcatgactaatattatgtacaataaccattctgtaaacatcattgcagcttaacatgatatttgttgtgactcgaggagtagaattttaactgcagacatgcgattggatgtgtcactgcttaagaaattccttagctcaaactgttgattagcaccatgctgcaaagttcttgatttagacttgtggctattgtttgatatctcacatctcttgcaggtgaaaaaggaaagcgccgagcgtcagtcactgggagcccttccactataccagaggacacttccctagggtgttggatagacatggtcgcaagtattctacctctttaccgcaaatcagaacgcatcaaataaaatgcagtggatgaaactgttttttttttgttccaaccaaagtctaattttacttgttcatgccatggtgcattaaccatgggctgtagctgttgttttcagcaaatttgtcttcaaccattattaacctgtgaaatcttcgatcgtgagtgccgttatgacaccgggtgaccggaaatgtcttgactaa

SEQ ID NO: 90962 - DNA, 1031 bp, Zea Mays
ctgtctccgtccggttgtagcgaagtccgacggcgggatccgattgtggcgaagtcacgcccgtgcagtgcgcccacagcaaaaagctccgcggcggtcgcgtgacgtcgcggcaaacggcaaacagcgaattcacagcagcaaacagtgtgaatcctgcaatctccaaacccaagcccggcggcgagatccgcgcggcaggcggacggggccgctcgaccgccttcgtgccgtgcgcgcctccccacctcttccgttctccgctccccgcgcccgcgaaggcgaattgctgaattgagggtggtggctcgtgcttgattttgattttgggggtcggtttcagttccaattcatgacggtgcggccggggtgggtggtgagggtggcgcatggctcggcggcggcgtggcagcgcgtggcgtgcaacccggagacgctcccgcctgaccgcgtcctcgcgctcatctgctgcgcgccactccacctcctcgcgcgcctcgccgccttcctctgcgtccccttcctccccgggcccgcacacaccccgctccgcctccaccgccgccgcttcctcgtcctccgccccccggagtttgcgccgcaccctttcgcttactccccctcgtcttcctcttcttcgtcggatgaggaagaggacgacgacgatggggacggcatccacgaacacgtcgattgaggttgcttgaggttaaggctcagaaaaggagaatttggggttgaggagggaagaatgaacattggcatgttgtgctggatgctgaactgctcgcccttctatgattctatctcgtagttctcaggatatggcattatgacgacgctcattataaaaagccaggtcagaagctctgcaaaaaggataccaacggatgaaactggtttgagttgtcattattgttgctgttgtttaaacgaactactgatttttttttttatattgaaaagaagaaagtggatgaggttaaaccttggtaaagaggatggttgtgttagacttggcgagtcaacgt

SEQ ID NO: 90963 - DNA, 2095 bp, Zea Mays
accggtatctccagcggctcggctgacggccctccactgtagtctctcgatcgagctcggctcggtcctcccctgcgaggttccccgtcttcgtccgcgctgcaatccaacctggcgccgccgaacccttctctcgcccggtgctgccgaagccgaacccttctctcgcccggcctgccgtagtcctccactccgccggatcctctctcagctcgagcggtcttggagatccgtccgtcccgggatcatttggcgcggaggtttggcctgggaaaatggcaaacatacgtgcacttctggtcggcttatcgcgggcaaggggatccttagcagaggctggacgatgtgcttccacgaggccatcaattctagcatctctgggcgcacattacaagatccccatgccagcccgctggttctcatctacagggcttcctccacatctggtggtcggaatgccagcactatctcctactatgaatcaaggtaacatcgcgaaatggagaaaacaggaaggggacaagatagaggttggtgatgtgatatgtgagatagaaactgataaagccactcttgagtttgaaagccttgaagaggggtatttggccaagattttagcacctgaaggttctaaagatgttcaagttggacaacccattgctgttacggttgaagacgttgaggatattaagagtataccagctgatacatctttcggtggtgaacaaaaggaagagcaatcaacagaaagtgcaccgcaaaacaaagtagttaatgtgtctgaacaaagctcaacagtgagccggatcagcccggcagctaaattactgatcaaggaacatggactggatacatcatcactgagagcatcaggcccccgtggcacccttctgaaaggggatgttctggcagcattgaagtcaggtatcaattcaagttcaaccaaagaaaagaagtctccagctcaaccttcgtctcagccaactcgagattcccaatctcaagcatcctctatttcacaaaaggatgatacatatgaagatattccgaatagtcagatacgcaaggtcattgccaaaaggttgctcgaatcaaaacagacgactccacatttgtatctatccaaagatgttgtgctggatcccttgctcgctttcaggaatgaactaaaagagctacatggcattaaagtttcagtaaatgacatcatcataaaggctgtggcaattgcgttgcggaacgtccctgaagcaaatgcttactggaacaatgataaggaagaaactcaaaagtgcgattcagttgatatatctattgctgttgctacagagaagggcctgatgaccccaataataaggaatgcggatcaaaagactatatctgcaatatccgcagaggttaagcagctggctgaaaaggcaagagctgggaagcttgcacctaacgaatttcaagggggaactttcagtatctcgaatcttgggatgtaccctgtggaccatttctgtgcaatcattaaccctccacagtctggcattctcgcagtgggtagaggaaacaaggttgttgaacctgttgtggacagcgatggaaccgagaaggctgctgcagttacaaagatgagcctgacactatctgctgaccatcgtgtatttgatgggcaagtaggaggcaagtttttcacggagctggcgctgaatttcagcgacatcaggaggctgctattgtaaatgaaaggaggcaattaccgtgttttgacgtattctttgggagcgaaaaccgctcaggaaaagagaacatttggatgcaacccgtggtctgctgcttgatcggcatcccgtacaaaagtaaccaattttgtaataaatttataataagaatgcactggcaccttcacggttttttaacccgttttccattagttgggaggaggcatgtcctgagaatttagcaggtacggtgccattcaacttcgtggttccgcaacaatgaccacccttagattatgcaatctgagcggttctggatggacgcccattttgttgatgaccttgtgatacatggaagtaataacagaatgcttttgttacatttc

SEQ ID NO: 90964 - DNA, 219 bp, Zea Mays
atgaagctgagcttgcgacatacaaccaccttgtgcaatgcaagagttctcagcgtcgacgacggtcggatgcgccacctaagcaaatacgtccaagaaacctgggtgatgctgatggtcatcaaagaatttggcttgattatttcgctgatcagcctgtgtttaatgacaggcaattccgagaaaggtttcgcatgcggaggcatgtggtgttacgca

SEQ ID NO: 90965 - DNA, 1518 bp, Zea Mays
ctcaagtcaggcacggtgacttgacgaggcccatctaagcacactacagcaccgggcgaggcggctaggccccctcaccgtccaccggcgactgggccggccgtcgctgccgccctgcctctccaccgtcgccggcgacgagcaccactaggtatgccctccccttggtctccctttcctgctgtgcggagccgtgcgcggtgcgcccaaaccttaacgtgatccgtagggacgccctctccttagtcttcccttacctgatgtgcgaaaccgtgcgcccaaaccctaacatactatctgtattcggatctgaaggtgtttttgagtctgttgcgagtgttgtggccatgtccatgttcaataggatcttcgggaagcccaaggagcaggccaactccaatgctttggccactctggacaagttaaatgagacacttgatatgctggagaagaaagaaaaggtgctggagaaaaaagcaaacgctgagcttgagagagccaaggagttctcgaaagcaaagaataaaagagcggctatccaatccttgaagaggaaaaaactttatgagcaacaaattgagcagcttggaaattttcagttgagaatccatgatcagatgatcatgttagaagcagctaaagctacaacagagactgttgatgcattgagaactggagctgcagctatgaaagcaatgcaaaaagcaacaaacattgatgatgtcgacaagaccatggatgaaattaacgaacagactgaaaacatgaaacaaattcaggatgctttgtcagctcctcttggagcttttgctgatttcgacgaggatgaactggaagctgaacttgaagaactggagggagcagagttggaatctcagcttcttgagcctgttgcagctcctccggtgcatccagtgcatgtcccagccaacaagcaaccagctcgccctgccccacagaaagttacagctgaagatgatgaacttgctgcactgcaagcggaaatggcattgtgatcaggaacttgcaggttctcatggagaggtgaaacatgtaaatgaagatgaaagctgagtcagctatactatatatttgccatgcgtgtacaaacttggccggatatttggcaaccgcagcagaaaaaagaggctgctccagcccagtgcttgtttcagtgactttggaatctgttgtcgatcgatgacagttcttctgttaatgtcgctcggttagctctacgctaattattcagatcacccaacgtgcattgtttcagtgttttgcttaattggcccatactgtctggagccgtgcatgtaaaagtgttgcagggttcacgtttgatgtggctgttcgcagcgctttcaacctcaggcaagatatgtttccttttatcagtactagagcaagactaataatacagtaggctactggctaaggatctttgtagtctctctcaacttactcgtatagcagttagctattcactgttaatatatggtctatttgtctcttata

SEQ ID NO: 90966 - DNA, 1433 bp, Zea Mays
ctcaagtcaggcacggtgacttgacgaggcccatctaagcacactacagcaccgggcgaggcggctaggccccctcaccgtccaccggcgactgggccggccgtcgctgccgccctgcctctccaccgtcgccggcgacgagcaccactaggtgtttttgagtctgttgcgagtgttgtggccatgtccatgttcaataggatcttcgggaagcccaaggagcaggccaactccaatgctttggccactctggacaagttaaatgagacacttgatatgctggagaagaaagaaaaggtgctggagaaaaaagcaaacgctgagcttgagagagccaaggagttctcgaaagcaaagaataaaagagcggctatccaatccttgaagaggaaaaaactttatgagcaacaaattgagcagcttggaaattttcagttgagaatccatgatcagatgatcatgttagaagcagctaaagctacaacagagactgttgatgcattgagaactggagctgcagctatgaaagcaatgcaaaaagcaacaaacattgatgatgtcgacaagaccatggatgaaattaacgaacagactgaaaacatgaaacaaattcaggatgctttgtcagctcctcttggagcttttgctgatttcgacgaggatgaactggaagctgaacttgaagaactggagggagcagagttggaatctcagcttcttgagcctgttgcagctcctccggtgcatccagtgcatgtcccagccaacaagcaaccagctcgccctgccccacagaaagttacagctgaagatgatgaacttgctgcactgcaagcggaaatggcattgtgatcaggttctcatggagaggtgaaacatgtaaatgaagatgaaagctgagtcagctatactatatatttgccatgcgtgtacaaacttggccggatatttggcaaccgcagcagaaaaaagaggctgctccagcccagtgcttgtttcagtgactttggaatctgttgtcgatcgatgacagttcttctgttaatgtcgctcggttagctctacgctaattattcagatcacccaacgtgcattgtttcagtgttttgcttaattggcccatactgtctggagccgtgcatgtaaaagtgttgcagggttcacgtttgatgtggctgttcgcagcgctttcaacctcaggcaagatatgtttccttttatcagtactagagcaagactaataatacagtaggctactggctaaggatctttgtagtctctctcaacttactcgtatagcagttagctattcactgttaatatatggtctatttgtctcttataaagtttttacttatttattttacatgtaagtctacaactttttttttattctcttccatcttagcatttagtttgtttacagtctgtta

SEQ ID NO: 90967 - DNA, 1431 bp, Zea Mays
acggtgacttgacgaggcccatctaagcacactacagcaccgggcgaggcggctaggccccctcaccgtccaccggcgactgggccggccgtcgctgccgccctgcctctccaccgtcgccggcgacgagcaccactaggtgtttttgagtctgttgcgagtgttgtggccatgtccatgttcaataggatcttcgggaagcccaaggagcaggccaactccaatgctttggccactctggacaagttaaatgagacacttgatatgctggagaagaaagaaaaggtgctggagaaaaaagcaaacgctgagcttgagagagccaaggagttctcgaaagcaaagaataaaagagcggctatccaatccttgaagaggaaaaaactttatgagcaacaaattgagcagcttggaaattttcagttgagaatccatgatcagatgatcatgttagaagcagctaaagctacaacagagactgttgatgcattgagaactggagctgcagctatgaaagcaatgcaaaaagcaacaaacattgatgatgtcgacaagaccatggatgaaattaacgaacagactgaaaacatgaaacaaattcaggatgctttgtcagctcctcttggagcttttgctgatttcgacgaggatgaactggaagctgaacttgaagaactggagggagcagagttggaatctcagcttcttgagcctgttgcagctcctccggtgcatccagtgcatgtcccagccaacaagcaaccagctcgccctgccccacagaaagttacagctgaagatgatgaacttgctgcactgcaagcggaaatggcattgtgatcaggaacttgcaggttctcatggagaggtgaaacatgtaaatgaagatgaaagctgagtcagctatactatatatttgccatgcgtgtacaaacttggccggatatttggcaaccgcagcagaaaaaagaggctgctccagcccagtgcttgtttcagtgactttggaatctgttgtcgatcgatgacagttcttctgttaatgtcgctcggttagctctacgctaattattcagatcacccaacgtgcattgtttcagtgttttgcttaattggcccatactgtctggagccgtgcatgtaaaagtgttgcagggttcacgtttgatgtggctgttcgcagcgctttcaacctcaggcaagatatgtttccttttatcagtactagagcaagactaataatacagtaggctactggctaaggatctttgtagtctctctcaacttactcgtatagcagttagctattcactgttaatatatggtctatttgtctcttataaagtttttacttatttattttacatgtaagtctacaactttttttttattctcttccatcttagcatttagtttgtttacagtctgtta

SEQ ID NO: 90968 - DNA, 1511 bp, Zea Mays
acggtgacttgacgaggcccatctaagcacactacagcaccgggcgaggcggctaggccccctcaccgtccaccggcgactgggccggccgtcgctgccgccctgcctctccaccgtcgccggcgacgagcaccactagctgttgttttgcctcccaggtgtttttgagtctgttgcgagtgttgtggccatgtccatgttcaataggatcttcgggaagcccaaggagcaggccaactccaatgctttggccactctggacaagttaaatgagacacttgatatgctggagaagaaagaaaaggtgctggagaaaaaagcaaacgctgagcttgagagagccaaggagttctcgaaagcaaagaataaaagagcggctatccaatccttgaagaggaaaaaactttatgagcaacaaattgagcagcttggaaattttcagttgagaatccatgatcagatgatcatgttagaagcagctaaagctacaacagagactgttgatgcattgagaactggagctgcagctatgaaagcaatgcaaaaagcaacaaacattgatgatgtcgacaagaccatggatgaaattaacgaacagactgaaaacatgaaacaaattcaggatgctttgtcagctcctcttggagcttttgctgatttcgacgaggatgaactggaagctgaacttgaagaactggagggagcagagttggaatctcagcttcttgagcctgttgcagctcctccggtgcatccagtgcatgtcccagccaacaagcaaccagctcgccctgccccacagaaagttacagctgaagatgatgaacttgctgcactgcaagcggaaatggcattgtgatcaggttctcatggagaggtgaaacatgtaaatgaagatgaaagctgagtcagctatactatatatttgccatgcgtgtacaaacttggccggatatttggcaaccgcagcagaaaaaagaggctgctccagcccagtgcttgtttcagtgactttggaatctgttgtcgatcgatgacagttcttctgttaatgtcgctcggttagctctacgctaattattcagatcacccaacgtgcattgtttcagtgttttgcttaattggcccatactgtctggagccgtgcatgtaaaagtgttgcagggttcacgtttgatgtggctgttcgcagcgctttcaacctcaggcaagatatgtttccttttatcagtactagagcaagactaataatacagtaggctactggctaaggatctttgtagtctctctcaacttactcgtatagcagttagctattcactgttaatatatggtctatttgtctcttataaagtttttacttatttattttacatgtaagtctacaactttttttttattctcttccatcttagcatttagtttgtttacagtctgttattatagttgctctaaatgcagtgatgtatctctcaagaaaataaagttgtgagcctgtcctaaaataaaca

SEQ ID NO: 90969 - DNA, 1627 bp, Zea Mays
cgagctgcggaaacggcaaaagtggccgcgagacatcgctgtgcagtgcagtgcagcaagcggctagtggacgcacgcgccgctcccaaccgagacgacgagccgcccaaggcgacgagccattactcccgtttccccaaatcccaccacgcaggcagtcaggcacccgcattgtttcaaaaatctcgaatcggcccctggttctggcagcgcagccgccgccggcggacggagggccctctttccgggtgaggcaagtcgaggcctgctttgcctcgctgtaagctcgccggaagagggaaccggggaggggaaaagacgcgcggcagtggtggagtggaggtgccaaggctgagggaggcgcgccgccgcccatggacgccgcgcggtgggtcgtgtgcctgctcgtgacggtcatctgcttgtcgtgcgccgccgccgctaccgccgccgtgaggtcgccggcggcgaggctgcaccgccacctcaagcggctcaacaagccggccgtgaagagtatcgagagtccagacggggacatgatagactgcgtgcacatctcacaccagccagcgtttgatcacccatacctcaagaaccacacgatccagatgaggccgaactaccacccggaagggctgtacgaggaatccaaggcctccagcagcggtggcgagaggcctatggctcagctctggcatcagaacgggaggtgtcccgaaggtacggtccccatcaggagaacgaggaaggacgacctgctgagggcaagctcgatgcgtcggtacggcaggaagcgccgcgccgccgcgaacccgatgtccgtcagtcccaccatgctcaacgagggtgggcatcagcatgccatagcgtacgtccagggcgacaagtactacggcgccaaggcgactatcaatgtgtgggcgcccaagatcgaacagcccaacgagttcagcttgtcccagctctggatcttgggcggctcattcggggaggatctgaacagcatcgaggctggatggcaggttagccctgacctctacggggataacaacacgaggctcttcacgtactggacaagtgatgcgtaccaggcgacagggtgctacaacatgctgtgctcagggttcatccagatcaacaaccagatcgccatgggcgccagcatcttcccgacctcgagctactccggctcccagtatgatatcagcatactgatctggaaggaccccaaggagggcaactggtggatgcagttcggcaaggactacgtgctgggttactggccgtcgttcctcttctcgtacctggcggacagcgcgtcgatggtggagtggggcggggaggtggtgaactcgcaggcggacggcgtgcacacgtcgacgcagatgggcagcgggcacttccccgaggaagggttcggcagggcgagctacttcaagggggtgcaggtggtggacagcagcaacaacctcggggcgcccaggggcggcctgggcaccttcacggagcagtccagctgctacgacgtgcagagcggcagcaacgccgactggggcacctacttctactacggcgggcccgggaggagctccagctgccagtaactggtgggctctctagctag

SEQ ID NO: 90970 - DNA, 2840 bp, Zea Mays
cgagctgcggaaacggcaaaagtggccgcgagacatcgctgtgcagtgcagtgcagcaagcggctagtggacgcacgcgccgctcccaaccgagacgacgagccgcccaaggcgacgagccattactcccgtttccccaaatcccaccacgcaggcagtcaggcacccgcattgtttcaaaaatctcgaatcggcccctggttctggcagcgcagccgccgccggcggacggagggccctctttccgggtgaggcaagtcgaggcctgctttgcctcgctgtaagctcgccggaagagggaaccggggaggggaaaagacgcgcggcagtggtggagtggaggtgccaaggctgagggaggcgcgccgccgcccatggacgccgcgcggtgggtcgtgtgcctgctcgtgacggtcatctgcttgtcgtgcgccgccgccgctaccgccgccgtgaggtcgccggcggcgaggctgcaccgccacctcaagcggctcaacaagccggccgtgaagagtatcgagagtccagacggggacatgatagactgcgtgcacatctcacaccagccagcgtttgatcacccatacctcaagaaccacacgatccagatgaggccgaactaccacccggaagggctgtacgaggaatccaaggcctccagcagcggtggcgagaggcctatggctcagctctggcatcagaacgggaggtgtcccgaaggtacggtccccatcaggagaacgaggaaggacgacctgctgagggcaagctcgatgcgtcggtacggcaggaagcgccgcgccgccgcgaacccgatgtccgtcagtcccaccatgctcaacgagggtgggcatcagcatgccatagcgtacgtccagggcgacaagtactacggcgccaaggcgactatcaatgtgtgggcgcccaagatcgaacagcccaacgagttcagcttgtcccagctctggatcttgggcggctcattcggggaggatctgaacagcatcgaggctggatggcaggttagccctgacctctacggggataacaacacgaggctcttcacgtactggacaagtgatgcgtaccaggcgacagggtgctacaacatgctgtgctcagggttcatccagatcaacaaccagatcgccatgggcgccagcatcttcccgacctcgagctactccggctcccagtatgatatcagcatactgatctggaaggaccccaaggagggcaactggtggatgcagttcggcaaggactacgtgctgggttactggccgtcgttcctcttctcgtacctggcggacagcgcgtcgatggtggagtggggcggggaggtggtgaactcgcaggcggacggcgtgcacacgtcgacgcagatgggcagcgggcacttccccgaggaagggttcggcagggcgagctacttcaagggggtgcaggtggtggacagcagcaacaacctcggggcgcccaggggcggcctgggcaccttcacggagcagtccagctgctacgacgtgcagagcggcagcaacgccgactggggcacctacttctactacggcgggcccgggaggagctccagctgccagtaactggtgggctctctagctaggtagtgatgtgcgtgctgctggcttcacctttgtttgtggtagtttcttcttcttcttccgattagtcattagtgccgccgtgccgggatggcttctgaagagaagcatggcatgtggtggtggtggtgccctaccctacccttgttgtggtggcctgcctccttttcctatatggtagattcacttgttcgtccttgtggttaggactgggcatttttaacccgaaaaccgaacccgaaccgaacccgaacccgaatagaccgaataggtcggttttcggttttcgggttcgggtttcggttcatagatctcttctgttcgggtatcggtttagggttcggtttccagccagccaaacccgattagactcaaagaaccgaactatagtgatcctccctctgtccctcagcccaaaccgcgaaacctagtaacgggctaacggcccaactcaggcacaggcactccgcggtgacataggcgcagtccagtccgcacccgcaccgcacgcagcacgcacccgcaggccgcattgccgcaaccctagccgcatggcgcacgctggtccgccgccgcgccgtcgatccaccgctgctctgccgcacggagtcgcactggtcagccaccgcgccgtcgatccaccgctctgccgcctctgcgcgtcagccgcgctaggcgccaaccttccactccataccggtccaccggcgtcgatccaccgacgactccgtactcggtacttccaccgcatcgcggcaccggtccaccgctctggcgactcggtgttctgcacttctgctccgatttcggcgtcctgctccacggtgcccacgactcgctgcagaccgacccagcacgtaaggtgccgcggatcctggttgcgtccgaggagaggctgcgccggaacgcggagttcctgctcaacgaggtcgggctgccgccgcagtacatcgtccgccgttcggtgcttctcatgtacagcctcgagaggcggatagtgccccggcacctcgtgctgatggttctcaaagagaaggggttggttgagcaggaccggtgcttcttcaacgtggttctcaacgaggctgcacttctgtttgtgaattgtgatggattgatgatgaacctgttaagttatttcctgtggtgtatgaacttgcatgtagttggcattttctaagtcaatttgtcatgtatttgtatgcacttctatgc

SEQ ID NO: 90971 - DNA, 1734 bp, Zea Mays
gcattgtttcaaaaatctcgaatcggcccctggttctggcagcgcagccgccgccggcggacggagggccctctttccgggtgaggcaagtcgaggcctgctttgcctcgctgtaagctcgccggaagagggaaccggggaggggaaaagacgcgcggcagtggtggagtggaggtgccaaggctgagggaggcgcgccgccgcccatggacgccgcgcggtgggtcgtgtgcctgctcgtgacggtcatctgcttgtcgtgcgccgccgcgaacccgatgtccgtcagtcccaccatgctcaacgagggtgggcatcagcatgccatagcgtacgtccagggcgacaagtactacggcgccaaggcgactatcaatgtgtgggcgcccaagatcgaacagcccaacgagttcagcttgtcccagctctggatcttgggcggctcattcggggaggatctgaacagcatcgaggctggatggcaggtacagagttagagagagagagagagagaggacacacaccgcaacacatgagcttcacattcataatcagcaccgagtaaatgcagcaccgtttgcgcggttggttgccgggccgcgatgcagtgtgtttgtgtgtgtgtgtgtgtgtgtgtcatgccatcacgaagcctgaatctgaataactcttgttgcttctccattgcatcaggttagccctgacctctacggggataacaacacgaggctcttcacgtactggacagtaagcggctaagcgccttaattattatatattctatctatcttaccgccattgcagcgtctgcgagagagaaaccacgtacgcgcttccgtttgcagttttcctgaatgacgagctgtttctcgctgtgtgtggcatgtgtagagtgatgcgtaccaggcgacagggtgctacaacatgctgtgctcagggttcatccagatcaacaaccagatcgccatgggcgccagcatcttcccgacctcgagctactccggctcccagtatgatatcagcatactgatctggaaggtgaggcgcgagtgattaaactaaactactagtcactgacaccacatgccaatgccaagtacgggattatcagacaatgtgatcgcccgcaggaccccaaggagggcaactggtggatgcagttcggcaaggactacgtgctgggttactggccgtcgttcctcttctcgtacctggcggacagcgcgtcgatggtggagtggggcggggaggtggtgaactcgcaggcggacggcgtgcacacgtcgacgcagatgggcagcgggcacttccccgaggaagggttcggcagggcgagctacttcaagggggtgcaggtggtggacagcagcaacaacctcggggcgcccaggggcggcctgggcaccttcacggagcagtccagctgctacgacgtgcagagcggcagcaacgccgactggggcacctacttctactacggcgggcccgggaggagctccagctgccagtaactggtgggctctctagctaggtagtgatgtgcgtgctgctggcttcacctttgtttgtggtagtttcttcttcttcttccgattagtcattagtgccgccgtgccgggatggcttctgaagagaagcatggcatgtggtggtggtggtgccctaccctacccttgttgtggtggcctgcctccttttcctatatggtagattcacttgttcgtccttgtggtt

SEQ ID NO: 90972 - DNA, 252 bp, Zea Mays
ataacctattcagtactaatacaaatctttcagcgtcagcaaaaacaaaacatacctatcaccaaaatagtagcaaaatgtctttcaagaaatttcaccagccgtaggacgaccagtccagcagtgtggttctgattggtcccagtttggcatccactgagaccctgatacttcgaggctaaaagcctaccagcagcagtgcagctatgatccccctctagctatggccttcttctctcgcccgcgtgctac

SEQ ID NO: 90973 - DNA, 591 bp, Zea Mays
atggaaactatattgcgagcacaacctattgaggaatcattaatgcctagtgttgagactatttccaaggtcttcgtctctcagaacagctccaacgacacattttttaataatgtaggtatcctcacaagctccacgaaaataaagacattgaaagagagagcgcttcaggaacttacagctgaaaagcaaagctcaactgctctccaccaagaagtagatgaactcaacaagaagttggcaaaaactcaaagggggtttgaggagtttaagaagcaacaggaagagaacaatctgcttctcaagcatatcttgcactctaacaacgctgctctccgctacacgaacttccaaggagcctcttcgtatgaaggcaagagctcagatgcagatgcagtggagaagatgcagatgcagtggaaggcgaaggaagcaacgcagatgcagatgcagtggggaccggcagcactcaaggacgaggcagcgcatgtgcgtttggggaagagagggcagtggttaccggaggagagagggaagctcaactatgtgggtctatccggtcgatggtcctttggacattttgcaggctag

SEQ ID NO: 90974 - DNA, 960 bp, Zea Mays
atggtgttagcctgtgcagcagccaggctagtccacccaagcattggcatgggcatggtgtccaagcagcacccaagaacaccgccgccgtcctcctgctgcctacacatccaccacatcctctaccttaggcccgtcgccagcagccaccacttggcgcgccactccgtctacgtcaccaaggacgacaagccgcttgagccgccgctgccggcggctgtagagacagagagcacgcatcagcaggaggacgaggacggcgggccaaagctggacccgaggcggttcgaggagaagttcgcggtgctgaacacgggggtccacgagtgccggtcctacgggcaccgctacgaccaggcggcgggggacccgtcgtacccggtgccgtcgggcctccccttcgcgcagctgcccgacgactggcggtgccccacctgcggcgccgcgcagacttcttcgagagcaagagcgtggagattgccgggttcgcgcagaaccagcagttcgggctgggcggcaactccttcacctccggccagaagggcctgctcatctatggcagcctcctcatcgacttcctcttcttcatctccggctacttcctgcaatgatgacgccaacaacgactctttctgatcttatctgctttccgtttgtgtgaatagaatacttcgtccgtgcatgtactcctccccactcccagggaacaacattcatcatcaatcgagtagaaactcttggttttagattttttttgatttgatgcggtgatcgttaagttcacaggaacaccgagcgcatatcccctccatggttgtaatatgtgggcaacaaaactacaaactacacacaaagcatgtcataggcagagtggtagaggagggtacgcgtggtgcacacatatcttatccacccatggcctggcctccatctgtgttcctgatgcccgtggccatcacc

SEQ ID NO: 90975 - DNA, 1098 bp, Zea Mays
atgacgacgcgcccgcggtggcggtgtgtggatgcgcagactcccggcatatcaaaatccgcactccccattggccggcctcatatccccttatccgcttcgccacccgcggtctcgcccaccacccgctccggccggctcttagctgcatgctcgcgccgccctcctctccatcatccagtgctctctcctcttgcgattcgctcgctcgatcctagcttcccttccaagaagcgcagcgcccatggccatggccacgcaagcctccgccgccacgcgccacctgctggccgccgcctgggcgccggcggcgaagccgcggcagctgagctcgcagctcgcgctgccgtcgtcgtcctcccgcgggccggccccgctccgcgcgtccaccgaggaggcggtggaggcgcccaaggggttcgtggccccgcagctggaccccagcacgccgtccccgatcttcggcggcagcacgggcgggctgctccgcaaggcgcaggtggaggagttctacgtcatcacgtggacgtcccccaaggagcaggtgttcgagatgcccaccggcggcgccgccatcatgcgggagggccccaacctcttgaagctggcgcgcaaggagcagtgcctggcgctcggcaccaggttgcgctccaagtacaagatcacctaccagttctaccgcgtcttccccaacggcgaggtgcagtacctccaccccaaggacggcgtctacccggagaaggtcaaccccggcagggagggcgtcggccagaacttccgcagcatcggcaagaacgtcaaccccatcgacgtcaagttcaccggcaaggccaccttcgactaatcacacttcacgtacgccgcacgccccagccgggatccaaattaaagaacttcttcttctattaattacagtatattgtaatttggctgctggtacggtggtggcatgatttgagatgtgcatgatgatccttgtgtaattttattaccaagtctcttcttatatttacatgttcatttgcttgcttcttgcataacataacgcctatcgacaatgaccatcattagttttagtcctacgtgtatttgattcaa

SEQ ID NO: 90976 - DNA, 102 bp, Zea Mays
ctccgtcgcatgagcgttttgcattttctacaaatctctgtcgtattagcttcgttcttggtttgctcagtagtaggcaccttgtttcctgtattcatcgtt

SEQ ID NO: 90977 - DNA, 1098 bp, Zea Mays
gcagcagcagcatccgtgtgtatagatcggcaagctaagcgcggctacacataaatatattcctttccctctcttgtgctcttggcatctcgttgctttcgagcacaaggtcgtcagaggccaggtgtggcagcttgggcaggagaggtcgagcagcagcaggccggtgcagctagcaatggcggccattatgggcgtgaagaagggtctgctggtgctggctcttgggctcgccatggccgctacctcgtcggccgtcatctacaaggtcggcgacacctccgggtggaccatccttggcaacgtcaactacaccgactggacttccaagaagaacttccgtgtcggagacaccatagagttcacgtacccgccgggcatccacaacgtgctggaggtgaagaaggccgactacgacagctgcaccaactcgacgccgatcgccacgcacagctcgggcgacgacaagatcgtcatcaagagccccggccaccgcttcttcatctgcggcgtgcccggccactgcgccgcgggccagaagctcaacgtccgcgtcctcaagacgcgctcctctgacgccccttccccggcgccctccgcgcgctcagcagcaggctcggcggcggcgacccccagccccaccaccgagacgaccggcgcgtcgtcggcctcgggcggcagcagcacgcccgacgccacgaccgcgcctgcgcccaatgccaacggcgcgggggtcggtgcggcaggccaccagaacgtcgtcgtcgtcgtcgtcgctatggcggtggcggcgctcgcctccatgacgatgctacactagctcaccactccctatcctacatattatatatagtggtctcgtgtgcatttgtctatatgcgatttttttggccatgatgcctgtggaggttttcgtttcttgtctctgttgttagctgctgatgtggtgtggtcgtgtggattatacatattgttgagacgttgtgttttcctctgctttcttgtctccaacgttcttagtattttcctatttgacttgcaacatccacggacatccattcatatttggcttgaatccaacaacgacttgtgtttaaa

SEQ ID NO: 90978 - DNA, 806 bp, Zea Mays
attcctcgtccgtttttgttaaagccttaataaaggcaggtgcagctcccggggaagaagccaagggggaagcgaaaccgaaagagaggcagagcttggcaatggagctcccgtggggaatgctgctgccgctgctgctggtcctctccgtctcgtccccgtcctcgtcgtcggctgctgccacgctcgccgtcaccgctccgcccccactgcctgttcctcctcctcgtcatgctcaagacgccgaaggtaacactgctggctgctgtgcttgcctctcattgatttcaccatcaccgcgctgttttttttctgtgccaatcttccatccactatcccattcctggtgctcggggtcatttcgtctggattctttttagatctgcatgctgttctgtcaagcgcagcgcagtgcgtttagagtagtagtccatgcttgatcgatctccgtggaggaaaacgaagaaacagcggcctcatttttattacccctacagatgtctgtcatccgtgcaggacagtgaatctggtctagtgctattcttttcatcactctgttacttttcaccgtccataatcagttcacatttgcggtttcctgtccaagaacgctgttgattatcttgttccagcaatgtcccgtcaaatgcgctgtaatagaatagtatacgcgtcggacagacatcaaaagctcagatttttgctgacgcacccgtggtggtggcacacgcgcaggcatgctcatcaacggcaacttcgagacggcgccgcggaggctgaacaagaccctcatcgtggggcgccac

SEQ ID NO: 90979 - DNA, 1554 bp, Zea Mays
attcctcgtccgtttttgttaaagccttaataaaggcaggtgcagctcccggggaagaagccaagggggaagcgaaaccgaaagagaggcagagcttggcaatggagctcccgtggggaatgctgctgccgctgctgctggtcctctccgtctcgtccccgtcctcgtcgtcggctgctgccacgctcgccgtcaccgctccgcccccactgcctgttcctcctcctcgtcatgctcaagacgccgaaggcatgctcatcaacggcaacttcgagacggcgccgcggaggctgaacaagaccctcatcgtggggcgccactcgctgccggggtggacggtgcaggggcacgtggagtacgtctcgggcggtccccagcccgggggcatgttcttcgcggtgccgcacggcgtgcacgcgctgcgcctcggcagccgcgcgtcggcgtcgcagaacgtgacggtgcggccgggggcgctgtacgcgctcacgttcgcggcgacgcggacgtgcgcgcaggacgaggccctgcgcgtggcggtggcgccgtcgctctcggcgcccgccgacgtcgccgtgcgcacgctctacagcggcgcgtccgccgacacctgggcctggggcttccgcgcctcctcccccgtcgcgcaggtcacgttcgccaaccccggcgtgcaggaggaccccgcgtgcggcccgctgctggacgccgtcgccatcaaggagctgcccgcgccgtacccgaccaaagacaacctgatcaagaacgacggcttcgagatcggtccccaggtgctcaggaactcgacggtcggcgtgctgctgccccccaagcagaaggacgcgacgtcgccgctgcccggctggatcatcgagtcgctcaaggcggtgcggttcatcgacgcggctcacttctctgtccccgcggggcagtatgcggtggagctggtggccgggcgggagagcgccatcgcgcaggtcatccgcaccgttcccaaccgcgcctacaacctgtcgttcgccgtcggcgacgcccggaacggctgccacggctccatgctggtggaggcgttcgcgggcaacgtcacgcagaaggtgccgttcgattccgccgggaaaggcgggttcaagacggcggcgttcaggttcgtggccggcggcgtccgcacccgcctcaccttctacagctcctactaccacaccaaggtcaccgacggcgtctcgctctgcggccccgtgctggaccaggtcaaggttgtgcctgtcaaggcgtagtgaaatgaatcgtgagagcgccgagtgacggtctgctctgctcgtcgtctgtagctgtgctcgtcgtgatttggcgtggtgggttgtgaaagtgtggtcgaattctggacccttcggaatctgatcgtggtgtgctgtgcggtgcgatgtgctgtagcgaaatttggttgctatctcttgttcactccacgtttggaatttgcgttttcaatccggtattgaaggtataataattaactgctagtacggtgactgaaacctaactagtctttaagatgtt

SEQ ID NO: 90980 - DNA, 1199 bp, Zea Mays
ctagttctatcctgacacataaacacctccacccgtccagcaccgccactgttcgcgccgccgtagcccccaaaccaccatcaccctccggagcgtcgcagcgatcccaccctcattctcccctttacccgtccatggcggagcgcggcggcgagcgtggcggcgagcgcggcgggtttggccgcggcttcggtcgcggcgggcgcggcgaccgtggcggacgccgaggcggccgtcgcggcccgcgtcaggaggaagagaagtgggtccccgttacgaagctcggccgcctcgtcaaggagaacaggatcaccaagatcgaggagatctacctccactcgctccccgtcaaggagcaccagatcatcgagaccctcgtgccggggctcaaggacgaggtgatgaagatcacgcccgttcagaagcagacccgcgccggacagcgcacccgcttcaaggcctttgtcgtcgtgggcgactgcgacggccacgtcggcctgggagtcaagtgcgccaaggaggtggctaccgccatccgcggcgccatcatcctcgccaagctctccgttgttcccgtcaggagaggctactggggaaacaagattgggcagccacacaccgtgccctgcaaggtcaccggcaagtgcgggtccgtcaccgtgcgcatggtgcctgcgcccaggggttctggcatcgtcgccgcgcgcgtgcccaagaaggtgctgcagttcgctggcattgaggatgtcttcacctcgtcccgtggctccactaagacccttggcaacttcgtcaaggcaaccttcgactgcctcatgaagacctacggcttccttactcctgaattctggagtcagaccaagttctccatgactccgttccagcagtacacggacctgctggcgaagcccaccaagggtcttgtgcttgaggccccaactgagacagtagaggcttaggatggtttgtgctgtctaaatgcactttctatgttatagttaagaactgttgtcaactttcaaaaaaaaactttgggttttgttttgccctggatgttctttgttgtcaagttttggatataacagtactcttttttaatcagtgaatgctacataatcatctcaaaaatctcatgatagtctttttttcacggtgaaggctttcggaatttggaagctggtggcctggtgtttgttgag

SEQ ID NO: 90981 - DNA, 1229 bp, Zea Mays
tcgcgccgccgtagcccccaaaccaccatcaccctccggagcgtcgcagcgatcccaccctcattctcccctttacccgtccatggcggagcgcggcggcgagcgtggcggcgagcgcggcgggtttggccgcggcttcggtcgcggcgggcgcggcgaccgtggcggacgccgaggcggccgtcgcggcccgcgtcaggaggaagagaagtgggtccccgttacgaagctcggccgcctcgtcaaggagaacaggatcaccaagatcgaggagatctacctccactcgctccccgtcaaggagcaccagatcatcgagaccctcgtgccggggctcaaggacgaggtgatgaagatcacgcccgttcagaagcagacccgcgccggacagcgcacccgcttcaaggcctttgtcgtcgtgggcgactgcgacggccacgtcggcctgggagtcaagtgcgccaaggaggtggctaccgccatccgcggcgccatcatcctcgccaagctctccgttgttcccgtcaggagaggctactggggaaacaagattgggcagccacacaccgtgccctgcaaggtcaccggcaagtgcgggtccgtcaccgtgcgcatggtgcctgcgcccaggggttctggcatcgtcgccgcgcgcgtgcccaagaaggtgctgcagttcgctggcattgaggatgtcttcacctcgtcccgtggctccactaagacccttggcaacttcgtcaaggcaaccttcgactgcctcatgaagacctacggcttccttactcctgaattctggagtcagaccaagttctccatgactccgttccagcagtacacggacctgctggcgaagcccaccaagggtcttgtgcttgaggccccaactgagacagtagaggcttaggatggctttcggaatttggaagctggtggcctggtgtttgttgagttaggtttgctgtcaagtgtcttggtggtgtgaatctggtgcgtggccttgctaaattggtatccaacgttcaaacagacgaaccaggttcacagaaatatatcggcatgtttggagagaatctgtgattacgtgaaggaagataaagatatccatcgtgttcaggatttagataatgatggatcctattactgtaatggcttgatcgattatatgtttttgttgattttgtatggtttttaatatatcgatttttataaaagctagctttcagctg

SEQ ID NO: 90982 - DNA, 1761 bp, Zea Mays
gctcgccgccgcccggcgtgctcggtctgggcactcaggctggggcggagcagcagcgggagtaagaaggcaggcctcggcatcgtccgcaacctcgacggatagtacgaggacacctttaacgacgtccagcgggtacccgtgcctcaaacctcatactaaactaggagtctcttgcacttaactttcatcacttttcattacttgtgatgagcttccctccttctgtctgtggctgcaacaactgatgaaccacttaacctaataaatcttattaggttgtaatttgtatgaaagctactaggcccccgcgtcgcccctttggcgacttgggcggctgcaagcctagccgccgccaactcccctccctccccatctctttgccttgccgccgccggagctagctggtgggttgcccgcgcggctagcaatgaaggcggtggtggggtgcttgctgccctgctcacgcgtccaacccgtggcagcgctgtccgtccactcaggcagctagccttcggctgggtgcgcgcccgcgtggatggcccggtggcggcatctgcccatccctgatgctcggggggttggaggtgtgccttgactgcgtgctcgcgcaactgatgcggggagggctagatctggcgcccctagggctgggagcagtgtcggcccgtggagggatggatctggcgcgcgcgaggttggcggtctccgtgtgccagccgtcggaggcgctgggaggctggtcccgggccagcgcatgagcgggggtggagttcggcgttggtgcgccggcaggcctgcgcagtcggtcggaatggcggtggctggacctcctctcatctgcggctgcgtcggctagtgactcgggctagcgcagggtggtggtggcgacaggccccaaaatcttcatcattgtgcgagacgacggggcagtggcgacgacggaggcaacttgttgtgtctcgaggtttctgccagatgctgtgctgggagctcttgggcgaaagtctcggcgacggtgacgctcatgggtgccgcttcacctgttgagggcgtcgcatccccaacgttatcttccttgggtgaaagctcggtcgatcgcggataggcgacagtggcgtcacggtgacgtcactcccttcctgaagacgtcgcttctgaatttcgtcttggccatgactttgccttcggctattgctttgcttctcagcaacgtgaagtcggagatgctatttcaggggatgtggctcgtcaacgataacatgaggcgaacctcccttcttcgtggtccacaatatttcgaaggtcgggcaaaaacgagaggcggggcggagggtcaagattgaaagtcggagctgctctgtgccttgagcccggcaacgatgacctgttgagacctttcgtttcgagctatttatctgtttttcgtttggttcgcctatcatctgctttgggaagtcggagttgctggaagctctgcatctttgcttgacagcgatgacctttagcagttttgtgtgctctcgtgtgggttgtcgctgcctgtgttgtttgggcgctctgtgtcggcggtgattgtggtgccgtattgatgttccaatccaaccgacgagttgggttgtatgatgtcagcgtgttgatgtcccaatccaaccgcctattatctgttgtttagtccgatccggaccacttcttctttactaatataatcggtagctctcttgtttggttcgtttcaaaaaaattgtatgaataacaaaa

SEQ ID NO: 90983 - DNA, 1574 bp, Zea Mays
tcaccatcaccaggtcagcatccaatccaagcatccagcaaccagcaccaacctgagcagcttgcaacaagagctgcagtatatctataaattctgttctgatcttgttcgctagcttgactgttcgagcccgggttgcaaataacaacctgcactgcagcgtgattagctctgccaatggcatcgtccagcgggatgaagcttgtgtacatggcgcctctcctcccgttgctcttcatgtccggcgttcttgaggctgcaggagcgggcagctcggctgacggcacgaacggcaacttgcacgggtctgtcaccagcagacctgccgccgcgcccaggggaagatcgctgccggaatcgcagagcgtgttcagcctcgaccgctacggtgcccgtggcgacgggaggaacgatgacacgcgggcgctggagatggcgtggaaggcggcgtgcgcctcgccacggccggccgtcgtgctcgtccctgccggcaggcgctacctgctgaagctcctcaccctccgtggcccgtgcaagtccagtgtcacgctcacggtgaagggcaccctggttgcatcgccaaaccgggcggattggagcgacagtgacaggaggcactggatcgtgttccgaagcatcgacgagctcactgtcaacggcggtggcgccatcgatggcaacggcgagaaatggtggcctcactcgtgcaagatcaacaaggctctcccttgcaaggaggctccgacggctctgtcattccactactgcgtcggcctgaaagtggaggatctgaaaattatgaacagccaacagatccacatgtcagtcgaggattctgcaaatgtgctgctggcgcggttgtccatcacagcgcctggcaccagccctaacactgacggcatccacatcactcgcagcaaagatgtacgcgtcacagactgcaagatcaagacaggggacgactgcatgtcaatcgagaacgggactcacaacctccatgtctccaaagttacctgtggtccagggcatgggatcagcatcggaagcctaggagacgacaactcaagagcagaagtctccggcatcaccatagactcagtgcaactacacggcacaaccaacggagcacgcatcaagacgtaccagggaggcagcggatacgccaaggacatcacgttccaaaacatggttatgtacgacgtcaagaacccgataatcatcgaccagaactactgcgacagggctaagccatgcggagaacaagagtcagcggtgcaggtcagcggcgtcgtcttcaagaacattagagggacgaccagtaccaaggacgccatcaagatgaactgcagcgagaacgtcccatgccagggcattaccttgcagaacatcgacctggaaatgcaggacggcaagggcagcacgagaagcacatgtaggaatgcgaaatggagagaatttgggaccgttcacccgcagccttgcactgccacagacacagagtagggggcaatggaactcagtcgcttgtgctttgtagctagtctgtacagaactacagatggagtaaaggcata

SEQ ID NO: 90984 - DNA, 1758 bp, Zea Mays
catacataattctcaaagcagtatatatattaacttacggataaagaccagcggaggtacatatagcatatgtaattaacgtctcccgaccaagttcctaccatactataaaaagagccacccactgataacttacgatgcacaatgcgtctagttccactctttaattatcttcagctcatcctagcagttgatgccacatttcgcgatatcaggaccagtgacccgggtggtgaatggatcgatacgaacccacatcagggaaaagatcgacgcaaggaggatagcccagacaacgacaatggtcggcgtgcggttctgcttccccatgaggcccttgaggaaggggtacaggtggacaatcacccagaacgcaaagaagagcttcccgaaaagaggtccccatgactggtaaccgctattgattgcgtaggaaatgccagcgaccacgccgaccaggttgatgatcaaaatagtggttggtgggatcagaagcgttgtccacttgaacatgtagagctcggcaaaatcaccttcttcgtcagtggccttagaggtgacagtgaagctcgtgtcgataccagcaagcaccttcaggagaccctggaagacggcaaataaatgcgcagaaataccaccaatgacccagaactgctcgttcctccaccattcatcaatgccaacaccactccacctcatctcaaggataccagtggcaaagattgagataaagagcgatataaaccaaacactctctaggttactaatctgcattcgagaaaataagggcagtcagaatcaattctttgcaaatcttcctgcacagaggagcgggattgatgtgagtggataaattgttgtgttgatataagcaaatctctccaggaatttaagccgacctccatagccataccatatgggacaatgcctgctgaaaagaatttcaatggaaccaagagcccaccgaagcacttgattcaaacgatccgaaaggttgataggagcagatcccttgaaagctggtcgcttaggcatgcagtagattgatcgccagcctcgagcatgcatcttgaatccggtgagaatgtcttctgtaacagaaccatagatccacccaatctgcgttccccagtcagttttgtcctcatagccacagctgatgacatgaatagcttctttcagaagagactctggagttgcagattgtggaacaccgccatattccatcagagtagaggctacaaaaacactggactggccaaatctcttctccaagctcatttgagacataatcagcgatttctcatcatcaaactgagaacctatgaagattgtgaagtgcaaggtaaaagttcaaggataaaagaaaggtaattccacttgtctatggtaccttagatttacaacaaatacgatgaataaatggacagattaatcattgtgtcaaaaaataagaaatattgaatgcacatctactcaaattaaaacagacaactcaatgataccttcaatcccttcctctatatcttcgagattaaatactggtacagaactgtctgcgtgtctatgtgacttcttcttttccgagctcttcttagattttgacgtctttttccttcccccacaaagcgaagagaagaagcctggcttttttttcttgactggaggctcataaccatataaggccgttctgttaaacacacaaccagttcccacataaactggcccttgaatgccgtcaagacctctcaagttaat

SEQ ID NO: 90985 - DNA, 621 bp, Zea Mays
cagggagtgcataaaaatggcgaaacgatggctgtcaagttgcttcactccatggctggacttgatgataaactttttgaggaggagtttcacaacattgcaagactccaacacaagaatattgtgcgtcttgttggcttttgccatgaaactcaacgccaattcataccgcacgatggaaaaatgatttttgctgatagcaaatatatggccctttgcttcgaatatatgcataatggaagccttgacaagttcattattgatgaaaatagtgtccatgactggtccacacgctatgcaataatcaaggggatctgtgagggcttgaaataccttcacgaggaattgaatcctcctatttatcatttggatttaaaaccagctaatattttgttggatgacaatatgatgccaaagcttgcagattttggcttgtcaaagatttttgaacaggaacgaacacgaatcacacaaagttgtgtaggaacacatggatatctaccaccagaatatatagacaggaaagtaatctcaaataagcttgacatattcagtctgggtgtcatcatcataaagattataagtggacctacaggttacacccagtgtgctgaaatgcct

SEQ ID NO: 90986 - DNA, 343 bp, Zea Mays
tctagatactctaaatctaatactattatcattgtgataacaactgaagcaagcattgcagcatactgcgcagataaggatgaccttgtgtttaatgtcaaaactttagaaactgatgcagcctttgatctcttcgaaaatgagatatctaagaaggctccgttgtggaccacttcattatgtgatcgaggaaattcagtgacgcaagaacttgtttcaaagtgcggggggctcccaatggtaatagtggctatagctggcatattggctaccaaggtagtctcctggatggacactgcaacatccatcaatttgaggtttatgtttgagctagagatcaatc

SEQ ID NO: 90987 - DNA, 231 bp, Zea Mays
gaggcgcgcggccgggcatctcaccgtcgccgtcgccgacgttacggccacgaaagatgcccggtcgattccgcgcggagacccatctcccaccggccgaccccagtcacacctgtcgccccgtccctttcaggatcctatcgtaacctttggatcgatcccccccccccccccccccccggtgggcactgtcacgagggcaagggcaaatccatcgagggcatgtggcga

SEQ ID NO: 90988 - DNA, 1646 bp, Zea Mays
gacgacgcgattcacttcagagttgaggcctgtccatcggtgcttggcgctgcccatggcgtccagcatgaagccgacaatgctcgcgtccacggcggccctgcccctcctcgcgctcctcctcctcctcctccacctctcgtccggcgctctcgaggccgtagtagtaagcgcgagcaacggcaccgcagccgacggtgcgagctacacgtgcagcgggtccctgacgtggccgtcgtcgtctcaccagagcgtgttcagcctcgaccgctacggcgcccgcggcgacggcaggcacgacgacacgggcgcgctcgccagggcgtgggaggcggcgtgcgcctcgccgcggccggccgtcctgctcgtccccggcggcaggcgctacctgctcaagctcgtcgtcctgcgtggcccgtgcaggtcccgcgtcgcggtcaccgtgaagggcaccctggtggcgtcgcccaacagggcggactggagcgacagcgaccggaggcactggatcgtgttccggagcgtcgacaggctcactgtccacggccgtggctccatcgacggcaacggacacagctggtggccgcactcgtgcaagatcaacaaggctctgccctgcaaggcggctccaacggctctgtcgttccactactgcaccaatctaagggtggagaatctcaagatgatgaacagccagcagatccacatgtcgatcgaggactgcgccagcgtgcaggtgtcaaggctgtccatcacagcacccggcacgagccctaacaccgacggcatccacatcacgcgcagcaaagatgtgcgcgtcacgaactgcaagatcaagacaggagacgactgcatgtcgatcgaggacgggacgcacggcctccacgtctccggcgtcgtctgtggccccgggcacgggatcagcgtcgggagcctaggagacgacgactcgcgagcggaggtctccggcatcaccatagactcagtgcagctacacggcaccaccaacggggcccggatcaagacgtaccagggaggcagcgggtacgccagggacatcacgttccagaacatggccatgcacggcgtcaggaacccgatcgtcatcgaccagagctactgcgacagggccgaggctgagccgccgtgccgggagcagaggtcggcggtgcagatcagcgacgtcgtcttcaggaacatccgggggacgaccgtcaccagggacgccatcaggatgagctgcagcagggacgtcccgtgccggggcatcgtcctgcagaacattgacctcaaaatgcagggcgggaagggacacgcggagagcacctgccagaatgccaagtggagaaagtccggaaaggtcgttccgcagccgtgcacctcgaaggaggagggcaaggttgggcagctgttggagttcctcttagatcacgagctcgcgtcgtctttgcgctcgtggagttcctggtcactgtggaactagagacctgcatgcagttcgtcgttttgctgctgtgctcagtgagtacgtcagtgtatttgtcatttccttcacgtaagtagtacgtaacacccatgcatgtataatgtactgttatatatattaatatatagcaaccacaaccacgcatccacatcagctgctt

SEQ ID NO: 90989 - DNA, 2437 bp, Zea Mays
gaagaaaacgaggtatttcaccccttcatgtacaaagtacaaactgcgtgcaacaacggagctttgaccaatcgtgtcgctcgcatgtcacccacccactagctagcaacattagcatacaagtatcagtgtcaccgttctcacagcttgcaccggagcccaaagctgcgcagcagcttgctcaggcatctcttggcccgtgactcgcggcgtatgggcccgccgcgcccgcgcgtctctgcgccgctgccggagaagatcgcccggaggcgaccgaagtgcgtgcttctcccctcgtacgccaccgcatccgggttctcctgaaaccgccgcggaaatcaagatcgttactaagagaagaagaccatatccgggtgaattggtgatccgcgcggcgcgtgtgatcaacgggcagcagctgtccgcacgaaccagcacatagcgcttccactcggtctccttggcgacgacgacatggcggcgcgcgtcgtaggtgaagcgggggtggtccttgatccggctgacggcgtcgaactcgcgccggagctcgcccagccgccgctgcagatcctcgacggggaatgcggaccccgtggccgcgttgagctcggcgcggatggcagaccagtcgtccgcggtgaggtcgcccacgcccacgccgcagccgcgcgtgcgccgctgcagcaggtccaggaacttggcgtcgtgctgggccgtccacacgtccacgtgcagccgcgacaggatcttgcggagcgaccgccgcgacaccggcggcctcgtcgtcgtggccttgaccacggcctcctcgtggccgtggccgtcgccgtcttcgaagcgcatcatcggctgctggtcaatcatcagtagttggctaacggtcctgactggctgcgtttgcacgttacgcatctcctgctcctgccttccatgtcgacggaatggttagttggtgacgcaagcgtgtgtgtacccagactaatggacggcgagtccgagagcacgtactgcgactgcgaggcgtcgtcggcgcggaggcggaggctgacgaagacgacggagccgtggcgcacgccgtagtgcgcgacgggcatgccgtcgtcgtcgaggtgtcggccggcgaagaagagccgctggtcgccggcggctacgccctcgcgggccatgatcatggacttgagctgcgccaccgtgttggcgccgtcgacgtccagcgccacccggtccccgcggagcgtacgcgccatgatcctcatcgtcgtcgccgcaggaggagccggcccgcctctcgactcgaggcggctagtatctgtagctctgtcgtcggcgcacggcgcggcactcatgagcccgacaggagagtgaattgaggctccgggaggaggaagaaaataaaggatcgagcagaagataatggggacagatcggagatccggaggcggatgggacgcgcatggacgagcacgacggggctttggctggcacagccaggcgtgcatgatggttgcgcgggaataaagctagctgttggatgaggcggcgacgtgaagaaacgaattttcttccgctgtccgctgcagcgccgactcgcctccgtctatctgtacttgcttcgaacagaatctgattctccggagcaaacggggctagaaaaagtgtcagggactggcccatgctgctgcagttggtgcttcagcaggagagctgggccggcccacgtaaatctgtacgagatcttatccaaaaacagctccgctccccctctccccgcgtgcccacgtcttcgtcggggccgtcgccggcgacgaggtacgcccccatccccgtactgtcccctttctgcttcgcggagcgctcttgttcccgcaccctgcgcgcccagggaacgggaaaggggaggaagaatatgggcgagttcgacgactattgggcgcgcgcgtacaggggcgactctgcggtcccgcactccgacccgcagcggcttgtctccacgtggaccggcgccgttgccctcggcgcggccgcttgcgtccaccaccacgcctccgcgctcgcctcccacctcaagtccctaccagcgacttggcaagacatgacattggcgcttgatcaaaagcgatggaagaaagctattgagaaaaagcaacagcgagcttaagctcattattctttcctgccccttgggccccagttggatgagcatgtgtctggtcatcaatgtggcgcatgaagtttcagagttttctatctctatacacataatgtattgactgaggttctacttttggtttccctgtgtagcgttagagcactgtgaaaacgaatgaattatgttaaactgcccccattttttatgtttgctacatcccggatcctcacatgacattcagaatgattcatctgttcttgaaatctttattatcccttttaacatgct

SEQ ID NO: 90990 - DNA, 2629 bp, Zea Mays
ttcctgctagtttgcgctggccgctggcttatagttagtgctcgcttctagaacgcgtccagaattcgtggactcgcccccgctccgccccagctcacacgccaagtcccagtacaaagcctacggaatttccccccacctccaattcgagttgtccgcttccagtcagtcgccgccgtcgccgctgaaaccgaaacttgaaaaaccagctcgccgggggtccggccgatttaccccaaatttcgctgctgctgctgctgataggaggccgcggcgaccaccatgggcaactgctgcgccacgccgtcgacgacggaggagagcggcaagagccgccagaagaagccgaagcagaaggcgaacccctacaacgtggcgtacaaccgcggggcggcgccggcggcggcgcgcccgggcctggtggtgctgcgggacccgacggggcgggacctcggcgcgcagtacgagctgggcggcgagctgggccgcggcgagttcggcgtcacgtacctgtgcacggagtccgccacgggggcgcgctacgcgtgcaagtccatctccaagcgcaagctgcgcacgcccgtggacgtggaggacgtgcgccgggaggtggacatcatgcgccacatgccgccgcaccccaacatcgtcagcctccgcgccgcctacgaggacgaggacgccgtgcacctcgtcatggagctctgcgagggaggcgagctcttcgacaggatcgtcgcccggggccactacaccgagcgtgccgccgccgccgtcacgcgcacaatcgtcgaggtcgtccagatgtgccacaggcatggcgtcatgcaccgggatcttaaaccagagaactttttatatgcaagcaagaaggagagttcccctctgaaagcaatcgattttgggctgtcagtgttcttcaggcctggtgagcgatttactgaaatcgtaggcagcccatactacatggctccagaggttctaaagcgaaactatggccctgaagttgatgtttggagtgctggagtgatactttacatacttctctgtggtgtaccaccattttgggcagaaactgaacagggagtagcacaggcaattatacgatctgtggtagatttcaaaagagaaccatggcccagagtatctgagcctgctaaagatcttgtcaggcggatgctggacccaaatccattgacacggtttactgcagcacaagtacttgagcatccatggttacatgactctaaaaagatgccagacatttctcttggtgatactgtccgagcaagactgcaacaatttgctgcgatgaacaagttaaagaagaaagcattaagggtgattgccgagcatctgtcagtggaggaagtagctgacataaagcaaatgtttgaaaagatggacgtgagcaagaatggcaagctaacattcgaggaattcaaggcgggccttcgtaaactggggaaccaaatgcctgattcagatcttcagataatgatggatgccgctgacatcgataaaaacgggaccctagattacgaggaattcgtgaccgtgtctgttcatgtgagaaaaataggcaacgatgagcacatccaaaaggccttcacatacttcgaccggaacaagagcgggtacatagagatcgaagagcttagagaggcactggctgatgaactggagggaaccgatgaagacatcatcaatggcatcatccgagacgtggacacggataaggacgggaaaataagctacgacgagttcgcggcgatgatgaaggccggcactgactggaggaaggcatcacggcagtactcgaggcagcggttcagcaacctgagcctgaagcttcagaaggacgggtccctcggcgccgagacacggtaggcgggggccggccaccgcctaccgccacccgacggagaagtgatccgagtgttcgtcgagctgtagtcaggtgattcgattccacgcacgttccaattttacacggtgaatcttcagtcgagcttgtagttcttgggtttgtgattgtaaagatggtggttgtgcccgtacgtactgtagatgcagcagcgtgtacctacacaatttacagagaaaatgcatgctggagtagcacaagtagtcttgctttgtagtaacttgtaattagaatttgtttgtatgatatgcgatattatgatggttgtcggcggcacagctccgtgaatgcctacaagtaggggtgacaatgggctctaaattttacactataaaatttaaggatcggatcgagttaggatcgggctctatttccattcattttttaactaaaatttatttagggccctgtcaatttgtgaagaagcatttggatcgcgatccattaccagcccggctacgagaagatgctgttgctgacgcagtgctgctgatggcttgccggcgctgcttgaacttgctttggcaccagcctgtatgtagggcaaacacaagaagatgctggcacggtgcggttgtccgttgcctgcagtgccgggagccacttcaattcgccggcaacggcaacagaatcggcgattgtgcagtctcaaatccgtggttttgttttccagggcaaccgaataaaagcataaatacctcc

SEQ ID NO: 90991 - DNA, 588 bp, Zea Mays
aatccaccgtatcgaaaagaacacacacacaccatgcccactccacccgtgctcctccgcctcgtcgctgtcctgctcgccgccatctccctccgatccaccgccaccgccgcccgccacgagaataccacccagctgcacttcttcctccacgacactctgagcgggaaggacccgagcgcggtgctggtgggccgcggcgccggccgtgagccgaggcccgacgacccggtgcccttcagctccctgtacgccacggacgacgtgctcaccgagggcccccagcggcagtccaaggtggtgggcaacgcgcaggggttgtacgtctcgtccggcaggggcaagctgtcgctcgtcctcggcatggacttcgagctcaccgacgggcccttcaacggcagcgccttcgtcgtgtactcgcgcaacacggtgacgcgccccgtcggcagggagctcgccgtcgtcggcggccgcggcgcgttccggatggcccgtgggtacgccctgctccgcacgcatttcttggacaacggcaatggcgacgccatcatagagtacaacgtcaccctcttccaccattgatcgagc

SEQ ID NO: 90992 - DNA, 108 bp, Zea Mays
cgcaacctacatgttatagtcataaatcataagctccttattcttgtaaaattaaatggttttcagagcccggtatccatggagaaccttttatataattataactga

SEQ ID NO: 90993 - DNA, 558 bp, Zea Mays
atggctgcagaaatggtgaaggcggcgatgagtggtaagctcaaggagatggattgggagaagaagatcaaaatctgcgagcttgtggagcaagatcctgggttggaagggatccaagatttgagcctgtatatggatctgttgacaaagaagggttgtaagctcgatgaatttttgacacttatagatttggttgtcgtagtcttccacatggtagacatgatccttggttctaacttaggttacatgaggattctccctctcctcgtctacccagaatgcaagttaatgcagcaacagggcatgacaccaaatattccactgccaccacaatggagccagtttgcatccacaccggctccaggattggggactcaacagttcaacacccctctgacacatatacctgcacctagagatagggttgcgcccgaagcgggtggtagtgagtctgatcccatagcagggacaagatttgttgagtccctcttcgcgttccctccttctggtggcgacagcggtcaaagctctaaccacctaagtggtgattatacttaa

SEQ ID NO: 90994 - DNA, 724 bp, Zea Mays
gttggtacaatactagaaccgaataagctgaagaatgcacatcgcactgcttgttttagggagaatatgtactgatctgtttcatgtcttcgttatactacccagcaagaatgtgaggaactagcgcagaaggtaactgacctgaccgtcgtcaacggcacgctcagatcagaactcgacgagcttaagaaggcctgtgaagacatggaagcagagaattcacagctaattggtgaactggagcagtccgaggcgcctagcgttgtgacgactctgagcatccagattgacacaacgaaggcgcatcatagaagcagtgaccagcatggtaataaaaacaacactggtagcaatgggtagtggtagttttggagtgtggcatccgtgagctaggctttttacctctaggtgaggcagaaagatgagatgaggtggttaatatttagctgcaccatcgcccatcgtcatcagtccttgttgttctccttggaacatcatctgtgccttctctttacctgctcacaagcaatctgataccaacagagtctacggcctgtgtatattagccatgtatgatgtgtatgcgagatgtgggcgaacgaactgctttgtaattatcagactaccagttgtgggcttgtgcctgcctgtacagcaatggttgaaaacgattgacagaaactagttcatttggtagcaataaaggtaccatatcagttatatt

SEQ ID NO: 90995 - DNA, 1431 bp, Zea Mays
agcagcagcagcacacccaaaggaaataaacacgcaacgcaacccttaaaaaacgagtgtcacaatcagaagacggagcagcctcaaatcacacgaaacaaacaaataaaatcccctcttcctcgtttcaatctcgttctgtcacctgttttatatttgtcgcctcgcctcctccccttccccaaccgcaacaaatcaaaacgagccgcaatcgcagcgcagaggcaaagccgtccatctctctcaacgccgccgccgccgccccgccccgccccagaccctaccctccacctccagtccctcgtcccagcgcgaccgattctcctcgatccagcactgatccggcggcttcccggcccggccatggatttgctggcgtccttggccgccgaggagcggtggctgttcccgttgttcctcgccatgtacgccgccatctactgcgtgggccagctcctcgtgttccggcggtgggcgccgcggcagcggctggacggcgccagctgcctgatctcgctcttccacggcacccccgcggcgctggccgccgcgggggccatcctcgcgctgcccgcggggtcccggtccttcgccgcgcccaacgcgcgcctccaggaccacgtcctcgactacagcgtcgcctacttcaccatggacctgctccactacctcgccttcctgcccggggacgtgctcttcatcgcgcaccacctggccacgctcttcgtcttcctcacctgccgctacctcgtccggcacggcgcatacgcgctcctcgtcctcctcctcctcgccgaggtcaccagcctgctgcagaacgtctggacgctcgcggggatctggcgggaccagtcccccgccgccgcgcgcgtctacggtgccctctcgccgcccttctacgcgctctacacgctcgtcaggggcgtcgccggcccgctcttcctcctcaagatggccgccttctacctgtccggccaggccgtcgacgtcatcccgtggtgggtgcggatctcctggatcctcgttgtcggcaccgccattgccgtcagcaacctgtggatttggaacctctggaaggagctcgtcagggaatggaagcaagccccttccaagtcaaagaaagacacataggctgccacctcattctaaccacagtaccataccatgtacgggtgtacgaaccatatgtagcttcttaatctttccaaatacatccgagccagatgatgcagactgatgatatgctaaaagccaatttcggatgacaattggtggaggatgcttatctgtaagatacacctgttcattcattctttgattggaaaatcaggtccatgtgcctgaaagtctacttttacttaagaaagtactccctcggttccaaaaaaaaaagtgaaatatataataatctggaacggaagagtactccgg

SEQ ID NO: 90996 - DNA, 291 bp, Zea Mays
aatgtttagaacttcagtagcacaagtagcaagcgtagatcaaataaacatacttcaaaatgactttgcctgcctgttgctatggataaggatgggacatgactgtcaccaccaccagcctattgaagtcgtcactcgccaccagagttgccggagcacgcagcagtttgcttggcttctattagagaatggatggatgccgccatagccagactgctggggagaacaagagaaggaagaatcgaaaccttagaaacaagggagaatcaaagaagggagaaacaagagatc

SEQ ID NO: 90997 - DNA, 706 bp, Zea Mays
tttgcttcggattcggttcccctcgattcctctcccgttgattgcctcacctgggtccggggtcaccggccggcgggggttgattaggtcggcggttatggggaaaggggcgaggaggcgcagccgtgcgtctggcgccgacgggggtggacgcgggagcaagcgcccgtggcgggccgaggaggaggaacaggaggaagaggaaatggaaccgctggtgggggaggactattgcttcggctgcaaggacggcgatgacctccgcgtctgcgatttcagcatgctttgggttttgggaatctacaagtccggaggatgcctgtgtgatggtgagtgctgtggcattgctagagcaggtttagggaccgtgtggaatgcagcaattttattggaactggaagcggttcaatttcacatggcgaaaaaccctcgcaacaggaagaaaaatcccgcattccaaacaggtcttcaaaactcaggaggtcctcgcgacgttcctgatcccgtcgtcagtggcggtgctctggcctctggtgtttggctgttcgcgcggtgccctctggtgttggcaattggcatacgatgcatctggattctggcctatgggcatctggcggactggctgggcggcacttgcagctgccagctggttgggccttctcgtgtaagcaaagtagcaacaatagctaatggccatgggctttaa

SEQ ID NO: 90998 - DNA, 1090 bp, Zea Mays
ttaaaccgccacttggaccctcagtctctcacgttaccagtcttcccgttctcgctctctgtgacggtggcggcgatgggacgagcggcggaggaggagggtgacgtggagtttgctgactacgacctggacgacgaggacgccatggaggaggacggccgcgccgcccgtgcgctccccgtgccccgcatcgtctcccccgccgtggtgcgcacccgcgggcgcttcgttggtcgcagcccctccgttctcacctccagccgctaccgcttcgacttcaccactaacaacggagaccatggtcccatcccactaccgcagcgctctatcgaaggctgggcaattcttgtttctggagttaaagacgatgctgaagaagatgatctttacaatgctttcagtgattttggtcatgtcaaggacttgcatctcaatctagaacgccgcactggatatgccaagggatacgcgctgattgaatacgaaaactttgaggaagcacaagcagcgatcagagcaatgaacgggagtcagctgttcacaaaaactatcaatgttgactgggcattcagcagaggtcctatacagaatttcaagagtgcaaggccatcacgcccaagatctaggactcctccgcgcaggcttgctgccttgacgccatattgactaccgcgggggagcggtggctaggctgtgtcagttctaaaactgatcgtgttttggctgtgagcagccgctagatactgcgacttatcgtttggcgcccgaaccttgattctgctagacctgtatatgcgcttagctggttcagctaacttgggggaggctgctgcgcttcgctccactgactgctattgccgaaggtcctctagtgtgtaaacaatctgtatcatcgatccgtatcaccacggggattaggttttgttgggcgtgctctggacgtatccactcgttttctggttgggcgtgctctgggacgcatccactcgttttctggtaacaatcagccaaaacgtcttatataattggcgacaactaatatgcaagcaactattatatacaagcgtgcaagcaaatatcttgttctgtt

SEQ ID NO: 90999 - DNA, 2681 bp, Zea Mays
aacgtgttggttatttaccccgtttaccactgagtcctccgcaagccattcttcccgacatggcgatacccacggccacgcacgcgtcagagatgaggacgacgacaatcaggatgagggtttgagcacggacgaccccctctccatcgtccgctctaatttcttcctcccccgtcagcaacccttgtagtctctgctaccgtcagcccgtacgcgatcaaagccccgctgcactgcggccaaccgtttctggcaccggcaccggcaccggatccgccgccttcgtcgtccaggatggcgatgatgagccggacgcgggatctgctgatggaggggttcgaggggctggtgcgggatgggtcgttcaagtggggcctcccccgccgcggggacacggccatggacgacggcggcgacgacgacggctccctctccgtgcagcgctcctccatcgctggcctttccttcaaggccaacgccgtcgtcgcccgctgctcccgaatccttggcgtttctaccaatgatctacaaaataactttgataagcaagcatctgattccataaagcagccaaaaagctacgcaagaaattttttggagtactgctgcttcctggcacttgctcagatatcacaagtgacagggtatcttgctgacaagagctttcgccgcttgtcttttgacatgatgttagcttgggaggttccctattcttcaagccagctcactgttaaggctgaggtagatagcacagttagctcagaagcttttacaagaatagcacctgccatcccaaccattgctgatgtagtaacttgtgcaaatctctttgatgtactttcatgttcgagcggaggccgtctttcattttctgtatatgagaagtacctttcagaattggacagagcggttaaaaagatgaagacacaatctgagtcatcacttctatcaaactttcggtctcagagaggagaaaggattctggaagttgatggtacattgacaacacaaccagtacttgaacatgtgggtatttcaacgtggccaggaagattaatactcacagatcatgccctttactttgaagctcttcgggttgttacctatgataagcccaaagtttatgagcttgcagaagatttaaagcaggttgttaaacctgagctgactggtccatgggggtcacgtctctttgacaaagccgttatgtacaaatcaacaaccttaacagaacctgtgatcatagaatttccggagttagctggccattctcgccgagattattggctggccattatatcagaagtactttatgcccatagatttgttaggaagtttgatataagcggaattgacaaagaggaaacaattctgaaagcagtacttggtattatgaggttacaagccattgaagagttacattttgaagttccaaatcgttatgaatctcttttgttgttcagccaatgtgacaaacttcctggaggtgatgttatacttgaaacattagccagttctatagcatcaagaacttcagatcgaactaaccaacctggcacaagtagaggaatgcatgctgtcctgtcaaacctgggcatggtatcaccagttaatagtggtgagcgtttgtttgttggtgagattgttgttggggaaattagtgccttgcagaaggctgttactgattcaatgaacaactataagaaagttgaactggcccaagcgtcggttgatggagtcaaagttgatggtcttgatacaaacttagcagtaatgaaggaattgttatccccggtaagtgagctttggagggttttgctattgctcacatcatgggacgagcctatgaagtccatgttgttttgcttcctattctcttatattatcatcagggggtgggtaatctattttattgtcacggtactattgttttcagcaacttttatgtttctcacaagattaactaatcaaggaaagcaaatgagtgaggtaaaggtggtatccccacctccactgaacacaatggagcagctcctagctgttcaaaatgccatttctaaaattgaggagcttgtccaagatgcaaatattgttcttctgaagataagagctctattgttggcttttccatcccaggcgacggacagggctattctggcattggtactgatggccctgagccttgccatcgttcccacaaaagtgcttctgctgctggtgtttctggaggtatccacgaacaactcaccactacgaagagcaagcacagaaaggtgtaccagaaggttgagagagtggtggttcagcatacctgcagctccagtggtggtggagaaagagaaagaggacaagaaaactagatgatacatccaatgtaatctttatgttgcttggctgatacgttgtgtaacgtatcagccaatgcccacctttgtacaaagaccgcaatatcaacaacgaggggcagtttcaatgaagatttcatctcacttgtaccacctgccctgtttacatggctcttgatgctttgttgcaagttgactagagctgaggccggtgtcaatcgccgctaataacacaaatccctttctctgggttggacatatcgccgtgcggacctgcgccccttcgtttgtaacatgaacagtattgattcttcgatattatgggattgcttctct

SEQ ID NO: 91000 - DNA, 1063 bp, Zea Mays
ccccgaccggcagcgtatatacatgacactgtccatgacggcccccgcgatggcagcagcgccgccggcctgctcccccatggcggccaggctgacgatgccgccgctgccggacgccgcggcgccgctgtcggtcgtgggctgcaggcgcgtggcggccaagcacaaggccgtcgtggtgctgggcgccacgggcaccggcaagtcccgcctggcgatcgacctcgcgctgcgcttcggcggcgaggtcatcaactccgacaagatccaggcgtacgccggcctggacgtggccaccaacaaggtggggcccgccgagcgcgcggcggtgccgcaccacctgctgggcgtcgtgcacccggacgccgagttcacggcggcggacttccggcgcgaggccgcgggcgccgcggcccgcgtcgcgtcgcggggccgcgtgcccatcatcgcgggcggctccaactcgtacgtggaggagctcgtcgagggggaccgccgcgcgttccgggagaggtacgactgctgcttcctgtgggtggacgcgcggctccccgtgctgcacggcttcgtggcccgccgcgtggacgagatgtgccggcgcgggctcgtggacgaggtggcggccgcgttcgacccgcgccgcaccgactactcgaggggcatctggcgcgccatcggcgtgccggagatggacgcctacctccgcgcgggcggccacggcgacggcgacggcgacgagcaggagcagcgcgcgcgcatgctcgccgcggcgctcgacgagatcaaggtcaacacgtcccggctcgccctgcgtcagcgcggcaagatccagcggctggcacgcatgtggcgcgtccgccgcgtcgacgccacggaggtgttcctgaagcgcggccacgccgccgacgaggcctggcagcggctggtcgccgcgccgtgcattgacgccgtcaggtccttcctgctggaggagcaagagtacagcagcagcatggtcaccgcctccatgtttgcctccacggcggccgcggctgtctagcctccccccagtggctcaccagct

SEQ ID NO: 91001 - DNA, 824 bp, Zea Mays
tgagggaattgcataatgtcatcgaggatttggagttgatgttataatgacatcaggatcttgaaaaaatggaactcattttgttgttttcttgttatattatcttttcatgattacgtggtgaaacagtaatgtgtatttttattggcatttgcttgataacataggatctgaacactgatgtgatgcgctaaagaagcttgataagcactaggatattgtcgtcaatatttaatgagatgagcctattattgatacatatgatatggcactaggatattgttatattatcttctccaacagaagcgtcaaactcaagtggtgttagtccaagattagcatcgacctcatagcacctatggtaatttattagatttcaagtttggctccaaggtacagctaacacgccgctcgcctcctccttttcttcctacatcccctttggttcgcaggtggagaccaccgccactcttgttgatcccgtgtgcatcgttcaagcgcaaagcgaatttgcctaccacatcaagttctaccccgatctacaacagtcactgctcttcaggtgatctggctattagttttcagtgtggcgtgctttggtggaatgtctctaataacggggcgtgtatcaacgatagaagaacgactcggggtgacaatcaccatcataatcctgcaacttgtctttctcaagtttgactgcaagatattgcttctaattgattctccatctaggatctgggacatcaacactatcagttaccttgtcacgattatatgtttccttgtcacgagcaattgcgagaggtaaaggtacttacagc

SEQ ID NO: 91002 - DNA, 90 bp, Zea Mays
gatcaggcttccaaggaatcagacaaagtaaggtgtccgttgtcaccacgtcgtcctggctgtcgatgtcatgtgcgtagtctcccaaac

SEQ ID NO: 91003 - DNA, 678 bp, Zea Mays
ccaaccctcggtccacgccattatcttgttggtccatgcacggcagcggcaggtgttcccggcgagatcggttgcttccagggccacgtaaaacgatcgagctgcgctgccagggtccggcgtcggcagcggcagagcgaggcagggcatcatgtcaatgccatgggcgatgaccgtgtccgtcgtcgacatggcgttcgcggcgctcgcggcgtgggtatcggcgtgcctcttcgccgccgccgccgtcgcccgcgccgcccggaccggcgtgatcggccgcttgcacatcatcgcctaacgccctcatgggggctcctgctgtctgcgtgagcgtctcctccgacgatccttctctagctagcgaccggtacctccatgtctactggattccgtctctcttccacagtgtctactgttttatttttgtgcattgttttgaacagtttaatactcctggaccacatccattattatatatgccgatctgagcatggcattagcgctgaccgcgttcttttccacaatcttttcggttttgtcgtagtgatgagtacgtgcaaagccatgctcagattgtccagaactggatatatccaattgtgtaattgtgtttatcctcactggcatcgatgtaatttctacgatatgattatacataaaaaaaaacttatagaa

SEQ ID NO: 91004 - DNA, 924 bp, Zea Mays
atacttacctggacggggtcgacgagccgtcaagatggcccgtggcctaggtcagtggcccttattgcactccgagggtgtgctggcttaccatctcccaacgggagagtggacgtcgtaatttgttgtagagggggtacgcgttcgcgcggcccctgctaaatctactgtgttgaatatttttgtcgcagacgcattcttttgccctgcgttctcgtcggcgcaaagccgtctaggacactgacgtcccgtcgccagctgtgaacgttcccactgacaccgtgttcacaacgtattcttttaccctgcgttctcgtcggcgcacagccatcgtacatgcgagggcttcatgccttcacgcttctctctgcgcgactgcgtcaacgccggccagcgtatcaccggggtccggggacacagccacctccttctctgcggacgacgagcacgcacgccatgggtggatggaggcagcgcctgatggggagggaggttcggggagcaagtatgcacagagtggatggagacggtacatagagaagagacagtggtaggttgcagatgtacgtggtggggagacacggagaggtaggggacgtacgcgcacgtggacgggagggcgacgccgacgccgacgaaaactacgcctatgttggcagatgaagcagacacaccgtactgagaaaactatgttggttgatgtgatttaatcgtcttttccaaggacgagatacttgaggtggctggcaaaatacacgaggcatgggtgtccccattcttgtcatcgacactgataacaagtatgtatccataggaatataggatttgccaacgggaattgtaagggttgcgcaaggtacgcgtacgcctgtaatggcgaatgaatataatgcttttgacactttagaaaaataccacaattca

SEQ ID NO: 91005 - DNA, 3054 bp, Zea Mays
atgtcgatctgcgggtaccactccccacgcttctccgagaattgtgcgtttgtcgggcacccttcgcaggagcatcaggattgtcagaacgccactgatggttatagcggcttcatcttgcacttgtcaggagatgaggacacggtggttagttcaccggtcagcagcaatgtgctacctttctctttgcgtgtgtcttcagaaagtgccgcacaaccttccctagctgaaggcagtggcaatcctcagataccaaactctggtacgtgcaatggtctatccgagagcctctgtgcagatggtgaagaacaagaggtcaatgctgtctcccagaatcagtttgaggctaacgatcctcaggttgatatgccgacaaaagtggctcgcaaggagatcagtatacaacctgatacaatcagacatagaagacatggtttcaatggtggaaaggttgatgttcgaaagcttcgtaatgttgatgtaaatgatgcgattgaactatcgattgctgcatctgaggccatggttattgcagagatgatacttgatgattctcagcctgataaatcggctgcagctgctatagaagctgctctacacgtgaaagaagcccggaagcaattctactttgaggagccacaacatgcttgtggatcctcagaaggtggtcttgatgagattgattggcttgcagaattggatgagtctgaaatggttgacgcataccaagatgttgctctgtccctcatccacattgcttgctcatctcaagatcataacacaggtgatttgaagcaacaaaattcccatcctacttgtcccccatgtgatgcagacacacacatcttatgggattcttcttctgagaggcaaaataaaaaatggaacagccaaaatgctgatagtgatgaccatgtatctgattcttttccaaacaatcagtcagcaggtgtgccaccaaatgaaccaactccatgctctgcctctgtaaagcaagcagctctatgtaaaacaatttcatgttcaagaaataagaaaactgtcctccaggcgtcaactcaaaacaatgctgcttttcatggaaccttgggagctcttgcaacataccaaaatgttcataagaaagttgcaggagttgctgcacagacgaatgttggtatgaagaagcgtgtaaaaggtttgtttgaggaagaaaatagctacatttctgattcaattagcacagataggcgctgtcctacttctagagcatcatccatggaaattgtcgcctcttcaagggcatctttgtattgcaaagctgaaggtttacttgaagaaaatcatcatcctggaactgaagagttgtgttgccaagtagtatgttctagcttgtcacaagtggatcctttatgttccattgttccatgtagcatatcttgcgatgaaggtcccagtagccaggctcctgtgtgcaaacagagtgaaggccatgaaggtcccagtaaccaggctccttcgtgcaaaaagaacgaaggcaatgaaggtcccacttgcctgacacctgaacgcgaacatagtaaaaaaaaggaggaagaatttatgcataccaaagaatttcctatgatgcaatacctggatgaggaggctggtccatcttgtgtgcctttagttaagccagcagattctaatgttccattccggcgaaggaaatacagttcactaaggccatttagcacaatagcaactaagtcaaacatatttggaagtacatcaaattctaatgctgatgttccagtttgtcagcttgagagattcacacccattgttctaaataagaatgtacagcgtgtgcaagctgccaaggaattcatagaaaatagtgctggggctgaaaatttggaagatttctctgcagttcggaagcagacatattatcctcaggatggcagtgaggatcaaatcagggagctacaggtcccacgggaagtctttccgccaacagagaatttggttgttaaacagcaccttaaaagaaaaagggtccaattttcagaagcaaagcgtagtagcagaagaaccaagaacaatagaaggatcctgactaaatcaagattcagtcgatcagatagcagaacaggagagatgcttgagaccagagagtacactgataacaaagaagacacatttcaaggagtagagtttctgttgactggatttcctaaacagaaggaaaaagaaattgagtccctaatacgaaaatctggtggctatgtactttctaaagtgtcaccctttccacttgataaaagaaagaacatggctgagtttccaagctggaatcctcccatagtactttcgcctaaaaaggtgtcaacagctaagttcttatatggctgtgctatagatgcctggatattgaatcccatttggctcttcgattctcttcaagccggcatcatgctgccacctggaaagtatttaattcgacaaaggaatgcccagaagcataattcatcattcgaccgcccacttcacccaaaatgtaatacattgatatttgatggagtaggattcttgatccacggcaaaatcagcttctgttcaaaattttccaacattgtcaagcatggagggggccaagtttttatatctcttcagggattagttcaaagcttgaaggatggaagtacatcgcgtggaatcattcttattgcaaacgcggctaagcctaagactgatatctccctaaaactgcctttggcaaagagaggatgcaacttcgcgaaagcctgctggaactcaattggcattactccgcccagaatttctaatcctgaagaggcatcagcgaacctcaaacaccagctcaacgttcccttctctatggagatcattattctcatgacatggagcatctggaaaagccgaaacgagtggctgttttcaaacaaagatccctcggtgctccgctgtacacaggaatttagtagagaaatgcgattgatcattcacagagcgcgggggaaatttgacacctctatcccgaattggctaagcctgtggcaaacatag

SEQ ID NO: 91006 - DNA, 577 bp, Zea Mays
gcaattttgtcgactggcaaggttacagagttgtgtacaagaggtatgctagcctttacttctgcatgtgcattgaccccgctgacaatgaactggaaacccttcagatcatccatcactatgttgagatattggaccgctactttggcaatgtctgtgagcttgatctgatattcaattttcataaggcgtactttatattggacgaaattttgattgctggtgagcttcaagaatcaaacaagaaatcggtgctacgtctagtaactacacaggacgctttggtggaagccgcaaaggaggaggcaggctcgttgaggaacataattgcacaggctaccaagtagagcactcgtgtcttctacaatgattactcacacccccacggcatgatagtagcttaatcactaccttacggggcagcagcttttacccctgatttttcctcaatagtttatcccctcttccatctctgcattttgttcagaggtctgttctgttctgtcactctctctctctctatctctcttgttttcccactgtaccacctgtttcgagggaatgtgttgtttctgct

SEQ ID NO: 91007 - DNA, 696 bp, Zea Mays
atcccatctctcctcactgtccgtgtcgctctctctctccccatccatcaaatccgcttcgtcatctcgcttgcagtccaaccaagtcctaggaataacaccacggcgcaacaactcgcaccaccaccgccgcgcagtagctagctaccataccagctgcacgcctcagtgctagcttcgccgggcgggggcggctgggacaccagcagtgcgtgctgcgctgcgctgcgcctctccctgccactcactcgaggagcaaccgtcccagctgcaagggcgacaagaggatcgaccagctgctagtagctagctcgcacatgttcccggtcgaagtgtcggcgctcgcggcgggcggtgcgggagcggggcgtcaggctgccggcgacgccgccgggacgatgctgccgccctttttcatgggctccatctggcccgcgaccgctggcgccgctggctccgaggaggacgaggcggcgacttcctcaaggaagccctgcgggctctggtagagaggccaggcgccgccggagaccggcccaagaggcgacgggtctcggacatgaacatgcaagcggcagcatagctagcacgccgccgcaggaggcgggcagatcatctcgctcgattggtcgtcgtagctcaaatacctaattgcatgcatgctcatgtcgaatatataaaaatggtactacctcc

SEQ ID NO: 91008 - DNA, 1421 bp, Zea Mays
accaagtcctaggaataacaccacggcgcaacaactcgcaccaccaccgccgcgcagtagctagctaccataccagctgcacgcctcagtgctagcttcgccgggcgggggcggctgggacaccagcagtgcgtgctgcgctgcgctgcgcctctccctgccactcactcgaggagcaaccgtcccagctgcaagggcgacaagaggatcgaccagctgctagtagctagctcgcacatgttcccggtcgaagtgtcggcgctcgcggcgggcggtgcgggagcggggcgtcaggctgccggcgacgccgccgggacgatgctgccgccctttttcatgggctccatctggcccgcgaccgctggcgccgctggctccgaggaggacgaggcggcggccgccgccgccgcccacgaccgcgcgctcgccgcgtcgcgcaaccaccgcgaggccgagaagcgccgtcgcgagcgcatcaagtcgcacctcgaccgcctccgcaacgtcctcgcctgcgaccccaagatagacaaggcttcgctgctggcgaaggcggtggagagggtgcgggacctgaagcagcgggcggcgggcgtcggggaggcagcgccggcgcacctgttcccgacggagcacgacgagatcgttgtgctcgcgtcgggcagcggcgccgtcttcgaggcctccgtctgctgcgacgaccgctccgacctcctcccggacctcatcgagacgctgcgcgcgctccgcctccgcacgctccgctccgagatggccaccctcggcggccgcgtccgcaacgtgctcgtcctggcgcgcgacgtcgtcgacggcggcggcggtgccgtcgcgggaggtgatgacggatacggtggacgcgctgctgactcggcgggcggcgccacggacggcggcggcggcgacttcctcaaggaagccctgcgggctctggtagagaggccaggcgccgccggagaccggcccaagaggcgacgggtctcggacatgaacatgcaagcggcagcatagctagcacgccgccgcaggaggcgggcagatcatctcgctcgattggtcgtcgtagctcaaatacctaattgcatgcatgctcatgtcgaatatataaaaatggtactacctccatcatctccatgtttagttagatgtcttcatgatgctagctagatgtcttcatctcccattctcatgcatggctttcttcttgagatgccataccattattagggatagtatggtattgctattagggtttgcttgagcttgaaccaaatgttgttccaaagccaatgcaaatctccctttgagctataataacaaaaaagagtcaagcaaaggttgcggacttgttacccaactagttaataagcaatatatattctaagcaatatatatttggataa

SEQ ID NO: 91009 - DNA, 101 bp, Zea Mays
agcatgttggtagttccaatcttttcagagcagagcaggaagcacaggtttctacatcatatcgagatattctaccagcgagcaaaaaaaaaaaaaaaaaa

SEQ ID NO: 91010 - DNA, 917 bp, Zea Mays
gaaccgcagaagaggcggccaggccaagcattagcaaagcataccccaaaatctccaaaccctaggcgaactcggcacggcggcgatggcagcggcgggcctgcggaaggggaacgcgcgcctcccacccgaggtgaaccgggtgctgtacgtgcggaatctgccgttcaacatctcgagcgaggagatgtacgacatcttcggcaagtacggcgcgattcggcagatccggctgggcaacgccaaggacacgcgcggcaccgcctacgtcgtctacgaggacatatacgacgccaagaacgccgtcgaccacctctccggcttcaacgtcgccaaccgctatctcatcgtgctctactaccagcccgccaagatgtccaagaagtcggatgtcaagaagaaggaggacgagatcactaggctccaggagaagtacggaatagggtccaagacgcccggccctggctccaccgactgagcggccagagtattgcctctgaagcctctttgtatgatgaagagtaatcagagggaacaaactggtagcactgtgctgtgtttcatccagtgttgctaattactctgtgttgttattcggtcaattgaatatatatgtgcttaatgtgctacaatgcttgttcctttcgtgcttttgtaatcgcccatataatgttaatcttttctactagaaacaagatgaatgggttagtatgtgcctgttgctaggtttgcattggtgatctgtattctgtaatgagactgggagtagcatggttaggctgttaaatttgggctgagtgtctggttagttagtatcttttttggggagctagtatgtgttagtgttaccatatactaaaagttcaagtagaatgatgttggtgtgctctatgccaaattaaaatgaattttcagag

SEQ ID NO: 91011 - DNA, 1981 bp, Zea Mays
aaattccctacggggtgaagccttgtgtttcttccaagcatccaaagagcccttagcaattccccgcgtcggtgatcgggcccattgccatctgcccatctctaccgacgaccaactgaactgaccgagtgagcgacgccgacctcgggctggtcggggcgatccggttccaggcttccggccatggcgaagccgccgcgggcgccgaggcccaaactgcagacgccgcgggcgccggcccggcggctcctcggcctcggcgggctgggcgtcgcggcggcggcgtacgtgggcgtggactacttgcggcacctctcgccggcgtggcacggccggctgcagccggcgctgtgggcggtgctggcgctcgcggccgccgcgcgcgcgccgttctaccgccactggtccgcggagctgcgcgccgcactgcccttcctgggatccatcgccttcatgctcgccgccttcctctgcgaggccatctctgttcgcttcgtctccgccgtcatgggactgcactggcacagaactgccgcaccgcttcctgacactggtcaatggctgcttctatcattgaacgagaagctccctcagagcgtggtcgatctactaagagctcatgttatcactctccaccattatctgatgttgtttatcatgctgggtttctcagttctgttcgactgcatcaaagctcctggtcttggtattgccacaagatacatgttcactatggcaattggtcgtgtacttcggacgataactttcatcgctaccattcttccatccgcaaggccttggtgcgctgtagcccgttatcaaatacctcaacatcctcatccttgggcacagaaatattatgttccatatgcttctgactcgaatgctattcgcagagtcataacacaggatatggcatatgctgctgttcaagcttacccagatgaatataagcccgattggggacgtatgagcttccttgtagacattttgagaccaactcctggagaagggccttcgtggtaccatcttctgaagaaagctagtggcggctgcaatgaccttatgtacagtggacatatgcttgttgctgtcctgactgcaatggcgtggacggaagcatacgggggctggatctctgtcgcgatatggctcctcgtcctgcacagcgcgcagagggaggtacgcgagcggcaccactacagcgtggactgcgtcgccgcgatctacgttggcgtcctcctgtggaggatgacggggttcatctggtccgccagagacctggcccgagctagacggctagccaagctcgaggaggtccagagcaggctggtccacgccgccaaggacagcgacatcgatgagatcagaggcctgctgaaggaggtggagctatccggccaggagaggcagggcttctcgcagagggcgatcctggccttcgccgcaggaacgatcatcttcaccttgtcttgtgtcctcatcgccttcacagctactagcgacggctgatttgggttctgttgcatgcccctgggtctgaatgttagccactttctcctgggctgcactgttttcttgtagtatgttgactgttgagtgtcgttggttgtggggaaaccatgtttaggactagtttgagaatctcatttttacaagggatttttatttttctttagaaaactagttcattttttcttgagaaaatagaaatcttttttaaaaaaagttctcaaactagcccttaaacggaaacgtaactagatcctagcggtgccagaattcatggacgttttgcagctgcacggggagctggtggctgtcggtaacattttggttgttgtagccaagttttacttaaacagaggttgaggctttcattccttgcaacgcactgtaggccaagttttatttctgttatgtattttgtagtgaggcggttcaaaagtttcagtgtagcggatccttgcaggtccaaaag

SEQ ID NO: 91012 - DNA, 1685 bp, Zea Mays
tcgacaacaccgcgcgcgcaatacacgggacacacacgcagatccgagctaaccaccatcgacgagcgccagccgccagcagccgagccggagcgaccttttcttttttcttttacacagcgggacggagaaaggagtcaatcagccaaagccacccaccgcttttacccaccgatcggcgttgccgccgctagcattgtcggcttcagctccatccaaatccaccgccagcaagcaagcaagcaagccggcgccatgggtctgccgatgaggagggagagggacgcggaggcggagctgaacctgccgccggggttccggttccaccccaccgacgacgagctggtggagcactacctgtgccgcaaggcggcggggcagcgcctccccgtgcccatcatcgccgaggtggacctgtacaggttcgacccctgggacctgccggagcgcgcgctcttcggggcccgcgagtggtacttcttcacgcccagggaccgcaagtaccccaacggctcccgccccaaccgcgccgccggcaacgggtactggaaggccaccggcgccgacaagcccgtcgcgccgcgcggccgcacgctcgggatcaagaaggcgctcgtcttctacgccggcaaggcgccgcgcggggtcaagacggactggatcatgcacgagtacaggctcgccgacgccggccgcgccgccgccgccaagaaggggtcgcttaggttggatgactgggtgctgtgccggctgtacaacaagaagaacgagtgggagaagatgcagctggggaagaccgccgtcgccggcgtcggcgccaccaaggaggaggcgatggacatggccacctcgcacacgcactcccactcccaatcacactcgcactcgtggggcgagacgcgcacgccagagtcggagatcgtggacaacgacccgttcccggagctggactcgttcccggcgttccaggacccggcgatgatgatgacggtgcccaaggaggagcaggtggacggctgcagcgccaagagcggcaacctgttcgtggacctcagctacgacgacatccagggcatgtacagcggcctcgacatgctgccgccgcccggggaggacttctactcctcgctcttcgcgtctcccagggtcaaggggaaccagcccgccggagccgccgggttgggacagttctgagctgaggcgaggatggagccatggatcaggagatgaagacggttgcgaactctgtaaatacagcataggagtcgaacctgaccctgacccttgttggggttacaaggttttccgagtgtcggtgtagcgtacatggagccggcggcgcggccgggccggctcattctttagtttcacttccaaagcagacgggtagatatatgtgtagctgttcacttaaactctcttcgacagaacaaccgacgaaattttgctcttgtttataagtactacctcgactgtcgcttccctttgtctgtctcttccctaccctgtgttgtatacttgtattggcatgcttgcagcgaccacggggacagcggcgggctcaggcctagatgtgtcaacagagatccgatacccgataattttcgaagattttaatctccatgtacagatctggaagaaattcttctccattggatatgaatatgtgtacgaagattttaatc

SEQ ID NO: 91013 - DNA, 115 bp, Zea Mays
ccgaacaaaaagagacttaggagtagcagaacattatccgacatctgccaaatctgtaacacagacatctaccaaataaagaggctacgagtttacagacacccgccaaaaaaaa

SEQ ID NO: 91014 - DNA, 1357 bp, Zea Mays
attcgttattacattagaaggatatgcctggcgcggtagtgagaaacaaaaaatgcagggggttggcaaacgtcttcgacctcttactaagcaccctcactcgggcattcaggcagtcgcatcagacctttttgggtactggaaaaaggttgtccttgaagagacaggaaagaaaaatgggagctcagagaatgaaaaatcaatggactcttcaggaaaggttgagaaggtgaggcccatgaaggttgaaaagaattctgcatcagcaagcatgaaggttgagaaaagagatgtggatgataggggtcagaagcctgacaatgtcaaagttgagaagaccgctagtaatggttccagaactcaatctgtgaaggtagaaagggtatccaaagaagtcaacagaactgatgcaaagaagccagcatctgtccccaatggtcccccaaagcttacatctcttgtcaaatgcaatgatcctacccgagataaaatccgggaactccttgctgaagcctttgcaaaggttcccagagagactagtaatgatgaccgagatgaagtgagaaacatcttggatgaagttgatgcatgcgacccattcagagttgctgtgacagtagagtctgcactatttgagaggtttgggcgttccactggggcccacaaggcaaaatacaggtcaatcatgttcaacctgagggctgaaaacaacactgattttcggagaagggttctcattggtcaagtgaccccagagaggcttccagacatatcccctgatgagatggctagtgatgcaaggaagcaagagaatttgcagatcaaggagaaggctctgtttgactgtgagcggggagcagcaccaaaggcaacaacggatcagttcaaatgtggcagatgtggacagcggaagacaacttactatcagctgcagactcggagtgctgatgaaccaatgacgacattcgtcacatgtgtgaactgcaacaatcactggaagttctgctgaatggcagcctgctaaaatgtttgtttagttgcgctgagcacccagctgtaatttgtgctctgttagttagctctgcgactcaaagttcaacagggcaggcggaactcagttttttttcctaaactaggagccgttatactcttcctctgttagtcgctctttgtgattctgattcattcagattgtactacttgaacgcataaatgttgtaaacttgatcatatcatcaccagctgtaccttaagttttggatggctatgtggttcattgtaaatgtgattgtttggttgttttacagttgtgttcatgtttgctactctgatggtgttttgctctctttttgtttcc

SEQ ID NO: 91015 - DNA, 246 bp, Zea Mays
atgctcacgtcatcgcagaacctcagcaaatgcgtgaagttgaagaggggcttggggcctactaccggtactgttgtagcctatagccagcttgtactttggacattgcttgggacaagaccagaaggcccattgccatcagcaacctttgccaaggaacggtattgcagcttcacactctctgcgttgtctgaagtcttcacaacataccatccatttaagcactgcgctgtcacaactgcttga

SEQ ID NO: 91016 - DNA, 120 bp, Zea Mays
gctagccaaacgttaagatcattcgttaccgttattaagctattttccacattaataattcaatcacggttaataaatgagattaatctataccctctattcttaacaaagaaaaaaaaa

SEQ ID NO: 91017 - DNA, 581 bp, Zea Mays
tctgggccatctaggacagacccaaaactaggcccaggaataaaccgagcccatcccggtgcactataaaaaaagttggattcttcgcgtcccccgacaccttccccgcacaccggttgcgatccgccgccatcgcttcaagcagcgaaccctagccgccctcagcgacggattgcagatctcccagccatgacgttcaagcggaggaacggcggacgcaacaagcacgggcgcggccacgtcaagtacatacgctgctccaactgcgccaagtgctgtccaaaggataaggctatcaagcggttcttggtgaggaacattgttgagcaggctgctgtgagggacgtgcaggaggcctgtgtgcatgatggatatgttcttcccaaattgtacgcaaaggttcatcactgtgtctcatgcgcaatccatgcgcacattgttcgtgttcgctctcgtgagaacaggaggaaccctcctcgtgcctaagttcaggaatgcgattcggggcttagttctctcacctatgggataatggacttttcctgttttgaaaaccaatgtactgtacccccttgatgtta

SEQ ID NO: 91018 - DNA, 1181 bp, Zea Mays
tctgggccatctaggacagacccaaaactaggcccaggaataaaccgagcccatcccggtgcactataaaaaaagttggattcttcgcgtcccccgacaccttccccgcacaccggttgcgatccgccgccatcgcttcaagcagcgaaccctagccgccctcagcgacggattgcagatctcccagccatgacgttcaagcggaggaacggcggacgcaacaagcacgggcgcggccacgtcaagtacatacgctgctccaactgcgccaagtgctgtccaaaggataaggctatcaagcggttcttggtgaggaacattgttgagcaggctgctgtgagggacgtgcaggaggcctgtgtgcatgatggatatgttcttcccaaattgtacgcaaaggttcatcactgtgtctcatgcgcaatccatgcgcacattgttcgtgttcgctctcgtgagaacaggaggaaccgtgagcccccgcagcgtttcaggcgccgggatgatggcccaaggccaggtcagggcccaccgcgcccaggtgctgctgccacagcagctccccctgctgccgctcctcgtgcctaagttcaggaatgcgattcggggcttagttctctcacctatgggataatggacttttcctgttttgaaaaccaatgtactgtacccccttgatgttaaatttttagtacaatttgtggttcgttcttactcctgtcatccagtcagtgctgtgaaatcgttgtctgacttaattaatgttgctatgctaagctacgaagattttggttgcctgttgcaattgcatgtagctagcattaggtggtgtttgatttgatttgcaaaggatgtgcggtaagcacgatatcggagttccgtttgcaagggacgattgactgctgtgtgtagcattttgtagttactactacgcaaatttataaataaagttatgattagagaatgcttgcttggtacgtatgtatctagtctacaataatcaatatactctcccgttgctgtttttttttaaaaacactttgaccactcgttttattttaaaaataataagttatcgtttattttttgatttgttttattatttaaggtagtttgtgtttagcttaaaattttacatttttgaataagatgggtggtaagtcaatggagctatatatttg

SEQ ID NO: 91019 - DNA, 390 bp, Zea Mays
atggatcccaagcagcagctcgctctgcggccgatctccaccaggagagccggcagcagcgtcgccggcgaggcggccgcatcgttccgcgtctactacagcctgcggccccgggccgtgccgttcctgtgggagtccaagcccggcacgcccaagagcggcggcgccacggctgccgtgtcgcccgcgcccgccgagacgacggcggctcgtcgtcagctcccgccaatatcgccgccgccgtcgtaccactcctcgtcccagctgaagagggggaggaggtgccggccgagggcgtcgtgccacgcggcggttggcctcgtgagggcgctgctcgccgcgctcggcgtcaggaggccgcaacggcgccaagcagcctcgctcgtttga

SEQ ID NO: 91020 - DNA, 342 bp, Zea Mays
atgaccggcaactgccgcgggccctcctccgccttctgcctcctctacaagttattattcaccatgaagctcatcgtcaaacagacgcacgacctgctcaagcaccaggactccccctacatcagagttattgggaaagatttcagccaggttgtcaatttccttgtccgattcaagtccatttgcagcatagccgagcttgatagcttgaaggtttctggtgacgtctggtttggctctggaattacactcaaggttgttcttcacttgccttacagcggcacctatgatcagcttccatataactacagtctaagacgctctcctctccctaatccctaa

SEQ ID NO: 91021 - DNA, 699 bp, Zea Mays
atgcatctcgtcgaggatgacgacgagcgcgacgacgaaggcgtagtcgatccccgggttgacggtgacgctgtacgagttcttccccagcagcgcgctgaccacgctgaaccgccggtcgatcttggcgatgacggtgtcggagtcgccgagggagacggcgcaggcgccgtcgtggtagctgccggtgatcctgaagtcgcaggcctgctcggcgtcgttgctggcgaggaagacgctgaccttggtgggcccccgcagctggatcacggacggcttcacgacgctgaacatgaggtcccgccggcgggtgctgtcgccccggaacaccttccaccgcgtgttcagcatcagcgccgattcttggacggtgaggacggggcggcggtcggcgtcgacgagcacgcagcgccggcgcaggctgaagagcacgccgtcgacgcgcagcacgggcgcgcccgtggccgcgtccgtgacggcgaagtcgctgccggacatgctcagcgccttggccacggccagcgtggccgcgcccgccgcgcagaaccgcgcgtccaccaccgccagcgccgggaccgcctccgtatccatcgccgcgccgcgcgcaggcacgggctagggagggccgccgcacccggaccgacggctgcggcgaagggcggacgcgacgcgatgcgaccccaggctcgccaagtttga

SEQ ID NO: 91022 - DNA, 6755 bp, Zea Mays
atgatacggcaccagatacggaacgagtatgggctggcggatccggaggtgtacgcggccccgggggaggaggatgacccggaggcgctcctcgagggcgtcgccatggccggcctcgtcggcgtgctccgccagctcggggatctcgccgaaatttttgtcggtcacggctcgcctagcagcttatcttggcttctcattcatactgaattgtacatgtgcatcaggtttgcagctgaaatttttcatgaccttcacgaagaggctatggctactgcttctagaggacatggtttaatgctccggttgcagcagttggaggcagaatttccagcagttgaaaaggctattatatctcagacggagcactcaaattatccacatgatgatggagctgagtggcattctaatgttcaacttaaacagaatgtgatcacacaaggagatatgcctcgtttcattatggattcatatgaagaatgtcgtggtccgccacaattgttcacattggataagtttgatgttgctggtgctggagcctccttaaaacgatattcagacccttctttcttcaagacagaacatgcctccaacatgatagaagcggatgttttaattgaaaataaacctcgtagaattaagaagaaggccatgcgttggaggaaaggggcaactcttgaatcattactcactgcaaactcagagtctcaaattacccccaaggatcgaacttctagaaaagttccacctaggacaacaaagttgaaatccaggcaaccacggagtcctgatcataaaaccactagcagaatcttgagggagcatctgcaagaagtgattttatcgcagaaaaaaatcatctccagatattcggtgaggcattactatgtgaaatttggatcgcctgactcaagtgaaactgcacctccttttggagaaatggacagttttggcgcccttgttcaatcttctggtaaattggatctgacaaaagttgttccagtaaacgaatctgatgctgtggatactaaatctgaacccattgatggatcggcttatttggagctaggtgataaacggaatctggggaaacaacatgaaccttttcaacaaaatggcatggtccatagctcagaaaagctgccggattgtccatacttggatattggagaaagtaataacagatcacatttgacatgtgaagagaaaccccgattggctgaggttcctgctgatcagaaagatgttgatggccgcaggcctgatgacatcgtgagtgatcaagacaacttcattggtgcttctaatgacacggacatggaaaacaaagaaggtcttcaaatgaaaactgaatgtgatcccagtgccagtgttgaactggttgaattgaaccgtcacaacaaggaaggtgacaaagtattgtatgccgaacctccagaagtaggtcctgcaatagactcgtcattgggattggataatgcaagcaccaccaatggtccaaactctggttcacaatctggcagacaaatgaatggtgttgactggtccacagacgaagagtcttctaacgatgtggatctaattgacgtgagctcatcttctagtgtagtttctgaaaatggtgacgtacaaaacaatgattgtctcgttagttgtctacaacacgaggaagcgattcactctctgagtgatgatcatgctggtgctatccataattctgatgaacagtcaccgaatacgtctagcaactgggatgatatggctattggctgcaacaattacaccgagaaagtacatcatccagtggagcatgtccaggatgttgtactagatgatatttctatgatactgagcaaacctaatgatgtttcagaagacgaagataaaatcagttcagggaatgctgatgatttgtctctccaccctaccaaattgaaccaagaggaaatacaggagttgaagacagaatcggaagaaggcagatctctagaatcaggaagttcacctagcaaagcatcattgccaaataaggatcatgtgtcgatgaatgatgtagaagccgacactgttacaattcctaaagaaactgttgcagatactgcaccaacaggtttggatcctgatggcatcgacgagcgtcaagatggagttgcaccgaaatattcaagcatccacaatagtgtactgtatgaatcatatgatgacaagattgctgaagacacacactctttactagatgatggcctatcaactactttcgatgacgataagcatgttgcagaggatcatcaatttgttgttcttgaacaaaggacttgtccaactagcctcaacacatgcaaggatgattctatgcaaggatgtgccgtggccagggatttcactgatgctgaaaagcttccgggagtcgtttcaggtgtattagcttctcaactggagacagaatctcatgtaggagagacacttgcatccacgtcctatgcattcagtgatgatactgaagcactagagattggtgtccctctagcccctggtacttcctttctacctaacaccagtagttccttggtagaaaaacatgaattgactgaaacagaagaaattgcagaggttggtgaatttgtggttgcaaaagaatcaactactagcgtatttgcagttgatgtggtacctcccaaagagttcattgatgctaacatacatcctgaaaaggtagaggttctggctacaagtttgactgaagaagccactaggctggatttacaactacagtctccttccagggaagttttggaaacaacggaagctattcacagaaattttggggcagtagatgaatcaagagaagatatctctaagaagagtatgttgcagacagacaatagtcctcttattgtagagactacaagtgaaaaatgtagtgacagggatggtgatacacaatttctagtaaaatctgattatcaagaggaattactaaaagagggcagtcataatgctgaagatcgatctctctgcgatttgaacaaggatggtgcagtaaccttgaaaagtaatgcagttgagaaacaaccagtgaatgctggtcaagatttggcgtgggggatgcacgctcaagattctagtagtacaaacccgttcctggatcctgcctacttgatgagccacactcaaatttattcatcttccagtatgagtagccaaccatgtttccctgaagaagaggatttcctttcagagcttgtaatacaacatgacaatatgggagtaactgctgatgccctttgggaacctgcaactccacctgatgatgcgccattaccatcagaaattatgactgaagatgatttcagatccttctgccaagaatatcatgagatagatttttcatctgtcactaactgttctcacagtgaaccagcctcagattctaacaaaattccaaatgcttttctgatcagagagtcagattttccatgttataactctgccttgccagtgaagttagatcaggaagcctgtattcattctaagttctgttctgagtgtgtcgaatattcatgtgctgtggaaagacaaggcactacatcaatggttgtttctggtaaagaagatcgcgtgggcaaggacgagacaccaggagtagatttccatttaaattttctcgagttttccaatgataacagaagtcctgaattaaatatgctctccgttccagtggatttacggcaggaactgcatggcttgcctgaagttgattctcgtgatagttcccctttgctgcataaggagaagactagtgaagaatgctgcttttctttaagcaacaacgttgttgaagtgaaacaagagctggaaatccgtgctgaccttgttccacattcttctattaatgaaaaagtagatggattagatgaggctgtaccggtggaaccagaggcccatgcctgtgccttggatgaatatgacaaccaagatgtcccacacatttcaactagtgagaagaatgaaacccttactttgggcaaacctgttttagtccaggggccagaagtttgtgcctttggtggatttgaatgtgatcctccaatcattccatcaccttcagttgatgagactaaggacaatctagaagtcagaatgaatatgatcctccaatcattccatcattctttgaggacttcttttcaagcagaacagaagtcagaatgctacacctcaggtgaacatgattctcaaaccgttccatttcctttgcatgatgagaatatcaatgaactggatgatcctcctttgagcaatgctgacgaactggaccgggaatcaaaagcttgtgttccacatgaatgtgatgctcaaatcgctccatgttcaactgatgaggatatacatgaattggatcaccctcctttgagcagtcccgctttagtggatcttgaatcagaagaccatgtctcggatgaccgtgattccgaagtcaccccatgtttggttaaagataagattgatgaatctgtagatgctcaaccaaacctgcttcctggggagctagagcaggaaactcatgcaccccctgaattagactttcgagttgctccacaatcagcgaaagaatctgattgctcaactgaatttgattcccaggccgcaccatgttcttcaaatataccagtactagctaacacaacagtgtcgacttgtatttctgccatgcctagcagtgaggaaacgtatcagttgtctcctgttccaccacctactgtacaatttcaaaatgattcctacaaagatcctcaagctctactcgctgattcctacaaagatcctcaagcgccaccccctctccctcctctccagtggaggcttggaaagcctcggctaggacttctgagtagaaaaggctgtatgactgaacctgcaagggtaatagatcctgttttgcagatatcaagccaagagatggatattaggccaggtttgcttgatccaacggatagatctatagaaccagtatcctgtcaagaaatcaaagaagatagatgtgagagttctttgatagatcataatgatcaaaatgtggattttgatagattatcgaccagggttgcagtaactgatgttgcaaggactgaacacaggctatccttagagacttcagaggacattaagcaacaggggcatatttcttcatcggcaacaggagttggggaacacctggatgctgggttcacatcaacaatggcagatgaggaacatctggatgattctgggatgacacatggaacagctctatacttatcagaccctctgtttccattacctacatatgaactgcaggaccctcaaccagatactcgagaaaatagcgagcatcccagtcaaacacatggagctgcatctggggatgataagtcaatggatgctgttggcagcatggaaagcaccctaacaaaaggacatgtttctggaaataggtgctaccagcaacctcagcatggtgaatcgtcctcagagacttcagaccataaagagcatattacaaatgcatcagaggatggtgttaagcatcagtcaggtacaagtgaggcaccttcagacacagcaaagcattctgcaccaggcacgctgttgaaagggaatgtccaagagagtcaaattttacaggaacataatgtggggagttccgaggacgatcaaccaggaggcctgttgtacagcttagaaccagtggcacctcaaggggaaaacaaaaaccaggttaacaacccaggcctgttactggaatggcctggagatacaagtgagttggtcactggccttgaaaaaagttgctatgcgcatgctgagcagccacctgtgatgggatggactgttggacctcagatgcttcatcctaaatatggtattttagaagaagagagccaatttgagcctaatatcgccgacaatcatttaatcaggaagcctatttcgataaaaaacatcccaaggaatccactggttgatgctgttgctgctcatgatagaagctcgatgagaaaggtttcagagcttgcaccaccgactgacaagccgaagcctaacgagagaaacatgttgctagaacagataagaaacaagaccttcagcttgaaacctgttgctccagctcagcaaacagcaatgagatcccctgctagaaccagtactagaaacttgaaggttgccgctatcatagaaaaggcaaatgccatacgacaggcagtgggaagtgacgacgaagacgcagatagttggagtgatacataaatcccccaccgtttgccctaccctcttggtgcttctttccatggcagaaaggtaccgattcatcaagagcattggggacaggatggggatgcacaaccatgtcatcgtttttgtttgccctaccctcttggtgcttctttccatggcagaaaggtaccgattcatcaagagcattggggacaggatggggatgcacaaccatgtcatcgtttttgttagtaatataatgctagtcttgtgtatagtatacgcccataatccttttcattttttgtatgtgtattctttcgaccgattgtttgtatacctgcctctctctcccacagcagcaaaggctgttgcggttggcatgatcctaggatagcatgcatggtctatgtaaattaaacagtagtagttaagtaaagaattgttccatcttttctggaaaaaaaggtgagataatggcatcatcgattccacacagc

SEQ ID NO: 91023 - DNA, 1236 bp, Zea Mays
acaatagacgtattataaactacggtttcgaggcccaaaccctctctgggtcgctgtctgctcccgtactcccccgtatctgccgtctgccgagcgagcggccgacgccgcacctgcccagctccgtcgctccgtgccccagccctgtccgcggccgccgagttgccggagcgtctggagaacgcccagccaagctctgtccccgccgctaccagcccaacgccctgttccacgtctgccccgccgccgaggacgaggcggccaactcgggcggtccggcccacgtccgccctccggatccggtcctgcgctcagccgccgaggcaggccgagctcttcctcgcccccgccctatcgagctccgcctacaccagaatccagattccaggttccagatgatcatgaatacaactcagaaagctaatttggtggaacaagatgctaaggtttttgtgaaacaagccccacagttcaaaaggtgggggcgaaaacatccatttgttcggtatgggttaccactcatttccttgacagtgtttggtgcagtgggacttgctcaccttatacagggcagcaaagaagtgaccaaggaaaaggaggatatggaatgggaggttgtagagacaacaaaagctctaagtcgaacagggccagtggaaggagcctataagcctaagaaactctctctagaggacgaactgaaggctttgcagcagaaggttgacataaacagctacgactacaagcccatcccaagacccagtgagaaataagtgaagatgaagaccgtttgctagtgcgtcgagtggatgtttgtttcttgatactttcgtcgtctcgtcttgtcacaagttttgtatgaatgtacggagctgattcaagtttgaaattagaatatgaataggaataagtgaagctgtagagaactggtacgaggatccttgaaccgtttgcatatgtttgtttccccccccccccccccccccccccttttttgggttagtaaattctgatgtgtctgatcagttttctagtgtttatttacagaggaaaaaatataaaggtacagtgcatcgtgttgatctagtttttttgtcgtattattaccagcttgtgtttcattttttttgctcttcatttgttttttattacacatttgtatggttctggcagacaaagaggtaataattcattttttactcacagtgcacataagcaaccggttgtgaatctaag

SEQ ID NO: 91024 - DNA, 816 bp, Zea Mays
atggtcattatgctaacttcctatgcccattcttctaaaatacataaattctacttaaagaaaagtgacagtatactcagcagattcagtatggtaccagagttaccaacagctgctgctgggttgacagcagtggcccctttttcagcatttgcaagctctcctcgaagcctctcaatctcactagccacagcaatcatatttttctccattgctttactttgttcgaggttatcagagtgtgccttcttttcaaaatcaaccgcagctctgccgttctggatctcccggcgcatggtttcaatctggggacggacggaatcggtcttactcgcctcagccttcttgtgcgcgagcttctcccgtaggacctggagcctgttgacgaggtcggtgcgcgccgcggcgagcacctggacgtcggcgtggacctggtcgatctccgcgcgcgcagcggcgatggcccgcgcctcagcctccatatgcgccgcctggtcggccagggagcgcacctcgccctcccgctcggcgcgcgccctggtggcggcgacggagaccgcccggagctcgtgttgcgccgctatgagctgctgctggagtgcgacgtgggtggcagcgaaccgctggttgtcgacgaggagctcctggatatcctggtcccgggcggcgaggcgctcctcgatgagggcgaaggccgggtgcgccgcggaggcgcgcaggtgctgcgcgaggaggccctcatcgcgcgaggacgcggggacggcggccggcgcggcccccggcgcccgtccgaggaggggcgggttgggatcgtga

SEQ ID NO: 91025 - DNA, 127 bp, Zea Mays
aacagatttttggacatagttatataggagttgcaatcacaccagaccagcagttgcaattacaccagtcagcagttgcaatcattgtttgtttaacagatttttggacatagttatatagaagttg

SEQ ID NO: 91026 - DNA, 110 bp, Zea Mays
atgatccttctgaaccaggctaacctactgagtcattacagtttaacaaataaatatagacaacagacgacatttccacaagccaacagtatttcaaaagaaagacaaag

SEQ ID NO: 91027 - DNA, 600 bp, Zea Mays
ccatcccagccagcactataaagccttgcattgccctgcctttgtgaacatcatccgagagaaagcaagcaaccgtgtgccttttggagacgcgatgtcgtccggcaacaagatcagcgtggccttgctgagcgtggccctagtgggcctgctcctctgccacctcgccaccaccgcctccgcccaccagaaagacatccacgtcctcggcagcgtcgacggctccagcgacggcagcagccccgagtccgaaggccgcgtcgtctacgcggacatgaagctggctgatacggaatccgatgcgccggcgccggcgccggggccgtcgtccggttgaactgagaagcgtgcgtccagccaagcaaggtggtcaaaaccgagaactaattaagggctcgattgtgtgtccggctactactgttcttgccataattatatatagatacgcaaagtgtggccaagcctacccacatgcatgctattgcatgcctccgaatatatatatattatccgactcgatcctgccaaattgtttcgtcgacttcattatatatattccatccctttaatttaatggagaagtgtgactgctgttcgtga

SEQ ID NO: 91028 - DNA, 255 bp, Zea Mays
atggaggccgcggcgggcgcgggagcgggcgcgggcgctggcgaggtcggccgcggcgggcacggcgggcggcggccgtggcgggcgctggagtgggagggcacggcgggcggcgatggcggcgagccggcgatggcgcggagcggcggcgggcgcgcagggagaaagaaggagaaaggagaaagaagaaagaagaaaggagaaagaaggaagccgcgggcgagtatattcgccttctttgccgagtgcccgtga

SEQ ID NO: 91029 - DNA, 2046 bp, Zea Mays
ccttcaccctcctcgacgtcgcatctccctttccttttctcccactgcactgctgctccgctgccgctaccctttccctctcccttctcgtcctcggtcctccccaacccatggccacggccaccaccacccactgccccttctcccaccacgctatttatcgcggctgcacgactcctgcccatcaggcgccatagagacgcgtgggaccgaagccgccgatcaagcgctgctcggggcggagcagcggccggcggtggtgagtgctggcagacaggccggcaggtcaggcagagtgaccagctggtgagtcgaagcttgagcggggagctggactttggcgggttccggcgggctccggagcggagatggtgctggatctcaatgtagcgtcgccggcggactcgggcacgtcgagctcgtccgtcctcaactccgcggacggcggcttccggttcggcctgctcgggagccccgtcgacgacgacgactgctccggtgagatggcgcctggcgcgtccacggggttcatgacgcggcagctcttcccgtccccgaccccgccggccgagccggagccggagccggtggcggcgccggtgccggtgtggcagccgcagcgcgccgaggatctcggcatggcccagaggccggtggcgccagcgaagaagaccaggcgcgggcctaggtcgcggagctcgcagtacaggggcgtcaccttctacaggaggacgggccgctgggaatcgcacatctgggattgcgggaagcaagtctacctaggtggttttgacactgcgcacgcagccgcgagggcatacgatcgagctgcgatcaagttccgcggcctcgacgctgacatcaacttcagtctgagcgactacgaggatgatttgaagcagatgaggaattggaccaaggaggagttcgtgcacatactccggcgccagagcacggggttcgcgaggggaagctccaagtaccgtggcgtgacgctgcacaagtgcggccgctgggaagctaggatggggcaacttcttggcaagaagtacatctatcttgggctctttgacagcgaagttgaggcggcaagggcttatgacagggctgcccttcgcttcaatgggagggaagctgttactaactttgagcctagctcctacaatgcaggagataataacctgcgtgacaccgaaaccgaggcaattgatgatggtgatgccattgatttggatttgcggatttcacagcctaatgtgcaagaccccaaaagggacaataccttagctggcctccagccaacatgtgattcccctgaatcttcaaatacgatggcttctcagccaatgagctcatcatccccttggcccgggtatcaccaaaacccagcagtgtcatttcaccatcagcgcttgtactcgtcagcttgtcatggcttctttccgaaccaccaggtccaggaaaggccggtggagcgaaggcctgagctgggcgcccagccattcccctcatgggcatggcaagcgcagggctcccctcacgtgccgttgcaccactctgcagcatcatcaggattctctaccgccgccggggccaacggcggcatgcccctgccgtctcacccgccggcgcagttcccgactactacaaacccgttcttcttcccctagaccgcttttgacatgacagcttgctgttccggctcagctctcggcgtctgggatggcagctggtcttgcgtgtggcgtctagcagctctggtgatggaagaaagtgattgtgttttgtgtgtgtgtgtgtgagagagagagagagccataataagaagcgacatggctggtctccctctggtatgtgcctgttaggatatgggatatctccatgcatggattgtttccgagacagtagtagtattttgttgtagtcgaccatgcgtgtacatcagtataactggatctttgaagagctgagattttatgactcaacaagcattgacataatggcatgcactccaggaccactgaagcaaaaggccaatttgacatc

SEQ ID NO: 91030 - DNA, 2172 bp, Zea Mays
ccttcaccctcctcgacgtcgcatctccctttccttttctcccactgcactgctgctccgctgccgctaccctttccctctcccttctcgtcctcggtcctccccaacccatggccacggccaccaccacccactgccccttctcccaccacgctatttatcgcggctgcacgactcctgcccatcaggcgccatagagacgcgtgggaccgaagccgccgatcaagcgctgctcggggcggagcagcggccggcggtggtgagtgctggcagacaggccggcaggtcaggcagagtgaccagctggtgagtcgaagcttgagcggggagctggactttggcgggttccggcgggctccggagcggagatggtgctggatctcaatgtagcgtcgccggcggactcgggcacgtcgagctcgtccgtcctcaactccgcggacggcggcttccggttcggcctgctcgggagccccgtcgacgacgacgactgctccggtgagatggcgcctggcgcgtccacggggttcatgacgcggcagctcttcccgtccccgaccccgccggccgagccggagccggagccggtggcggcgccggtgccggtgtggcagccgcagcgcgccgaggatctcggcatggcccagaggccggtggcgccagcgaagaagaccaggcgcgggcctaggtcgcggagctcgcagtacaggggcgtcaccttctacaggaggacgggccgctgggaatcgcacatctggtactcagcctctgacctcgtctgcacccttcgtaattaccatctactactgtgctaatctatggctcttgacgacttccatttcctcctcctcctttcgctgctgctcctgcttgatttgagcagggattgcgggaagcaagtctacctaggtggttttgacactgcgcacgcagccgcgagggcatacgatcgagctgcgatcaagttccgcggcctcgacgctgacatcaacttcagtctgagcgactacgaggatgatttgaagcagatgaggaattggaccaaggaggagttcgtgcacatactccggcgccagagcacggggttcgcgaggggaagctccaagtaccgtggcgtgacgctgcacaagtgcggccgctgggaagctaggatggggcaacttcttggcaagaagtacatctatcttgggctctttgacagcgaagttgaggcggcaagggcttatgacagggctgcccttcgcttcaatgggagggaagctgttactaactttgagcctagctcctacaatgcaggagataataacctgcgtgacaccgaaaccgaggcaattgatgatggtgatgccattgatttggatttgcggatttcacagcctaatgtgcaagaccccaaaagggacaataccttagctggcctccagccaacatgtgattcccctgaatcttcaaatacgatggcttctcagccaatgagctcatcatccccttggcccgggtatcaccaaaacccagcagtgtcatttcaccatcagcgcttgtactcgtcagcttgtcatggcttctttccgaaccaccaggtccaggaaaggccggtggagcgaaggcctgagctgggcgcccagccattcccctcatgggcatggcaagcgcagggctcccctcacgtgccgttgcaccactctgcagcatcatcaggattctctaccgccgccggggccaacggcggcatgcccctgccgtctcacccgccggcgcagttcccgactactacaaacccgttcttcttcccctagaccgcttttgacatgacagcttgctgttccggctcagctctcggcgtctgggatggcagctggtcttgcgtgtggcgtctagcagctctggtgatggaagaaagtgattgtgttttgtgtgtgtgtgtgtgagagagagagagagccataataagaagcgacatggctggtctccctctggtatgtgcctgttaggatatgggatatctccatgcatggattgtttccgagacagtagtagtattttgttgtagtcgaccatgcgtgtacatcagtataactggatctttgaagagctgagattttatgactcaacaagcattgacataatggcatgcactccaggaccactgaagcaaaaggccaatttgacatc

SEQ ID NO: 91031 - DNA, 2158 bp, Zea Mays
ccttcaccctcctcgacgtcgcatctccctttccttttctcccactgcactgctgctccgctgccgctaccctttccctctcccttctcgtcctcggtcctccccaacccatggccacggccaccaccacccactgccccttctcccaccacgctatttatcgcggctgcacgactcctgcccatcaggcgccatagagacgcgtgggaccgaagccgccgatcaagcgctgctcggggcggagcagcggccggcggtggtgagtgctggcagacaggccggcaggtcaggcagagtgaccagctggtgagtcgaagcttgagcggggagctggactttggcgggttccggcgggctccggagcggagatggtgctggatctcaatgtagcgtcgccggcggactcgggcacgtcgagctcgtccgtcctcaactccgcggacggcggcttccggttcggcctgctcgggagccccgtcgacgacgacgactgctccggtgagatggcgcctggcgcgtccacggggttcatgacgcggcagctcttcccgtccccgaccccgccggccgagccggagccggagccggtggcggcgccggtgccggtgtggcagccgcagcgcgccgaggatctcggcatggcccagaggccggtggcgccagcgaagaagaccaggcgcgggcctaggtcgcggagctcgcagtacaggggcgtcaccttctacaggaggacgggccgctgggaatcgcacatctgggattgcgggaagcaagtctacctaggtggttttgacactgcgcacgcagccgcgagggcatacgatcgagctgcgatcaagttccgcggcctcgacgctgacatcaacttcagtctgagcgactacgaggatgatttgaagcagatgaggaattggaccaaggaggagttcgtgcacatactccggcgccagagcacggggttcgcgaggggaagctccaagtaccgtggcgtgacgctgcacaagtgcggccgctgggaagctaggatggggcaacttcttggcaagaagtacatctatcttgggctctttgacagcgaagttgaggcggcaaggtgccactgtagctgccttccacgtctcattttctaaggacatgctggtttcattcatcagctttgttaacttcgctgctgattttttttaatgcttgttgcaatttggtagggcttatgacagggctgcccttcgcttcaatgggagggaagctgttactaactttgagcctagctcctacaatgcaggagataataacctgcgtgacaccgaaaccgaggcaattgatgatggtgatgccattgatttggatttgcggatttcacagcctaatgtgcaagaccccaaaagggacaataccttagctggcctccagccaacatgtgattcccctgaatcttcaaatacgatggcttctcagccaatgagctcatcatccccttggcccgggtatcaccaaaacccagcagtgtcatttcaccatcagcgcttgtactcgtcagcttgtcatggcttctttccgaaccaccaggtccaggaaaggccggtggagcgaaggcctgagctgggcgcccagccattcccctcatgggcatggcaagcgcagggctcccctcacgtgccgttgcaccactctgcagcatcatcaggattctctaccgccgccggggccaacggcggcatgcccctgccgtctcacccgccggcgcagttcccgactactacaaacccgttcttcttcccctagaccgcttttgacatgacagcttgctgttccggctcagctctcggcgtctgggatggcagctggtcttgcgtgtggcgtctagcagctctggtgatggaagaaagtgattgtgttttgtgtgtgtgtgtgtgagagagagagagagccataataagaagcgacatggctggtctccctctggtatgtgcctgttaggatatgggatatctccatgcatggattgtttccgagacagtagtagtattttgttgtagtcgaccatgcgtgtacatcagtataactggatctttgaagagctgagattttatgactcaacaagcattgacataatggcatgcactccaggaccactgaagcaaaaggccaatttgacatc

SEQ ID NO: 91032 - DNA, 1766 bp, Zea Mays
agttccttccaagaagagctcaaaaagctttgtctgctcaacctggacgcctcggcctcggcgatccaccggcacggcaccgaaacacctcgtctcgatttcgaaccaaaccctccagtgtccagccccgtctcgttcgccgcggcaggagcgagcgagcgaccgagcgagcagccatggcgccggtcgatccccactcctacaccgacggcgcgcacccggtggtctcgcgcgcggcgctcgccttctacctcgacttcgccgcctccaccatacacgcctccgcggtgctcaccctctccgcgccgcactccggcgacctcctcctcgacacccgcgctctcgccgtccactccgcctccaccgacgccgacccgccggagcccatccccttctccctcgccgcggcgcccgacccggtcctcggcacggcgctgaccctcgccctgccccgcgacaccgcctccttccggctcaccttctcaacctcccccgccgcctccgcgctgcagtggctggccccgccgcagaccgcctccgcgcagcccttcgtcttctcgcagtgccagtccatccacgcccgctccgtcttcccctgccacgacacccccgccgcgcgcatcaccttctcgctcctcctcaacgtccccgagcagctctccgccgtcgccgccgcgcgccacgtcgcgcgccgggacccgctgccctccgaccaccgcggggcgtgcgacgacgggctctggtgcgcgcccggccgcatcgtcgaggagttccagatggaccagtccgtgccgccctacctcttcgcgttcgccgccggcagcatcgggttcagggacctcggcccgaggacgcgggtgtacgcggagggaggggacacggtgttggacgaggcggccagggagttcgcgggggtggaggagatggtcaaggttggggaggggctctttgggccgtatgaatgggagaggttcgatctgctcgtgctgccaccgagcttcccctatggaggtatggagaaccccaggatggtgttcctcactcccacggtcatcaaaggggatgctgcaggggctcaggttgtggcccatgagctcgcacatagctggactggcaatctgattactaacaaaaccaatgaagatttctggctaaacgagggattcacaacatatgctgagaggaggattgttgaggttgtgcaaggggaggagcgggcagccttaaacatggggattggatggaggggattgaacaggatgatggagaggtttaaggataacatggagttcaccaagttgaagccgaagatggcagggattgaccctgatgatgtttactctgaagtgccctatgagaaaggtttccagttcctttggagaattgagcgtgagattggcaggcctgctttcgacgagtttttaaagaagtacattgcaaccttcaagttccaatcgatagatacagagacatttcttgaattcctcaaaaccaatgtacctgggatagaaaacaaaattgaccttcacctgtgggttgaggggactggtatccctcctgatgccatggaaccagattcagctacttacaaaaagatctgctccttagctgcagaattcaaatctggaaaacttccaagtgaagatgaggtagcaaagtggagtgggcaagaatgggaactttacttagaaaatctaccagcagatgttgaagcctcacaggtctatcatgggctgttgtgcactgcagactgttgcatcgcctgt

SEQ ID NO: 91033 - DNA, 2223 bp, Zea Mays
agttccttccaagaagagctcaaaaagctttgtctgctcaacctggacgcctcggcctcggcgatccaccggcacggcaccgaaacacctcgtctcgatttcgaaccaaaccctccagtgtccagccccgtctcgttcgccgcggcaggagcgagcgagcgaccgagcgagcagccatggcgccggtcgatccccactcctacaccgacggcgcgcacccggtggtctcgcgcgcggcgctcgccttctacctcgacttcgccgcctccaccatacacgcctccgcggtgctcaccctctccgcgccgcactccggcgacctcctcctcgacacccgcgctctcgccgtccactccgcctccaccgacgccgacccgccggagcccatccccttctccctcgccgcggcgcccgacccggtcctcggcacggcgctgaccctcgccctgccccgcgacaccgcctccttccggctcaccttctcaacctcccccgccgcctccgcgctgcagtggctggccccgccgcagaccgcctccgcgcagcccttcgtcttctcgcagtgccagtccatccacgcccgctccgtcttcccctgccacgacacccccgccgcgcgcatcaccttctcgctcctcctcaacgtccccgagcagctctccgccgtcgccgccgcgcgccacgtcgcgcgccgggacccgctgccctccgaccaccgcggggcgtgcgacgacgggctctggtgcgcgcccggccgcatcgtcgaggagttccagatggaccagtccgtgccgccctacctcttcgcgttcgccgccggcagcatcgggttcagggacctcggcccgaggacgcgggtgtacgcggagggaggggacacggtgttggacgaggcggccagggagttcgcgggggtggaggagatggtcaaggttggggaggggctctttgggccgtatgaatgggagaggttcgatctgctcgtgctgccaccgagcttcccctatggaggtatggagaaccccaggatggtgttcctcactcccacggtcatcaaaggggatgctgcaggggctcaggttgtggcccatgagctcgcacatagctggactggcaatctgattactaacaaaaccaatgaagatttctggctaaacgagggattcacaacatatgctgagaggaggattgttgaggttgtgcaaggggaggagcgggcagccttaaacatggggattggatggaggggattgaacaggatgatggagaggtttaaggataacatggagttcaccaagttgaagccgaagatggcagggattgaccctgatgatgtttactctgaagtgccctatgagaaaggtttccagttcctttggagaattgagcgtgagattggcaggcctgctttcgacgagtttttaaagaagtacattgcaaccttcaagttccaatcgatagatacagagacatttcttgaattcctcaaaaccaatgtacctgggatagaaaacaaaattgaccttcacctgtgggttgaggggactggtatccctcctgatgccatggaaccagattcagctacttacaaaaagatctgctccttagctgcagaattcaaatctggaaaacttccaagtgaagatgaggtagcaaagtggagtgggcaagaatgggaactttacttagaaaatctaccagcagatgttgaagcctcacaggtcactgctctcgacgagcggtacaagctatctgaaagccgtgactacgaggtcaaagtggcgttcctccagctggcgatccccaccgggtgcaagtgctacttcaacgaggttgagaaatgcttgaagcaggtgggaaggatgaagtacctccgcccgctctacagctcgctggccaagtgctccagcgaggagaagatgctggcccagaggatattctcggaggctcaagagttctaccacccaatagctcgaagtgttgcggaggccattttgtcgaagcatagctaagcaagccaagactcttgcttggcgattcacgcttgatctggtgactgctgctcagtttgcttctttcgcataaaattatcgtctgctctggaaaagaaacttaggaaaaacttgaggcttgtattgcatctttgataacataatattatattatatgtagagactcagaaaccgtagcaaaaaaaaaaaaaaaccccaaacaaacaaaaaa

SEQ ID NO: 91034 - DNA, 2350 bp, Zea Mays
aaaaagctttgtctgctcaacctggacgcctcggcctcggcgatccaccggcacggcaccgaaacacctcgtctcgatttcgaaccaaaccctccagtgtccagccccgtctcgttcgccgcggcaggagcgagcgagcgaccgagcgagcagccatggcgccggtcgatccccactcctacaccgacggcgcgcacccggtggtctcgcgcgcggcgctcgccttctacctcgacttcgccgcctccaccatacacgcctccgcggtgctcaccctctccgcgccgcactccggcgacctcctcctcgacacccgcgctctcgccgtccactccgcctccaccgacgccgacccgccggagcccatccccttctccctcgccgcggcgcccgacccggtcctcggcacggcgctgaccctcgccctgccccgcgacaccgcctccttccggctcaccttctcaacctcccccgccgcctccgcgctgcagtggctggccccgccgcagaccgcctccgcgcagcccttcgtcttctcgcagtgccagtccatccacgcccgctccgtcttcccctgccacgacacccccgccgcgcgcatcaccttctcgctcctcctcaacgtccccgagcagctctccgccgtcgccgccgcgcgccacgtcgcgcgccgggacccgctgccctccgaccaccgcggggcgtgcgacgacgggctctggtgcgcgcccggccgcatcgtcgaggagttccagatggaccagtccgtgccgccctacctcttcgcgttcgccgccggcagcatcgggttcagggacctcggcccgaggacgcgggtgtacgcggagggaggggacacggtgttggacgaggcggccagggagttcgcgggggtggaggagatggtcaaggttggggaggggctctttgggccgtatgaatgggagaggttcgatctgctcgtgctgccaccgagcttcccctatggaggtatggagaaccccaggatggtgttcctcactcccacggtcatcaaaggggatgctgcaggggctcaggttgtggcccatgagctcgcacatagctggactggcaatctgattactaacaaaaccaatgaagatttctggctaaacgagggattcacaacatatgctgagaggaggattgttgaggttgtgcaaggggaggagcgggcagccttaaacatggggattggatggaggggattgaacaggatgatggagaggtttaaggataacatggagttcaccaagttgaagccgaagatggcagggattgaccctgatgatgtttactctgaagtgccctatgagaaaggtttccagttcctttggagaattgagcgtgagattggcaggcctgctttcgacgagtttttaaagaagtacattgcaaccttcaagttccaatcgatagatacagagacatttcttgaattcctcaaaaccaatgtacctgggatagaaaacaaaattgaccttcacctgtgggttgaggggactggtatccctcctgatgccatggaaccagattcagctacttacaaaaagatctgctccttagctgcagaattcaaatctggaaaacttccaagtgaagatgaggtagcaaagtggagtgggcaagaatgggaactttacttagaaaatctaccagcagatgttgaagcctcacaggtcactgctctcgacgagcggtacaagctatctgaaagccgtgactacgaggtcaaagtggcgttcctccagctggcgatccccaccgggtgcaagtgctacttcaacgaggttgagaaatgcttgaagcaggtgggaaggatgaagtacctccgcccgctctacagctcgctggccaagtgctccagcgaggagaagatgctggcccagaggatattctcggaggctcaagagttctaccacccaatagctcgaagtgttgcggaggccattttgtcgaagcatagctaagcaagccaagactcttgcttggcgattcacgcttgatctggtgactgctgctcagtttgcttctttcgcataaaattatcgtctgctctggaaaagaaacttaggaaaaacttgaggcttgtattgcatctttgataacataatattatattatatgtagagactcagaaaccgtagtacctgaggtatgtatgtcctgggtttgcaaggccactcttaacatgcagcttggcaatgaactcagcatgatcattgtgtactgcgtttcaacctgcaatgctccaccgttttaggccagaaactgtaaaggcggtatgtcctcaggcaaaaaaaaaaaaaaaccccaaacaaacaaaaaa

SEQ ID NO: 91035 - DNA, 114 bp, Zea Mays
acggttttcaatacggtaaggaaatgtttgctacttattccctggtgtccattatccaaagtatggtttctaggccaaacttacataggaaagaagcgagtaaaaaaaagaagg

SEQ ID NO: 91036 - DNA, 1479 bp, Zea Mays
tagaagggaaaaaaaggcagagttacctgttcatcataacagaaacagatgaaagcactcaagcagcagcaagcaagatcgcatccaccaccaccaccactgcatgtcgccaaccaaccacagcaaacaaggagaggaaaggagggtcacaacacaactcacaagacgaccacaggaaagaaccaaatctgcattcaagtggcagcacacggacacgcggtggacgcatgctggtcgaggagacacaccagcgcaggctcacagtgtcgcactggcccagcgtgctggccggcagtgcccccacacgcgtcacgcgtgccgtgcctggctacgtacgtacggacaccttctccagctacgcctacgcacgcactcctcttcctccccctaccaccagccacggccggccaaccgcaacggataggggggcctaaaaggctgctgattcggtttccgggcccccgtttccttctcgtccttccttcaggcggctatcgccggcggcgccgcccagagctgggcgttcttcaccttggacacgctgctgagcacgcccagcggcgtgacgtcgccgaccaccgtgaccttcttcgccgcgaagtcgatgttgaacgacgtcacgcctgcttgcatcccacaggccaatgattagttgtgatctatgaactccgaacagaagtttcagatcctgaaagaaatacagtagtagctgccaggctcaccttccatcttggagaggtgcttcttcactttcccggcgcatgctttgcagtgcagggataccttgagcacaaccacctgctaagatgccaatgcatgctttcttagctaggcgaatctagcaggaggcatatgtttccttcacagcttcacctgcttcctcccgcttgggcttgacgtcgacggccggggcagactccacctcctggatctcctcggtggcggcgaagcggccgctcagcaagtagcgggacgagccagccgggctgacgaggccaccggcgtttccgacgacgacagcctttcgctgctgctgctcctcctgctgccgccctttcttaccgtcgtgccggtgtgtcctgggcgcggcagggacgtgagacagggggctggcactggcaatggccttgtgtggccggaccatcggctgccgctccaggctcgggcatatcgccgtggacgccggggacgagcacgacagccccttcatgtccctgaacagcagaggagccatgggaacaggccgagctgctgtgctgctgccgcctctttgggctttggctgtgttgctggtgctgctgaaacggtggagtggaaatgtggagtggactacggggtaaggaaatactgccttatatatacaagagactaagagagcacaactttgctttacatgccagtaaagagtaatctcaaataaactcctctcaaatccatcccaaaaaaagaactatgggtgaaaaacaggtcttcttgaaa

SEQ ID NO: 91037 - DNA, 1389 bp, Zea Mays
gagcgcgtccacccccttcctcctccgatcgagccagggccaggcaacctggtgctccgcccctcgccgttaccgcgacgcttcggcctctggctccaccgcctgcctccctggctctgtgaccgtgacgagacacgtcgccgagaggccaccccgcttggttcggctcgccattccgccccgtgttagtttcggttcgcgttcccgatctgatctggctccgtggcggtgctagggattgtgaggtaaagcgtgatggcagcgccaccggcgagggcccgagccgactacgactacctcatcaaactgctcctcatcggtgacagcggagttggaaaaagttgtctcctgttacggttctcagatggatcattcaccactagctttattaccactattggcattgacttcaagataaggactgtcgagttggatggcaaacggattaagttgcagatctgggacactgcaggccaagaacgtttccgcacgattactactgcttactacaggggagcaatgggcatcttgcttgtgtacgatgtcacagacgagtcatctttcaataacataagaaattggatcagaaacattgagcaacatgcttcggataacgtgaacaaaattctggtggggaataaagctgatatggatgaaagcaaacgggctgtgcccacttcgaaggggcaagctctcgctgacgaatacgggataaagttttttgaaacgagtgcaaagacaaacctgaatgtcgagcaggttttcttttccatagcaagggacatcaaacagagactttcggagaccgattccaagcctgaggatcgaactatcaagatcaaggctgaaggggaagctgaggcagcggcggcggcgcagaattcagcttgctgtggctcctgagcacttgtcaccgcaagatagtggcgttctcgcgcatgtaattttcatcgtttcattctttgccagcgactctctccttgtgcttcttgagctatcgcagttgctgtggcctggacaaatgggtgttaactgttaagtcagagcagttacttgctgtattgtgggaactctacccatggtaaggcgtgcataatggctgtgcaaagtacctttttacactatcgatcgactacactgtttatatggtagagtttaaaatgagaggtgggctgtttgatctcgaggaggctgctactgctatagagatgacgttgggattgcgggaattttcaatgcgtacaagcggtaacatttgcttgcagcactggataatctttgcttcacagatttgctgtatggattaggaaaataagctgtacctcataacatgtgtcgaaacagagagattttgtttctgttatatggtagagattttgtttctgttat

SEQ ID NO: 91038 - DNA, 1304 bp, Zea Mays
ccacccccttcctcctccgatcgagccagggccaggcaacctggtgctccgcccctcgccgttaccgcgacgcttcggcctctggctccaccgcctgcctccctggctctgtgaccgtgacgagacacgtcgccgagaggccaccccgcttgggattgtgaggtaaagcgtgatggcagcgccaccggcgagggcccgagccgactacgactacctcatcaaactgctcctcatcggtgacagcggagttggaaaaagttgtctcctgttacggttctcagatggatcattcaccactagctttattaccactattggcattgacttcaagataaggactgtcgagttggatggcaaacggattaagttgcagatctgggacactgcaggccaagaacgtttccgcacgattactactgcttactacaggggagcaatgggcatcttgcttgtgtacgatgtcacagacgagtcatctttcaataacataagaaattggatcagaaacattgagcaacatgcttcggataacgtgaacaaaattctggtggggaataaagctgatatggatgaaagcaaacgggctgtgcccacttcgaaggggcaagctctcgctgacgaatacgggataaagttttttgaaacgagtgcaaagacaaacctgaatgtcgagcaggttttcttttccatagcaagggacatcaaacagagactttcggagaccgattccaagcctgaggatcgaactatcaagatcaaggctgaaggggaagctgaggcagcggcggcggcgcagaattcagcttgctgtggctcctgagcacttgtcaccgcaagatagtggcgttctcgcgcatgtaattttcatcgtttcattctttgccagcgactctctccttgtgcttcttgagctatcgcagttgctgtggcctggacaaatgggtgttaactgttaagtcagagcagttacttgctgtattgtgggaactctacccatggtaaggcgtgcataatggctgtgcaaagtacctttttacactatcgatcgactacactgtttatatggtagagtttaaaatgagaggtgggctgtttgatctcgaggaggctgctactgctatagagatgacgttgggattgcgggaattttcaatgcgtacaagcggtaacatttgcttgcagcactggataatctttgcttcacagatttgctgtatggattaggaaaataagctgtacctcataacatgtgtcgaaacagagagattttgtttctgttatatggtagagattttgtttctgtt

SEQ ID NO: 91039 - DNA, 2315 bp, Zea Mays
actacctcgttctgctccgtcgctatattcctcgccggagtgtagcggggcgaagccatccgaactccgaaaagccccccagcggcctcccctccgccccgcagccatggccgccaccggcgtggtcgccgagccgaagaccaagtacgatcgccagctcaggatatggggtgatcaaggccaggctgcactggagaaggctagcatatgcttgcttaactgtggtcctaccggaaccgaagcattgaagaatctcgtgcttggaggcataggaagtgtgactgttgttgatggctccaaagttgaatcatctgacctggggaacaattttctgttggatgaaggatgtttggggcaaccaagagctaaatctatatgttctttcctacaagagcttaatgacgctgttaaggccaagtttgttgaggagtctccagcgcatttgatagatactaatccttcattcttttcccagtttactgttgttattgctacccagcttccagagagttttttactgaagctagattatatctgcaggaaagcagatatcgttttggttgctgcacgttcatatggtctaaccggtttggtcagggttagcgtaaaggagcattgtgttatagaatcaaaaccagaccacttcttggatgatttgcgacttcacaacccatggactgaactaaagcagtttgcaaaatcaattgacataaacgataaagatcctgttgtccacaaaaatactccatacattgttatccttgtgaggcttgcagaaaaatgggcagatgcacatgatggtaacttgccttcaactaggcaagaaaaaaaggaatttaaggatctaattcgagcccatatgcttaatgtagatgaagaaaattacaaagaagctgtggactcttcatataaagtatcagtcactccaggaatcaataatgagattcgtcagataattgatgatgactctgcggaagtcaattcctcatcgtcagatttttggattttagtggctgctttaaaggagtttattgcaaaggagggcaacggtgagctacctctggagggaacaatacctgatatgacttcccttactgagtattatgtaagcctacaaaagatttaccaagctaaggcagaatttgactgtcttgccctggagcatcatgtaaaggaaatcttaaagaggattggtagagatccggattcaatttcaagagcatatatcaaaacattttgtaaaaattctagaaaactaagggtttctaggtatcgtagttttgaggaggaatttagctctccgtttgtccctgagattcagaggtatttcaccgatgaagactacagttacgcaacgaacttctatattctactacgtgctgttgatcgattggctgccaattatagcagattgcctggaatcttcgacagtgagattgatgaggatatccctaggctgaagactgttgcggcttcagtggcaagtgagatgggtttgaatggagcatccttatccgaagacctgataaccgagatgtgccggttcgggggtgcggagattcatccagtggctgcttttgtcggtggagttgcttcccaagaagtgattaagctggtcaccaagcagtttgtgccgttgccgggaacattcatatttaatggaatcgacctcaaatctcaagttttgatgctataacatggatgtggaacgttgtctgtgtggactggatttgagttggcccagattttgtgccagggcacaacgctgcaaatggaatctgtttgcccaacgcgtagccaaatatgtgttgcatgatattttagagcctgtttgtttcctcgcaggattatataatccagcttagtttatatagattatataatccaatttatataattttattagagatggctgtttatacaaattattagtgggtacaaagctaaacaataatataaaataagcacctaatgatatgcttatgaattatcataatctaggtacctagattgtacttcctccgacttttttatttgtcgttgtttagttaaaaataaactagcgaacaacagatattccactttagttttgtttatttgcttcttaacttatgtaagttagattatataatctacacattaaacaaacagccaaacagggcttgcgtcgtatgattgtcattctcgccaagcaccttcccgccacccccacccacccacacgaatcagagaaaagtggttcattgagagttgtcactctgctgtaatttatcaatacttgtcgtatgatttatgcaagcgcttcctagctcacg

SEQ ID NO: 91040 - DNA, 2273 bp, Zea Mays
gtcgctatattcctcgccggagtgtagcggggcgaagccatccgaactccgaaaagccccccagcggcctcccctccgccccgcagccatggccgccaccggcgtggtcgccgagccgaagaccaagtacgatcgccagctcaggatatggggtgatcaaggccaggctgcactggagaaggctagcatatgcttgcttaactgtggtcctaccggaaccgaagcattgaagaatctcgtgcttggaggcataggaagtgtgactgttgttgatggctccaaagttgaatcatctgacctggggaacaattttctgttggatgaaggatgtttggggcaaccaagagctaaatctatatgttctttcctacaagagcttaatgacgctgttaaggccaagtttgttgaggagtctccagcgcatttgatagatactaatccttcattcttttcccagtttactgttgttattgctacccagcttccagagagttttttactgaagctagattatatctgcaggaaagcagatatcgttttggttgctgcacgttcatatggtctaaccggtttggtcagggttagcgtaaaggagcattgtgttatagaatcaaaaccagaccacttcttggatgatttgcgacttcacaacccatggactgaactaaagcagtttgcaaaatcaattgacataaacgataaagatcctgttgtccacaaaaatactccatacattgttatccttgtgaggcttgcagaaaaatgggcagatgcacatgatggtaacttgccttcaactaggcaagaaaaaaaggaatttaaggatctaattcgagcccatatgcttaatgtagatgaagaaaattacaaagaagctgtggactcttcatataaagtatcagtcactccaggaatcaataatgagattcgtcagataattgatgatgactctgcggaagtcaattcctcatcgtcagatttttggattttagtggctgctttaaaggagtttattgcaaaggagggcaacggtgagctacctctggagggaacaatacctgatatgacttcccttactgagtattatgtaagcctacaaaagatttaccaagctaaggcagaatttgactgtcttgccctggagcatcatgtaaaggaaatcttaaagaggattggtagagatccggattcaatttcaagagcatatatcaaaacattttgtaaaaattctagaaaactaagggtttctaggtatcgtagttttgaggaggaatttagctctccgtttgtccctgagattcagaggtatttcaccgatgaagactacagttacgcaacgaacttctatattctactacgtgctgttgatcgattggctgccaattatagcagattgcctggaatcttcgacaggctgaagactgttgcggcttcagtggcaagtgagatgggtttgaatggagcatccttatccgaagacctgataaccgagatgtgccggttcgggggtgcggagattcatccagtggctgcttttgtcggtggagttgcttcccaagaagtgattaagctggtcaccaagcagtttgtgccgttgccgggaacattcatatttaatggaatcgacctcaaatctcaagttttgatgctataacatggatgtggaacgttgtctgtgtggactggatttgagttggcccagattttgtgccagggcacaacgctgcaaatggaatctgtttgcccaacgcgtagccaaatatgtgttgcatgatattttagagcctgtttgtttcctcgcaggattatataatccagcttagtttatatagattatataatccaatttatataattttattagagatggctgtttatacaaattattagtgggtacaaagctaaacaataatataaaataagcacctaatgatatgcttatgaattatcataatctaggtacctagattgtacttcctccgacttttttatttgtcgttgtttagttaaaaataaactagcgaacaacagatattccactttagttttgtttatttgcttcttaacttatgtaagttagattatataatctacacattaaacaaacagccaaacagggcttgcgtcgtatgattgtcattctcgccaagcaccttcccgccacccccacccacccacacgaatcagagaaaagtggttcattgagagttgtcactctgctgtaatttatcaatacttgtcgtatgatttatgcaagcgcttcctagctcacg

SEQ ID NO: 91041 - DNA, 1097 bp, Zea Mays
ccccaagacacaagggaacaagaatagcatgccaaaattgcctggcaaaactgcaagtacacagaagatgttgcactgtttcctgctcttggtcacaaagaacacaaacaaccgggtgttgcagccctattacgcaacgaacttctatattctactacgtgctgttgatcgattggctgccaattatagcagattgcctggaatcttcgacagtgagattgatgaggatatccctaggctgaagactgttgcggcttcagtggcaagtgagatgggtttgaatggagcatccttatccgaagacctgataaccgagatgtgccggttcgggggtgcggagattcatccagtggctgcttttgtcggtggagttgcttcccaagaagtgattaagctggtcaccaagcagtttgtgccgttgccgggaacattcatatttaatggaatcgacctcaaatctcaagttttgatgctataacatggatgtggaacgttgtctgtgtggactggatttgagttggcccagattttgtgccagggcacaacgctgcaaatggaatctgtttgcccaacgcgtagccaaatatgtgttgcatgatattttagagcctgtttgtttcctcgcaggattatataatccagcttagtttatatagattatataatccaatttatataattttattagagatggctgtttatacaaattattagtgggtacaaagctaaacaataatataaaataagcacctaatgatatgcttatgaattatcataatctaggtacctagattgtacttcctccgacttttttatttgtcgttgtttagttaaaaataaactagcgaacaacagatattccactttagttttgtttatttgcttcttaacttatgtaagttagattatataatctacacattaaacaaacagccaaacagggcttgcgtcgtatgattgtcattctcgccaagcaccttcccgccacccccacccacccacacgaatcagagaaaagtggttcattgagagttgtcactctgctgtaatttatcaatacttgtcgtatgatttatgcaagcgcttcctagctcacg

SEQ ID NO: 91042 - DNA, 1032 bp, Zea Mays
gagagagaaagattaggtcagagaccatgaagcacccgaggccgacggagcaggatgtgtcgctggcgctgtcgctgagcacggactcgtccacgacgacgtccgactcggcggggacgccaccggcgaagcgggcgcgggcgcgggcgcggcggcggggcgccgtggtggccacgtcgggggagggcgagttcgtctgcaggacctgcagccgcgccttcccctcgttccaggcgctgggcggccaccgcaccagccacctgcgcgcgggccgccacggcctcgacctcggcgtcgtcggcgcccgggcgctcaagcagcacaagcagcaggccgccaacgccaacgccaacggctgcgaaggaggcaagcagcggcacgagtgcaacgtctgcgggctcggcttcgagatgggccaggcgctgggcggccacatgcggaggcaccgcgaggaggagatgggcgccgccgacgcctgggtcaccctctggcgcaccgaggcgtcgcgcgccgccgacccgcccgtcttgctcgagctcttcgcttagatcgatccggccggcatagggtcgggctaatccctccttgttatttggggggaggctaactcgtcatctagacatctagtagcgtcggtagtttaatccaggacatgtaaatcgtattggttcgttcgttgccttttttttgtaattacgctagtatagtactagcttctgctgtgtttagcggttcggtcatggggccggttggattccgatacgaatgtcagagaactgatttcattcatactatattgctggaacatataacaggatcgatgattccttggttcccatgcatgtctgttcggcttactgcagcgcattcgtccgaaatcatcgcgcacgaatcattcgtcaatttgaacgatatccgcgatatgcatgctttttctaaaatgtcccaatggttaattaatttcgttcgcatatgttcatgagcaagttaaaaaaaaatagcggtctggttcgtttaactgattcctttttt

SEQ ID NO: 91043 - DNA, 819 bp, Zea Mays
ccatgcactcgccagagccagcgccaaaccactgcggcctgctcctttcacctctctccccctctccctctcgggctctctcctaacatcttgagcacgatcgcaagctctcaccccctcagacactcattccccaccaccgacatacgtacatgaagcaccagagagacgccggcgccgtgccgctctccctcgcgctgtccctgggcggcggcggcggcggcgtggcccccaagcacggcatcagcaagaagccccggcgcgcggcgggcggcgagttcgtctgcaagacgtgcagccgcgccttcgggtcgttccaggcgctgggcgggcaccgcaccagccacctgcgggcccgccacggcctcgcgctcggcatgcacgccgccgcgccggcgaaggaggaggataccgcgacgaagccggcagcggcgaaacccgcgcccgcgcccgcgagccacctgtgccacgtctgcggcctcggcttcgacatgggccaggcgctcggcggacacatgcgccgccaccgcgaggaagcggccgccgccgccgcgcaggcgccgcccgtcctcctccagctcttcgtgtagagtaagcggccgcagagagaggccaggccatcgccggccttcgtactctagagtagactacctactggctactagctagtacagtagcagagcaattctttgcgtttctgtcgtcactcgtcagcctgcacattgttctagactcacagtactaatttgttggcatattggccagttgattcattcattcatttaatttagttgtacatgtaaataacagattattgtt

SEQ ID NO: 91044 - DNA, 105 bp, Zea Mays
ctgcctgtcccccccccccctccgcgctccgtctcacgccgacccatctgggctggagcacacggcgacattttcactcgtcggcccagggacccccgggtctcg

SEQ ID NO: 91045 - DNA, 2272 bp, Zea Mays
acggccattgacgctgaaacgctactgctgcttgcatgctgtgatcatcgtcgttgagttgacttgagtcgtccggccggttcccttgtctctccggttctcgacgccggctggctccgtccgatcgatcagacgcaatggtacgtgccctctgactgctcgatttcccattcaatctgccggagcacgtatccgtttgagctactggacagttgcaatcgcgctctgcaggcgaacgcggcgtcgggcgtggcggtggcggaggagtgcgtggcgcggttccaggagctgcgcggcggccgcgcgcaccgcttcgtggtgttcaaggtcgacgacgcgctgcagcgcgtggtggtggagaaggcgggcggccgggccgccggcttcggcgacctcgccgccagcctccccgccgacgactgccgctacgccgtctacgaccacgacttcaccgtcggcgtcggggacgccgccgccgccgctggggagctcgaggcgccgcgcagcaggatcgtcttcgtggcctgggccccggaggcggcgggcgtcaggagcaagatggtgtacgccagctcctgcgaggggttccgcaaggagctggacggcgtgcaggtggacctccaggccaccgagcccggcgagctgacgctcgacgtcctcaacgaccacgcctcctgaatggtcgaggaggatgaggtgcttgcttgcgttgccgtccacggtccgtccattccgtcaccgtcacgtacgtgcgtgcaaggtggtggtgtgccgtgtacggagggcgtttgcgtagttgcattcgtgcgtactactactgtataataataccgagtcagctcttgccgtgcttggattgttcccttcctgttattgatgtatgcatgcgtgtacgcgaacactcgtactatgctcattgatcaagagttcaagcacgacctgacagacatctcgcaagacgtgacaggctagcaaagcagccgacagaaaagtataataataataataataataataatacaaccaataaataaaagaaaaagaatatggccggtgccacggcccacggcgcgcggtcggtgtccatcgctgcggcccgctgcttttctgtggtgctgattcccccgatattttccgcgtccgctctttctaccccgaatcctttatttattattcatatctattcattattttcccaggatgctcattccgaaatctctctcgcggtcgcggagaagaaaacgaacgaaagatcacgaaagatcgcgcatcggcggccgtccatctcgacatccgacgaccgcggaagctcgcagtgggccgctccgttccgtcgcggggcagctaccgcctaccacacccccgcaccgcacgggccggggtggtaaaacccggcgaccacatcaaaacacgaggcgtccccgactccgcagtccgcaggaccggtcactcggcacgcaggctagcagcacagcagcagccagagccatcccctctcctcgctacgcttcgcttcctcggcgccgattcctcctcctcctcctccaccctcgtccgtccccttccggcgcgcgagctcgcccgagatggcgaacgcgagatcgggtgtcgctgtgaacgatgagtgcatgctgaagtttggcgagctgcagtcgaagaggctgcaccgcttcataactttcaagatggacgacaagttcaaggagatagttgtggaccaggtcggggatcgcgctaccagctacgatgaccgactttgttactgcagaggatgtccagaagagcaggatcttctatatcctatggtccccatcctccgccaaggtgaagagcaagatgctttatgcaagctcaaaccagaaattcaagagtggcctcaatggcattcaggttgaactccaggccacagatgcgagtgaaatcagcctcgatgagatcaaggatcgggcacgctaggcgcaccgccatcgcgagtttcatggtcacgcatcatggactcgcctactactgtggatttgtacgccattatagacttggtgctgcgaaagactgctttggtgatttgtgggtttgttgctgtgtaaaaagatcctcatggcttccagaagaccatgaaggtttggatctatcatgtaattccttgttatctgccaattatgtatggactatggacatgtgttgcgctgttcaactcactacaaataagtaatcgatatattccctacccatgaatcggtgacaattgtctggagaagcttagtttgatttctgg

SEQ ID NO: 91046 - DNA, 1266 bp, Zea Mays
ccacggcccacggcgcgcggtcggtgtccatcgctgcggcccgctgcttttctgtggtgctgattcccccgatattttccgcgtccgctctttctaccccgaatcctttatttattattcatatctattcattattttcccaggatgctcattccgaaatctctctcgcggtcgcggagaagaaaacgaacgaaagatcacgaaagatcgcgcatcggcggccgtccatctcgacatccgacgaccgcggaagctcgcagtgggccgctccgttccgtcgcggggcagctaccgcctaccacacccccgcaccgcacgggccggggtggtaaaacccggcgaccacatcaaaacacgaggcgtccccgactccgcagtccgcaggaccggtcactcggcacgcaggctagcagcacagcagcagccagagccatcccctctcctcgctacgcttcgcttcctcggcgccgattcctcctcctcctcctccaccctcgtccgtccccttccggcgcgcgagctcgcccgagatggcgaacgcgagatcgggtgtcgctgtgaacgatgagtgcatgctgaagtttggcgagctgcagtcgaagaggctgcaccgcttcataactttcaagatggacgacaagttcaaggagatagttgtggaccaggtcggggatcgcgctaccagctacgatgacttcacaaacagcctccctgagaatgactgccgatacgcgatctatgatttcgactttgttactgcagaggatgtccagaagagcaggatcttctatatcctatggtccccatcctccgccaaggtgaagagcaagatgctttatgcaagctcaaaccagaaattcaagagtggcctcaatggcattcaggttgaactccaggccacagatgcgagtgaaatcagcctcgatgagatcaaggatcgggcacgctaggcgcaccgccatcgcgagtttcatggtcacgcatcatggactcgcctactactgtggatttgtacgccattatagacttggtgctgcgaaagactgctttggtgatttgtgggtttgttgctgtgtaaaaagatcctcatggcttccagaagaccatgaaggtttggatctatcatgtaattccttgttatctgccaattatgtatggactatggacatgtgttgcgctgttcaactcactacaaataagtaatcgatatattccctacccatgaatcggtgacaattgtctggagaagcttagtttgatttctgg

SEQ ID NO: 91047 - DNA, 786 bp, Zea Mays
gcaggaccggtcactcggcacgcaggctagcagcacagcagcagccagagccatccaacgcgagatcgggtgtcgctgtgaacgatgagtgcatgctgaagtttggcgagctgcagtcgaagaggctgcaccgcttcataactttcaagatggacgacaagttcaaggagatagttgtggaccaggtcggggatcgcgctaccagctacgatgacttcacaaacagcctccctgagaatgactgccgatacgcgatctatgatttcgactttgttactgcagaggatgtccagaagagcaggatcttctatatcctatggtccccatcctccgccaaggtgaagagcaagatgctttatgcaagctcaaaccagaaattcaagagtggcctcaatggcattcaggttgaactccaggccacagatgcgagtgaaatcagcctcgatgagatcaaggatcgggcacgctaggcgcaccgccatcgcgagtttcatggtcacgcatcatggactcgcctactactgtggatttgtacgccattatagacttggtgctgcgaaagactgctttggtgatttgtgggtttgttgctgtgtaaaaagatcctcatggcttccagaagaccatgaaggtttggatctatcatgtaattccttgttatctgccaattatgtatggactatggacatgtgttgcgctgttcaactcactacaaataagtaatcgatatattccctacccatgaatcggtgacaattgtctggagaagcttagtttgatttctgg

SEQ ID NO: 91048 - DNA, 954 bp, Zea Mays
ctgcagatgggggacatactcattcctagccttatggttggagactgctctcgcaccttgtgtttgcgtgtctctaggctttgggaattccttgatcctcaggatgacagtaggctcttgcatactgatcttgttttgcttgatgaagagggaaacaacatacatgcccagatctatcctcctttgtgccaacagttcagtgcgctgctcgatgagggagggatatacaacttgaagtatttcttagtcaggaaagctaacagattctacaaactggtagaaaactgcaacatgatcagctttacaaagtggactacggttgaggttgtcctccaaatcccccctgctttcccggtttgcacatataacctcactcccatagaccagctccaaccgcgcgtggactacaaagaatatttcactggtaaccttctacgcatagtagtttacatgttataggtaacatgaatacagtgctaatgtcctcgccatctctatggtagatgtgctcggtgttgtcagcgtgatctcccgtgtttcatcactacgcacaaggggacgacaggctgaggttatgaagagaacaatcactataagcaatgcaaggtaccatggcataccatacacgttgtgctcatatagaagattactaaacagcttcagctaccattgaccatttaaacaagcagctattttgaagctctagacgcacagttcacgacttttgttactttgtgatgtccacacctaacacgatacaatgaccaatttatttgtaaactcgctgttcttcactccgacagggataccgggccaaccgttgatgttgtgctttggggcgagcgggccacagctttcccagctgaacaggtccacagggacagtgaatcctcaccacagatcataatatttgttggcactctcatgaggagctacgctggtaagtctactaca

SEQ ID NO: 91049 - DNA, 92 bp, Zea Mays
ggtgtccctgcatcacagatgaacccgagccgacccaaaccatacccaacaggaatttgtatgaaacagtgacatctctaaaggggcgttcc

SEQ ID NO: 91050 - DNA, 834 bp, Zea Mays
atggtgtcggaattcttccattctggttgtacctctgaagatattaacaatctatcgcatgcattggctttgaaagaggcggtaaataaagttatgttccctgccatgatcgatctatgcagagcaatgtgttccttggcaacacaaaattcaggctaccctatgttggctcgaactcatgggcaggtatgacttatgaaaccaccttttaccataatgttttattactgttatacaacaagaaaaataaggtatgcatagcttctccatatacagctctcaaagggcttctatatgagacatacgatataaaacaattacttattggggcttaatgttttgtaagtttttctgtttgatgcagcaaggtgatttagagtgatagtaatttgctaagttttcataatgaacagaatagaattgaatgattgatcaactcattcagctatttccaaggaaacatggatgaagaaaataaccatcaatgttgttggttctgatgcagttctatcccttcgacagatcgagcctcatgactacatatcaaagctcttcaacctattcacccagtttaacaatgtgttgactgattttgatagagacatctggtcctatatatcattaggctacttcaagcagataccaaaggctggtgaagttggttcttccagtatgcctcataaaatcaaccccattgttgacacctttttggaggcgtcaattactcaagagaaccagcggcggtgctctctggtcaggcgcggacggtccgcgacctggcgcaggggctagggattcctgcctgacggccggacggtccgcaccctggggccg

SEQ ID NO: 91051 - DNA, 543 bp, Zea Mays
aactgctaaccaacatttgacacagaggatatatattattcatgcgctcgctcacactgggagaaagcgctctatggcggtctgacgacaacatacaagaagcctgccaagaaatacagcaccctgcatcctaattagcaacacatgtacgtgcatgctctattccacaagctctcaggcactggctggaacggatgcagggtcgatcatcccagccagaaacgcgacgaagatgcacaccatcagcaggccgattatcgcagccctgatggcgttctcgcagctataaggtgatgggatctcttcatccaagtcgaagtccaagtctgtgacaggtaacccgtcatcaacgctgaccaagcggggctgcttcttgctcccttcccctgcctgtatcactgaatcatcacgaggactctcacatcgcgggcagctgcatttaccgcccagaaacgctggcacagcctgcaggaactccgccaatgccttcttgtacgaatctccctcaaaacgcaacttctgctttgtagctggtttcaagac

SEQ ID NO: 91052 - DNA, 2740 bp, Zea Mays
tttgaaaaaaaatagtgagatagtagccacttttcttgcaaacaattagaggaagcgacaggtgaaaacaaatctgcagtaagtaaagtaggggacaggagagcataacaaaagcaatatgctagcgtgctagtgcccattttgttattcgagttacagggatctttatcgattggagtttcaacagttacagtaagacgtcggttcatggaaatgttttcaaatttcaactaacttcaaaccaaaaaagaaacaaagagaaggatatgttttgaaaagcattataatgctaaaccgagcctaagagttccacaacttccactgatagaagatatgttggtagcagaaagatctgttgaaagaagcagaataatgcaagcaggaaaaacattgccaaccctacatgtgactttgactgcccagctctaaactttgaggccataatgacaatatcacatagagaacgataatcataaaaaagagcagactgtcacaaggccaggtgtgagcccagggccgagaaggaccaagtggcaatacaagcccaagtgcccaacatgtctgtgtttgggccggactggactcagtaactggagagcatttagtcctctggttagctgagttgaggatggcgtggagagttttggcttggagaagactttggccagctgtgtcccgacctggagtgcatcgagagatttttccttccactttctgctatagaattctataatccgtgaacttcgtgagagggagtgtcgggagcggtgctcgacgtaatacaaaatcccagtgttgattacaattggtatcagattcttgtcgcgatcctggcggatcgtatctcctccgcccgcagtacaagacttgactgcaacgtgacgttcaagccatggagaagagcgttggtgatcttactgcgctcctgcaagctatgcaacttcaaaatgagtccatcaagcaggccttggatgcaaataccgcagtggtgagagatctctcatcatggaagccgcagatcgaaactgaagtgttgaatctacgacaagatgtgggatctctgtctgacaaactggatgaattgatggctattaaggatcaacaccacactgccccgaaggtgttcgatcgggagcctctggagcctgggttttctccgtcgacttctctgggattatctctacatcaggcaactcatggacattctgatcatcaccatgcaccccttcaccagagcaatggacttggggtggtgaccaccctgactccacctccggaagaactgtcgacatctagtggaaatgctactacagctcttaagcaaccaagccgatctctgattactgggaattcttcatcagtggtggctcagtcagatggtcagcgtaaacagcaaccaatggtagccaacagtttgggaggactgaccaaatctgggactgatgagcgtaaagcttcggttctgatggcttaccgtaaagctaaaggtctttgctacaagtgtggtcttcattggggtccaacacacaaatgcagtgacacagttccattacatatcgtggaaaagttgtggcagctgttggatcagcctgtctctccagataactcacatgtcagtcaagaggattcgggaaatgacttaatggtgttatcctttcatgctgtacatggcactgaagctcctcagaccataaaactgatggcaactttgttttccaagaaagtattgatgcctcggggagctcttcctccttcatcagtcaacccttagtcgccttgggtcctccattgattcctctcactaattcagttcaagtcaaggtggccaatggacagttgctgtcttgtacccattatctaccccaatgcaaagtgagtttgtctggccatgttttttttctatcaaccttaaggttcttcctttgcaatgctacaatgttatattgggtatggattgattatcttcacatagtcctatggagattcattggcaagataagtggttagcctttactcatgaacagcagagagtggttcttcatggccagttgtctgatacttcaatggtggagcagatctcagtatgccagctgtatcacttagacaaattggatgaactttggtgcacaattgagttacaacagatttctgaccaacaatcccataccagtctaccacacgagattcaaagtcttattcaagaatttgcctcattgtttgaccaacccaataggttgccacctcctaggtgccattgtcatacaattcccttgattcaggagcaacacctttttcggttaaggccttacagatacaacccagctcagaaagatgagattgaacgccaaattgcagatttgcttcacaaaggaatgattcagccgagctgcagcccatttgtttcaccaattattctagctcgaaagaagaccggcgattcgaggctctgtgttgactgtcgtcgtttaaatgccctcactataaaaaataagtatccttttccagtttctgctatagaattctgtaatctgtgaacttcgtgagggagagtaccgggagcagtgctcgacgtaatacaaaaccccagtgttgattacaaaaacctaatggtggaggctcccacatgagtgggcaagcaccctccccggcaaatacgaagaggctgcttcgaacccacaacctgaagactcagtgggacaactctcatcactgcaccaggtctgcccttctataaagaata

SEQ ID NO: 91053 - DNA, 879 bp, Zea Mays
atggagaagagcgttggtgatcttactgcgctcctgcaagctatgcaacttcaaaatgagtccatcaagcaggccttggatgcaaataccgcagtggtgagagatctctcatcatggaagccgcagatcgaaactgaagtgttgaatctacgacaagatgtgggatctctgtctgacaaactggatgaattgatggctattaaggatcaacaccacactgccccgaaggtgttcgatcgggagcctctggagcctgggttttctccgtcgacttctctgggattatctctacatcaggcaactcatggacattctgatcatcaccatgcaccccttcaccagagcaatggacttggggtggtgaccaccctgactccacctccggaagaactgtcgacatctagtggaaatgctactacagctcttaagcaaccaagccgatctctgattactgggaattcttcatcagtggtggctcagtcagatggtcagcgtaaacagcaaccaatggtagccaacagtttgggaggactgaccaaatctgggactgatgagcgtaaagcttcggttctgatggcttaccgtaaagctaaaggtctttgctacaagtgtggtcttcattggggtccaacacacaaatgcagtgacacagttccattacatatcgtggaaaagttgtggcagctgttggatcagcctgtctctccagataactcacatgtcagtcaagaggattcgggaaatgacttaatggtgttatcctttcatgctgtacatggcactgaagctcctcagaccataaaactgatggcaactttgttttccaagaaagtattgatgcctcggggagctcttcctccttcatcagtcaacccttag

SEQ ID NO: 91054 - DNA, 263 bp, Zea Mays
gaagaattaacttgttttttcttattcaggtataatggaaagtcatatgttggggtgctcatctttcgatttccaaaagtttggagctttttcgtggtgcagtcgaatatattaagtgatgtcttcacacggtttaggttcctagttcattttttgaagtcgtcgtgcataggatccatagatccatttatctattttcttactaacccaacctggttgtatattcgaatgctccctagggttcctagttgtatatccatttc

SEQ ID NO: 91055 - DNA, 278 bp, Zea Mays
cgtggtgccctagggtttggagacggcgatcaccggaatttggaccccgaggtgagctcccctcccctccccttcacttctctctctccctctccctcccccttcttctccccacgcgcgcccccttcttcccctgctcgcgcgcgccccatgcccgcccctgctcgccggcgggcgcggcgcccccgcccctgcccggccgcggcggccctcgtccgcccgtcccccgggcgtggcggccctccccgcccctcccctcgcgcgcgcggcggcgcccg

SEQ ID NO: 91056 - DNA, 962 bp, Zea Mays
gtggttcgtgcagaaagcaagtttagatcgacaaaagatatcagaaagtagattggttcccgaccctttcatatttgaacagtgagctgtatggaacttcatatttgaatggttccaggttcatggttgtgcaaatttttattacagcttgatggtgaacgtgaacaaaaacgacatgtccgagttcggccgtgcacaacgtttaggctcctacgtacatgatgacaaaataaattgaagcatatcattcacggctaggaaattaaaataaagaaaaaagaaaaatgagtaaaaaggcacttaattctattttagagaagagattaatttataagtactattttatagaagttaaatttgtagatactgtaagagagaaacctgtttaaatgagtgttataatagcaaaagactccgatttgaaagtcctctctccaaaatgagtaaatgtgttaaagctcatattgctattcagcaatcccttttcccgaaggaccttcaaatcgaggcgaacggtctttggtggaactgtaactcatggtcattagcagctggcaggttttctccatttgcaagggaaccactagtgacctgactgctcatacatagtccaagtttaagttgtggttatttatgagccaggtctcactagccgaatgtttattttggtttataggagtactcattagaaggccaggtctggtgctgtctcactgagccatctccatctccatatttacagggaaggcttggctctgcttatccttttttttcagactctaggagtctccgtcaagtctgcctttttaaaaaaaaaaaactgatgcatgcttaacaagtatagtttgaatatagatatgtagatgaggtaagctgctgcagatagcctaacatctgaaaataagcagcaagttgtagggagacgacttcgaatgagagaatactaaatttgtggtttgttc

SEQ ID NO: 91057 - DNA, 1871 bp, Zea Mays
cgcctcccttgcccgccattaactgcctctccctcgctcctctcgctcgctcggctcactccctctccaaagcggcagcctcacgcagtcacgcgctccaccacgccacctccctccacccctcactatatactcactcctgctgttttccgtccatccgcccaccggttcgcagcccgcgcctcaaaaccctagccccgggcggatcgcggggcgcctccgcggtgccagcgacgcggctcgtttgatccgattgttggtcgagccccgccctcgctgccgcgcttcgctccggctgtgcaggtgcagcggcgtgagcaccgagcacactcgcgaatggggaactgctggggtgcgcggatcaaggatgggagccctcaccctggcgcctcaggaatgttctcaaagagtagtggtaaggatgggagtaggcttagcggctgtagtagtcgagcctcttcagcttctatgccaccaagtgcgaagactgaatgtgaaatcctgcgatccgccaatgttaagatcttcaccttcaataatctcaaggcagccacaaggaatttccgtcctgatagtgttctaggtgaaggagggtttggatctgtctataaaggatggatcgatgagaacacattatcaccttgcaggcctggcactgggattgctgttgctgtgaaaagactcaaccatgagggtttgcaagggcaccgagagtggttggcggaagttaattacctaggtcagttctgtcatcccaaccttgtcaagctgattggatactgcttagaggatgagcaccgactgctagtatacgagttcatgccccgtgggaacatggaaaaccatctgtttaggagaggctcatacttccaacctctgtcatggaaccttagaatgaaggttgcactgggagcagcaaaaggactagcttaccttcatagtgcagaggcaaaagttatttaccgagattttaagacttcgaacatcctccttgacacagattattctgcgaagctttctgattttggattggctaaggatggtcctgtcggtgagaagagccatgtgtccacaagagttatgggaacatatggttatgcagctcctgagtatctttcaacaggtcacctaactgcaaagagcgacatctatagctttggggtagtgcttctggagatgctgtcaggccgccgcgccatcgacaagaaccgcccccagggtgagcacaatctcgtggagtgggctcggccttacctcacacataagcgcaagatattccggatcctggatacgaggctggaaggtcaatacaatctgaacggtgcacaaacaattgctgcccttgctctcgaatgcctatcctacgaagctaagatgaggccgactatggacgctgtggttgctattctagaagagctccagggctctggtgaagccgagaagaagcttcaagaacccaaggccggaaccaaacaggcacctgctgctgtgagtgctagcatgagcagcagccgcaagcctcgccggaaaagtctgggagacacaaaggagactgttggtgttccagatcccaaaccattggcccattctcgttagcaaggaaaagcattgcctggtcaagtcgttagctagactgtagctcgcttgtgaatatgctatggtctgtgtatgtatgttcagagggtaatcgggcttttggcaacagtcttttcgtctttatcatgagctgctcggttcagcctgactggaacctgtatgccgaaacccatggcatcagagagagggggagagagctcatgttccgagtctttaacttatgtcttcgctacacaggctgcatttgttccaggtcatataggatgttcagtagg

SEQ ID NO: 91058 - DNA, 582 bp, Zea Mays
atgaatgggcatgcccgtgcaggtaaggccactaccacagcgggcgtcgaggaatctgtgctgtctgtcttaccggcggtaggagacggggacgatgccggcgcggtactcggcgatgtggaggaacatgggcatggcgaggtcgaagtgcgggcggggcgggttgcaccagccgccgtcgtcggaggggagcgcgtagtttggcgggcagaagttggtggccgtgaccaggatggagggcctccctggccggcaccaccgccacccgggctgctcctcgcacctgatctcgaagcacgcgccgcagcggagcccctcgtcgaacagcgccgtgctcagcgccgcgttgttcacgccgtacccctggctgtacaggttgccgtacccgcaggcgccgcccatggtgcccgaagcgtcgctgccgccgtagaacgtggcgtgcgcgctctgccagccgccgccgccgccgacgtacacgccgggaatgcgggcggcggcgggggagagcgtcatcgccgcggccaccaccagcagaagcagaggcagaagcggcgccggcattgccgccatcacactccctga

SEQ ID NO: 91059 - DNA, 2421 bp, Zea Mays
gtcggcgaagtccttcggcgttccgatcatcaacttttcttccaatttgtagttctctctaagcggaatccttgtgttcttgagagagagagagagagagagagagagagagagagagagagagagagactcagaaaggtagcgcagaggtgagatttgtaacctgtaataagtgacttgtggcgctgaagatcgaaagtcagagaaatcttgtggatacaagctccacctccaaggaatgataatggaccctcgtcctcgtgacgatcccaacctcggtgctcgattgcccaccccaaatccacccgcacctcacatgattagcttctccctccagcagccacagcttcagttcttcccttcgtatggattccacggccacagccacagctctcctgtcagctcgcatccatctccaccctcggccatgcctggctgcaccacgccaagcccggcatcgacaaccacaaccgagccagacagcgtcgaggatttttccgagactgttgctgacgacgcggtcctagcatacatcaaccagttccttcttgaagacgaggacgaggaatcctatcctattaccagcgcgcctgtggaggattcagcactcctcgccgccgtcgagaaaccattcgtcgacatcctcgagtctgccaagcctatcgcagcacagggctatgaagtaaagtcttggatcactgatgactgtgattctacaggaagcggaaggtttcgcgatgtggtcacaagtagtctgcctcgtgaaatggtgcgggagggtttagttggtgctgctcataagggtcagaagaacccgcgtgacgaggacatggagatggaggggaggaagagcaaacagtcggcactgtgtgacgaagagactgtccgggagatgtttgacaaggtgctgttgtgtaccgacaagaactgtgagttccactcaccaatgccagccgatgcacagatcagcgggggatatgtgaaaggatctagaaataagcgagggcgaaggaaggggagatcaggttctggtgcagaggaggagccagttgatctcacaaccctactcatacattgtgctcaggccgcggctatcgacgaccacaggaactcaagcgagctgctgaaacagatcaggaagcattcctctgctactggagatgctggccagagattggcacactacttcgccgatgggctggaggctcgcctagctggctctggcagcagcatctaccgttcgcttgctgcaaagagaacttccactggtgatatactgaaggcgttcagtttgtatgtcaaagcatgtccgtttaggatactatcacactatgtcgcaaacacgaccatcttaaacgctacgaagagcgccacaaggctgcacatcatagactacgggataatgtatggtttccagtggccagtcctcatgcagcggctctcaaagagacctggtggccccccgtaccttcggatcactggtatagactttcccctgtcaggattccgccctgcagagcgtgttgaggcgacagggcggcggttgcatgagtatgcccgtatgttcaatgtcccatttgaataccaagccattgctgccaagtgggatactatccaagttaaagatctcaacatgaagagcgatgagttcgtcgtcgttaactgcctctaccggatgaggaacatgatggacgagacggtgacggatgacagcccgagaacgcgggttttgaacacaatcagaaagctgaatccccatctgttcgttcatgggatcgtcaatggtacttacaatgcacccttcttcgtgacgcggtttaaggaggctatgttcttcttctcttcgatctttgatatgctcgaagcgaatgccttacggatggatgagcataggctgctgatagagagagagttctttggccgggaagctgtcaatgtgattgcctgtgagggcacagagaggattgaaaggccagagacctacaaacaatggcagatgagaaacctcagggcaggcttccggcagttagctctggacagggagataatgaagagagcaaggtacaaggtaagcaagagctatcagggggatttcctcgtggacgaagataacaagtggatgctacaaggttggaagggtcgtatcatatatgcactttcagcatggactagctagacttgtaaatattagtgagctactgagctgcttagctgacctcttccattaatttcttgattaatcaccatttcattttgctgtattatgtttacgttgttgaatctagccctcttttagaaaccaaagttttgtatgtttgaattggctgcaataatagaatcttgtccgtgtctgcctgacatatttgtgttaatagtgtaagaggtgtttctctatctttgttcctgtctttggaaagaaga

SEQ ID NO: 91060 - DNA, 1082 bp, Zea Mays
ggaaaagaaaagagggctaaaaacctagcaatcccctcctcgccgtagctgtcggacgaggtaaccatggccgcggggggcaccgccgacttcttctaccgcgagtcgcagcgtctgggctacgtcgcccgctctgcgtttaagctgatccagatgcagaagcagcacaagctcatcgcgccgggcgccgctgtactcgacctcggctgcgcccccggcgcgtggcttcaggtggcttgtcagaacctgggtcccctcgagaagggtggcattgtcgtcggcgtcgatgttaagaaggtgaaagtgccctctgcgcactgtgactcacgggtcaggacggtctgtgcagatgtcatgacgctgatgaagcggcaggctcgggcaatgtcgccacaggaacgaggattctctgtgatactgtcagacatgtgccccccagtttcagggatcacgactaaagatggagctatatcttgtgagttgggcatgcgcgctctctcgttggcagtagggaagataaagttaaaagattctaattacagtgataccctagagaagtatctgagctccactgagcctgagtctgacgaggatggcgttcttcgacgtggaggcaacctggtagtgaagtttcttgagaatgaggacatatcagggtttggcaaattctgcaaggtgaagttcaagaaagtatcgttgttgagacccaaggcgactcgacctagctcgagggagatctacatgatctgcgaaggtttgcggtagaaaggagggctcttcagaaggcaagcgaagactccaagaagctaggtcagttgagttgccctgaactgggcgctgttagttctagctgctggtgcaggtgctggctgattggcaatgtgatacagctgtttgatgctgatagcctcccagagcaagttaccacaaagctttgtgtgattgaaccatgctagtagttcgtctagatgttacctgtaataattttgttgaactgtgatactagttcgtctaggagaaacaagcatttgacttgagccctttctgagaacctgaaacacccttgctttttatgttgcaaa

SEQ ID NO: 91061 - DNA, 3575 bp, Zea Mays
tcgtggcccacggacgtgtaggaggggacacgccgccgggcctcactaaccgcaggttcgggagtactccggaacccgccgccgcatccacacgacgccacgactgacgacggagagccccggtctccttccacggctccaccgccaccaccccgcataaaagtagggaagagagccttgcagcgagaaccgtatcgatctattctcgtctgaagcaattcgcccctgtcgtgagcagaaccctacagctcgtattcgcctcatctcgcagcagcagcagaagaacaagggtatggcgaaggatgggggtcccgactggaacggcctgctcaagtggagcctcgcccacggcgacggcaccaacccgccgcgtgctctcagcgaggaagacagaaaatggttcatggatgctatgcaagccaacacggtagatgttgtgaagaggatgaaggagatcactcaggtgatgaaaactccagaagatgtcttgcagtctcagggcgtgacccctgagaacatcgaagatatgttggatgagctacaggagcatgttgaatccattgacatggcaaatgatctacattctattggtgggctggatcctctacttggttacttgaaaaattcaaatgctggcatccgagcaaaggcagcagaagttgttagtacaattgtgcagaataatcccaagagtcagcaacttgtcatggaatccaatgggctagagccactgttgacgaacttcaaatcagatccaagtacaaatgcacgcacaaaagctttaggagccatatcttctctaattcgtcataaccagcctggagtttccgcatttcgattgggaaatggctatgctggattgaaggatgctcttggttccgatgatgccagactccaaaggaaagctctcaatctcatacaatacttgctgcacaactacaaggcagacaggagtgttgccacagagcttggtcttccgaagctgatgatgcaccttgtgtccagcgatgattccttagtgcgtgaagctgctctaggcggcctccttgagttggcgcgggacaagacatctggtaacgcgctacctgaccaagaaaagctgaaagacatgctcaagagccgaatagaagggatcagcgcaatggacactgacgatctccacgctgctcgcgaggagcggcagctggtggattcactctggaaggagtgctacaacgaaccttcgtctctcagggagaagggcctcgtcgtgcttccgggagaggatgctccccaacagccgccaccagacgttgcagggaagatgtttgagccaccgcttcgtgcgtgggcggctgcaagacctgctcaggaagatgactctgactctggcagcggaaagaaggctccgccattgctgcttaagttttgacggccttcttatgccgatactagttcttaggctccaccatgggtgttgaaagctgaaagatcagatctgatggatgcctgaccttcttcgaacctcagttgtggttcttgtaatttgcaccgcatttctgttctgagtatgtttttatgagaagactgggaagatgacagacagatactgtatcacgtgatgctcgtaaattaacactacatgcgaattctcttgctcgattgctcattttctgatgcttccatgattgctgatatatcttaatccgatccgatagttataatttcacgggtctagttctagagatgctgaagagcttgcgcctgcttgcaggcatatgttactttcagcttgaaggatggccgtccgattctcgcgttcgatctggacggtgggtgattttgcctactcccgtccgtcgatgattcgtcgcgagccattcagaaggcagcaaatctagctatctcctctgcctcctgctggcggtcctgctgcgccatggcgctacagctgcgggccgccgctctctgtccgcccctgccactcaccgccttccatggccgcctcgttgcaccttggcctccgcctcccttggtcagcatagctgtcgccgccgcctccagcccgggtccctccgcgcccctctcctgccgcggcccggcgcctcgctggcgacgttcgagcgtgagggcgcgcaccggggccggcggcggcgggcagagggagtccccatacgaggtgctcggcgtgtcgccgtcggcggcgcccaacgagatcaagcgcgcgtaccgccgcctcgcgctcaagtaccacccggacgtgaacaaggagcccaatgctcaggagaagtttctgcggatcaagcacgcttacaacactctgatgaactcagagtcacgatccaagtacgcgagcagcagttcggattcgtcctggtcctccagctcccgggagagcaaatcagctgctgcagaagagccgttctatggatttgcggacttccttaaagatttgcaaacagaatttcagaactgggaagctgggttgaattcggatcagaaacctaaaagcctttgggaagagttggcagcaattggcgaggaatttgtagagtttctggagaatgagttgaagattgatgactcgagaccagaggacgtcactggagatgacccatacacccagtttggacagcaggcaaaaagcgctaaggatgacaagacgtcgacgaacagctttgatgatggtctttctgaaatagaggccgctcttgagaatctgaagaaggaactcggactgggctaaaccgttgatgtggcaactagaggtgttgctgctgctactgacttagttccttgttcatacaaaggtattccttgtattgtatgtaacggttggtgataatgattagcagttgtgatctatcacattcgtttctgttttgacttttctagatacaagatctggcatatacctagatggctagcaaaagctaagtgccagaaagccaaaacggcctataatttgggatggagaggattatcaatagctcaagagcttctttctgaattctaattgttcagcgtgttcggaaagaaaaagggacaaatgtttgatcgcctttagaattttgtgggtagaggcgttctgattttgtgtgatgggggggtacaaaagaaaaaagttttgcaccgatagcactgttggggaccttcggcgtccgaaggtcctcaaaaactggatttaacagtatttctgtagtacaatgtgtgaacaggtaccctcaaactaaagtcggcattgcagcagaccggaataatacgaagcttgattcagagccgaaggtgctgagcaggaaagcttcggcgtaacagcaaagagtggaaccgacttaaagatgaaaaggctatccagaccccgatagattactatagagttattatcaaatgtaaagggcatgaatgtaattttgtaagggctgtgtcccttgtctataaataggtgaacagtatccccgtactgttcacgctgacttggcattcgttttttgcgccaagcttgtactgttattcccttccgattgaaggtacacttgtaattcgacaatgtttctgtttatgccctatcataatatatgattgcttatattgtcttt

SEQ ID NO: 91062 - DNA, 1562 bp, Zea Mays
acggacgtgtaggaggggacacgccgccgggcctcactaaccgcaggttcgggagtactccggaacccgccgccgcatccacacgacgccacgactgacgacggagagccccggtctccttccacggctccaccgccaccaccccgcataaaaaaccctacagctcgtattcgcctcatctcgcagcagcagcagaagaacaagggtatggcgaaggatgggggtcccgactggaacggcctgctcaagtggagcctcgcccacggcgacggcaccaacccgccgcgtgctctcagcgaggaagacagaaaatggttcatggatgctatgcaagccaacacggtagatgttgtgaagaggatgaaggagatcactcaggtgatgaaaactccagaagatgtcttgcagtctcagggcgtgacccctgagaacatcgaagatatgttggatgagctacaggagcatgttgaatccattgacatggcaaatgatctacattctattggtgggctggatcctctacttggttacttgaaaaattcaaatgctggcatccgagcaaaggcagcagaagttgttagtacaattgtgcagaataatcccaagagtcagcaacttgtcatggaatccaatgggctagagccactgttgacgaacttcaaatcagatccaagtacaaatgcacgcacaaaagctttaggagccatatcttctctaattcgtcataaccagcctggagtttccgcatttcgattgggaaatggctatgctggattgaaggatgctcttggttccgatgatgccagactccaaaggaaagctctcaatctcatacaatacttgctgcacaactacaaggcagacaggagtgttgccacagagcttggtcttccgaagctgatgatgcaccttgtgtccagcgatgattccttagtgcgtgaagctgctctaggcggcctccttgagttggcgcgggacaagacatctggtaacgcgctacctgaccaagaaaagctgaaagacatgctcaagagccgaatagaagggatcagcgcaatggacactgacgatctccacgctgctcgcgaggagcggcagctggtggattcactctggaaggagtgctacaacgaaccttcgtctctcagggagaagggcctcgtcgtgcttccgggagaggatgctccccaacagccgccaccagacgttgcagggaagatgtttgagccaccgcttcgtgcgtgggcggctgcaagacctgctcaggaagatgactctgactctggcagcggaaagaaggctccgccattgctgcttaagttttgacggccttcttatgccgatactagttcttaggctccaccatgggtgttgaaagctgaaagatcagatctgatggatgcctgaccttcttcgaacctcagttgtggttcttgtaatttgcaccgcatttctgttctgagtatgtttttatgagaagactgggaagatgacagacagatactgtatcacgtgatgctcgtaaattaacactacatgcgaattctcttgctcgattgctc

SEQ ID NO: 91063 - DNA, 1526 bp, Zea Mays
acggacgtgtaggaggggacacgccgccgggcctcactaaccgcaggttcgggagtactccggaacccgccgccgcatccacacgacgccacgactgacgacggagagccccggtctccttccacggctccaccgccaccaccccgcataaaacagcagaagaacaagggtatggcgaaggatgggggtcccgactggaacggcctgctcaagtggagcctcgcccacggcgacggcaccaacccgccgcgtgctctcagcgaggaagacagaaaatggttcatggatgctatgcaagccaacacggtagatgttgtgaagaggatgaaggagatcactcaggtgatgaaaactccagaagatgtcttgcagtctcagggcgtgacccctgagaacatcgaagatatgttggatgagctacaggagcatgttgaatccattgacatggcaaatgatctacattctattggtgggctggatcctctacttggttacttgaaaaattcaaatgctggcatccgagcaaaggcagcagaagttgttagtacaattgtgcagaataatcccaagagtcagcaacttgtcatggaatccaatgggctagagccactgttgacgaacttcaaatcagatccaagtacaaatgcacgcacaaaagctttaggagccatatcttctctaattcgtcataaccagcctggagtttccgcatttcgattgggaaatggctatgctggattgaaggatgctcttggttccgatgatgccagactccaaaggaaagctctcaatctcatacaatacttgctgcacaactacaaggcagacaggagtgttgccacagagcttggtcttccgaagctgatgatgcaccttgtgtccagcgatgattccttagtgcgtgaagctgctctaggcggcctccttgagttggcgcgggacaagacatctggtaacgcgctacctgaccaagaaaagctgaaagacatgctcaagagccgaatagaagggatcagcgcaatggacactgacgatctccacgctgctcgcgaggagcggcagctggtggattcactctggaaggagtgctacaacgaaccttcgtctctcagggagaagggcctcgtcgtgcttccgggagaggatgctccccaacagccgccaccagacgttgcagggaagatgtttgagccaccgcttcgtgcgtgggcggctgcaagacctgctcaggaagatgactctgactctggcagcggaaagaaggctccgccattgctgcttaagttttgacggccttcttatgccgatactagttcttaggctccaccatgggtgttgaaagctgaaagatcagatctgatggatgcctgaccttcttcgaacctcagttgtggttcttgtaatttgcaccgcatttctgttctgagtatgtttttatgagaagactgggaagatgacagacagatactgtatcacgtgatgctcgtaaattaacactacatgcgaattctcttgctcgattgctc

SEQ ID NO: 91064 - DNA, 2704 bp, Zea Mays
ctccccgcccctcccggttttcttcctcccggaccccgccccggcggccgccgattttggggaagcccggccgtttcgcctcccgaaaacccggtaggacacgcgaatccaattgtgccgttcctgacgctgacgcccggcggtgatggctgatgcagcagcgttcgtgctcttgcctgatggagagggacgcggttctggaggacgcggcggcgggggatggggaggagcaggaccaggaccaggaagaggtggtggtgccgatcggagcgcagaagcacgatccggcgtggaagcactgcgtcatggtgcgctccgacggccggatgcgcctcaagtgcgcctactgcggcaagcactttctcggcggtggtatccaccgcttcaaggagcacctggcccgccgccccgggaacgcctgctgctgccccagtgtgccccgcgacgtccaggacaccatgctccgcagcctcgccgccgtcgctgccaagaagatgcagcgcaagctcgccgccgccagcacgacgcccgcctctgtctctacggctagcgggggtaccggcagccccatccacatgatctcgctcaacgaggtgctcgacttcgaggccgtgccgctcgaggagcagaggcctccggttccggagggcagcattagggggagtaccagcggtaagaagaagaggaagcaggtgacctacgcccctgctccgccacttataccccagatccggccgcagcatgttcggtctacccctcagaacaatcttcttcacgggctgcagcatgttccgcctactcctcagaccaaccctcttcatcaggttgtcatggcagtgaacgcagtgacaccagcagagcatttcgaacatgctgccccctcggagaaggagcatgtttccgtggcagttgggaggttcttgtatgacgccggtgtgccattggaagcggtgaactcggtctacttccaaccgatgctcgaggccattgcggcggcaggggggaggcctgagacgctctcgtaccatgactttcgcggtcacattcttaagaggtcactcgacgacgtgacggctcgcttggagttcttcagggggtcatggaccaggacgggctgctcggtgttggctgacgagtggatcactgataaaggcagaaccttgataaacttctccgtgtattgcccggaaggtactatgttcctcaagtcggtggatgcaaccagcatcgtcacatcttcagatgcactgtacgagctactaaaaagtgcagtcgaggaaattggcgagaaaaaagttgtccaggttatcacaaacaattctgaggtccatgcagctgccggaaaaaagctaggtgaaacattccccacattgttctggtctccatgcactttccagtgtgttgatggcatgctcgaagatttcagtaaggtggaggcaattagtgagataataagtaatgcaaaggccattacgggatttgtctacaacagcgcatatgcgttgaatctgatgaagaagtatctgcaagggaaggatctgctggttcctgcggagactcgtgcggctatgaactttgtgacgttgaagaatatgtacggtttgagggaggctttgcaagctatggtcaactcggatgaatggatagacttgttgccaaagaaaggagggattgaagcaagcaatcttgttaataatttgcagttttggaactcctgtgctgccgtcgttcacatcactgagcaacttgtgcaccttcttaagctagtcggtaaccccaagaggccttctatgggttatgtatatgctggactgtacaaggcaaaagcagcaatcaaaaaagagctggtgagtaagaacgattacatggtttactggaatattatcgactggaggtgggacaaccagacaccacagccacttcattcagctggtttcttcctgaaccctctattttttgatggaattcgaggtgacatatcaaatggaatattctcaggaatgctagactgcatagaaaggctggtacctgatgtgaaaatccaagataaagtacagcgagagctccacatataccggagtgaaacagcagtggattttcgtaggcagatggctgtccgatctagacgaactttacctcctgccttctttcagaaattggaaacttgtaagcctattgcatcctttgatcgcggtaatcataaggtgagacaacaacacaaggcgaaagcgtttgatcctctctctgtggactacatagacgtagtcgatgattgggctgtggatagacctgcaatgttctctggcccagctgagcagccaaactggatggagattaatcaatcaggcaaccgaatgacatcaagggaaccaactgaagatgaattcgaatccttcattgaaggagttgatgacgaaatgatccaaggtgctgcacagggcttccatgaagatggtgatgatcctgcttgtggctgaggctatatagattgacagccagttaacctgtaagctaatgttgcatggctaaaatctggggttgcctgctgtattttttcgaaacaaggccatcttattgtgtatcttatacttggtgtctatttgggctagttgtagagatattttagtgtccagatatcttcccgagtccatcgttggtctacgacacacatttttgtcacaataaagtttgaggtttcagttcc

SEQ ID NO: 91065 - DNA, 2842 bp, Zea Mays
ctccccgcccctcccggttttcttcctcccggaccccgccccggcggccgccgattttggggaagcccggccgtttcgcctcccgaaaacccggtaggacacgcgaatccaattgtgccgttcctgacgctgacgcccggcggtgatggctgatgcagcagcgttcgtgctcttgcctgatggagagggacgcggttctggaggacgcggcggcgggggatggggaggagcaggaccaggaccaggaagaggtggtggtgccgatcggagcgcagaagcacgatccggcgtggaagcactgcgtcatggtgcgctccgacggccggatgcgcctcaagtgcgcctactgcggcaagcactttctcggcggtggtatccaccgcttcaaggagcacctggcccgccgccccgggaacgcctgctgctgccccagtgtgccccgcgacgtccaggacaccatgctccgcagcctcgccgccgtcgctgccaagaagatgcagcgcaagctcgccgccgccagcacgacgcccgcctctgtctctacggctagcgggggtaccggcagccccatccacatgatctcgctcaacgaggtgctcgacttcgaggccgtgccgctcgaggagcagaggcctccggttccggagggcagcattagggggagtaccagcggtaagaagaagaggaagcaggtgacctacgcccctgctccgccacttataccccagatccggccgcagcatgttcggtctacccctcagaacaatcttcttcacgggctgcagcatgttccgcctactcctcagaccaaccctcttcatcaggttgtcatggcagtgaacgcagtgacaccagcagagcatttcgaacatgctgccccctcggagaaggagcatgtttccgtggcagttgggaggttcttgtatgacgccggtgtgccattggaagcggtgaactcggtctacttccaaccgatgctcgaggccattgcggcggcaggggggaggcctgagacgctctcgtaccatgactttcgcggtcacattcttaagaggtcactcgacgacgtgacggctcgcttggagttcttcagggggtcatggaccaggacgggctgctcggtgttggctgacgagtggatcactgataaaggcagaaccttgataaacttctccgtgtattgcccggaaggtactatgttcctcaagtcggtggatgcaaccagcatcgtcacatcttcagatgcactgtacgagctactaaaaagtgcagtcgaggaaattggcgagaaaaaagttgtccaggttatcacaaacaattctgaggtccatgcagctgccggaaaaaagctaggtgaaacattccccacattgttctggtctccatgcactttccagtgtgttgatggcatgctcgaagatttcagtaaggtggaggcaattagtgagataataagtaatgcaaaggccattacgggatttgtctacaacagcgcatatgcgttgaatctgatgaagaagtatctgcaagggaaggatctgctggttcctgcggagactcgtgcggctatgaactttgtgacgttgaagaatatgtacggtttgagggaggctttgcaagctatggtcaactcggatgaatggatagacttgttgccaaagaaaggagggattgaagcaagcaatcttgttaataatttgcagttttggaactcctgtgctgccgtcgttcacatcactgagcaacttgtgcaccttcttaagctagtcggtaaccccaagaggccttctatgggttatgtatatgctggactgtacaaggcaaaagcagcaatcaaaaaagagctggtgagtaagaacgattacatggtttactggaatattatcgactggaggtgggacaaccagacaccacagccacttcattcagctggtttcttcctgaaccctctattttttgatggaattcgaggtgacatatcaaatggaatattctcaggaatgctagactgcatagaaaggctggtacctgatgtgaaaatccaagataaagtacagcgagagctccacatataccggagtgaaacagcagtggattttcgtaggcagatggctgtccgatctagacgaactttacctcctgctgaatggtggtatacatatggaggagcttgcccaaatttaacacgtctagcggtccgtattctcagtcaaacctgcagcgcaagaggatgtgaccggacgaacattcattttgaacaagttcatgatgaaagaatgaatagttttgagcgtcagcgaatgcatgacctcacctttgtacaatacaacctacggcttcagcaaagacaacaacacaaggcgaaagcgtttgatcctctctctgtggactacatagacgtagtcgatgattgggctgtggatagacctgcaatgttctctggcccagctgagcagccaaactggatggagattaatcaatcaggcaaccgaatgacatcaagggaaccaactgaagatgaattcgaatccttcattgaaggagttgatgacgaaatgatccaaggtgctgcacagggcttccatgaagatggtgatgatcctgcttgtggctgaggctatatagattgacagccagttaacctgtaagctaatgttgcatggctaaaatctggggttgcctgctgtattttttcgaaacaaggccatcttattgtgtatcttatacttggtgtctatttgggctagttgtagagatattttagtgtccagatatcttcccgagtccatcgttggtctacgacacacatttttgtcacaataaagtttgaggtttcagttcc

SEQ ID NO: 91066 - DNA, 234 bp, Zea Mays
atggcacaatcttcgtcaatatacacttggtggaataagtgcagagccaaagtcgataaatgctcaaggagagagtttgatggtttgatcatccttttctggtgggagatttggaaagagcggaaccgcagaaccttccaaagcctagagaagtcggagtgtgtgattgcagggttaatcaaggatgtttttgagcagcaaagagttgctaattcttttgactttggttgctag

SEQ ID NO: 91067 - DNA, 1556 bp, Zea Mays
tattttaaaaactgtggttttcaaaaactttattcccaaacagggccttaatcggatggagtacctgtatcgacgaaatacatgttcagaaaccttcacgttagagagatatgcaagcggttcagaggttgagtttcttgttgggaattgggatgggatattccttcttccctgcgtgcctctgcaacttgagatacggcgcacaattgccgcatatccgcgtgggaaatgcgcatctgcgccgcgtgtagggtcgctgctggagcctccacatccactccacttcctgaccgctttgcctgtgcttgtcaagcttgtcggccgcctcgggtcagtgagagcaaagcaaccttcgtgtcccgcggtagatgaacctgcctctcagccagcctcgtcctcgtcctgccgccggattagcgtccaggtgcatcatcttcagccatgaataggcacgaccgtctctgctcccctcccaaaatatccagacaacaacatgatgagcataagccgcggcgtgttccctgtcgaaagctcaaagctcatgctgtgaacggcaagcaagaaaagcaagcgtcttttccccagtctcggcgattcaccgtgctcgtctcctcacagacgagaagagtcaaccatacagcgcagagcagtgtgaagtcggattaaaaacaaaagaaaacagaagaacaagaaaaaggacaacacaacacaccacaccacaccacagacggacaggacagcgtccaaggttggtttggtcggttgttcgctcatcagattacacatccctcgtctctcacagcctctctttccacgcaacaacaacaaaaaaaaacctaatccacagctggctcagagttcagacgacacgattcgccggcggtggggtgggcgaaaggctggagcggttggtggtgggtgggtgggtcaagactcaagagcaagcagaaaccagtcgcctggtcaccgcgcggcggcggcgggcgcggtgcagcggcgcaggcagaagtcggggacgcggtccatgcactggtacaccggcgggtcggcgctgaggctggacttgacgcagtccctgcaggccgggtggcacccgcggggcgccgcgtccaggcaccggcacagccgtggctccgacctggtgcagccgccgcagctgtcgcagcacggccacgcgcgcgccgccgccttcccccggctcgccagctcccctcctcctcctcctcctgatgctgctccctgccctgaaaccgcagaccgattcggaaccccgtgagccagccagactgaataaccgaaaggacaaatcttgaactagttaagctttcctacatacctctgctttgaacgtgggagtggtggtggtggtgcctgttgctggatcgcgcgagcacggtgagaagggcgatcgtgaggaagaacagcgcttggctcctcatttccgaccgtctctgggagaatttggtcgcgaccggtgagcctcctctcctcttgctgcggttgttgtttgttcttggttggactggagctgcttgtctatctcttgcttgctttgc

SEQ ID NO: 91068 - DNA, 2299 bp, Zea Mays
agccgcggcgtgcgtgtgagtcaccgcggcgcggaatcatcagtgccctgcccctgccgttggtgcgctgcctcgtgcctgcgcctgcgcctccccacccacgcatcggcaccgcaccggcagaccggctgcttcaaatcgcgcgtcgccacgagggcgttctgtagctcgcagcctcgcactccccgctagctccctcagttcccgtcaatcggagagaagagagagagagagagagagagagagagagagagagagagagagagagagaggggaggagggagaaggagcaacaagagcgaacgcaaaagtacagtacagctcctgagatggcggcgccggcgccgaagcaggaggagctgcagccgcacgccgtcagggaccagctgccctccgtctcctactgcctcaccagcccgcccccatggccggaggccgtcctcctcggcttccagcactacctcgtcatgctcggcaccaccgtcatcatccccaccgcgctcgtcccccagatgggcggcggcaatgaggagaaggcgcgggtggtgcagacgctgctgttcgtggccgggatcaacacgctgatccagagcttcctcggcacgcgcctccccgccgtcatgggtggctcctacaccttcgtcgcgcccaccatctccatcatcctcgccggccgctacagcggcattgccgatccccacgagaaattcgtgcgcatcatgcggggcacgcaaggcgcgctcattgtggcctccaccctccaaatcatcattggcttcagtggcctttggcgcattgtcgtcaggctgctgagcccgctgtctgctgctcccttggtcgccctcgtcggattcggcctctatgaactggggtttccaagtgttgccaaatgtgtagagatcggtcttccacagattttactgctggttgcactttctcagtacgtaccacatttggtccccttgctgagtactgcctttgagcggtttgctgtcataatgtccgtcgtcctcatctggctttacgccttcttcctgacggtcggcggtgcctataagaatgctgctcccaagacccaattccactgccgcactgatcgatctgggcttgttgggggcgctccatggataagtgtaccctatccgtttcagtggggagctccaacctttgatgctggtgaagcctttgctatgatggcagcttcttttgttgctcttgtggagtccaccggtgcatttatcgctgtttcacggtatgccagcgcaacaccatgccctccttccgtcatgagccgtggcatcgggtggcagggagttggcattttgctgggtggattatttggaactgccaatggaaccactgtatctgtcgaaaatgctgggctgctcgctttgacacgcgttggtagtagacgtgttgtgcagatttctgctggatttatgatattcttctcaatccttggtaaattcggggctgttttcgcatcaattcccggcccagttatcgcagctgtatactgtcttctcttcgcatatgttggtatggcaggtgttgggttcctacagttctgcaacctgaacagcttccgaacaaagttcatcctgggattctccttgtttatgggtctgtcggtgccacagtatttcaacgaatacacttccgtcgcgggctttggtccagtgcacacgcgtgcaagatggttcaacgatatgatcaacgtggtgttttcctcgaaggcgcttgttggcggggcggtggcgtattttctggacaacaccctgcacaggcgcgatggcgtcgcgaggaaggaccggggccaccatttctgggacaggttcaggtccttcaagaccgacccgcgcagcgaggagttctactccctcccgttcaacctcaacaaattcttcccgtccttctgatccttgctggtgctggtaactgagagcagaaaaaatggctttggactgtgattttgttggcaatgccacgccgcccaagagggctgtttctcctacttctgttgtggtgagctttgaatcttgcagagctcagcgtaaactatttcgaaaggagtggagaaattgcttggtattgctggatgtaaattgggtcgggaaccgggatagattgataaaatgaaaacagaactgcgccagtactctttctgtagattataaactattgagctccagtgctattttagagtaaactaatgctggttgatgtgcaatcattgcatactctgcagtgagatactgacactgagcactgttgttttgttaatttcctgaattcgcag

SEQ ID NO: 91069 - DNA, 825 bp, Zea Mays
cctttgctcatcgtcttccatggaaccgcgcatccctggggcatcctcgcggcatcatccgcagccccgcgcggcagcggccgtgctcgccccgtgccccggcggccgtgggcagctcgcaccccggcagcggcatgatgtactaaggaacagtgagatagtaacatgaatttactttaccctgcaggttgccaaatgtgtagagatcggtcttccacagattttactgctggttgcactttctcagtacgtaccacatttggtccccttgctgagtactgcctttgagcggtttgctgtcataatgtccgtcgtcctcatctggctttacgccttcttcctgacggtcggcggtgcctataagaatgctgctcccaagacccaattccactgccgcactgatcgatctgggcttgttgggggcgctccatggataagtgtaccctatccgtttcagtggggagctccaacctttgatgctggtgaagcctttgctatgatggcagcttcttttgttgctcttgtggagtccaccggtgcatttatcgctgtttcacggtatgccagcgcaacaccatgccctccttccgtcatgagccgtggcatcgggtggcagggagttggcattttgctgggtggattatttggaactgccaatggaaccactgtatctgtcgaaaatgctgggctgctcgctttgacacgcgttggtagtagacgtgttgtgcagatttctgctggatttatgatattcttctcaatccttggtatggctcatgcttttatgtgaccatgtatgcaactaatttttggctcgtaatactt

SEQ ID NO: 91070 - DNA, 932 bp, Zea Mays
agttaaagtaacatcaataatcaagcacttgttaaaaaaaacatcaatgatgaagcaaacaggtcacagctgaatgccaaaattgtggacatatcccaccaaacaggccgatagccctctatctcggcagcctccttggcccatgtgatgatcgccttcaaggttcaagctggtggacctcagagtcaaccggcccaaccctctcagtctcgggtcgccagtcctcgcctaggtttaggcatccagcggccgcagcctccacaccacgagcggaaggagatcgccggaagaggggggaggcgcggagatgagcggaagcgcgttcaacgcgttcaagtcgcgggtgccggtggcgtggagtccccggctgtacatcacgctggtgcggggcctaccgggcacgcgccgcctccaccgccgcacgctcgaggccatgcgcctccgccgctgccaccgcaccgtcgagcaccgcaccacgccgtcgctgctcgggatgctcacccaggtgaagcgcctcgtcgccgtcgagaccgaggagatgtacaacgcgcgcaagcaggccgaggcggagaggcgcgcgcccagacccccgctcgtcgtctcccaccaccagccaccgccgccggctctgaagccggcagccgccgccgcggagggtgctgctgccactgcgccatagcctctggtaagctcctcgcgttccgatcgtcctggtgtggtctggttttccattttgcttatttgccctcgaagcgtttgatgcaacgcctcgagtcggtgcgcgctaaggggctgtcaatatagcaaattcagatgctcaagctaacacaaaatggcttagttttgtttataatgaagaagcaatctaagagttagcggctgcgtttaatttgttctgcatttttgtattgagtgctttatatcagacattc

SEQ ID NO: 91071 - DNA, 95 bp, Zea Mays
ggcacctagcactagcagtctaggacaagcaggcggagcagttcacaacttcacatccaggcacaagcaggtgcatcacagcagagcagacacaa

SEQ ID NO: 91072 - DNA, 599 bp, Zea Mays
aaacgacagccagagccaccacctatgagaggctgaaagcaacggtgccgccggagatggagacgaaaaaggaggcggcagcggcgaggcaggcgaaggagtccctggagctggcgttccagatgtcccagatcctcgaaaccggcctcgaccgccacaccctgtcgctgctcatggcgctctgcgaccgcggcgccaaccccgaggccctggccgccctcgtccgcgaactctcctccactgctcccccaaccgccgccgaggctccctcccccgtgagcaacgccgccgcggggccggccccggcaacagcgtccatgttctcctccggccttcgccgtccctagggtttgtgatgtcccttttttcgccggtgagactgcttgccagttagtcgactagatcccgcagtatgcactcagccgctgtgagtgcctgaatgtagtatgttcttatgttttgactaaatttgtgcctcacaagaagataatggttcaaccaaatgccatatatcacgttactgcgtagatgtgctgctacctgcatttggcatcaagattcacattataatgtctatgtttgggttataatattaattt

SEQ ID NO: 91073 - DNA, 2157 bp, Zea Mays
caaacaggctgcagacagcaggggtgcccaaaagcagggaaggaagagcggaaaagtccaccagtccaccaccaccttcctcggatccacaacccggacgcccgagtgcagagtgctccacccgggtcctttcttcctccttccccagtcccagtcccagtatcagtaccagtccaagccccactccccaccccgaacctcgcaagtattttagtcttactccattcgagccctaccactaccagtggcaggcgagcgagaggcggtggaggaggagcggacggaaccgtcgcctgctgcgtctgcctgcgagatctaggcgagcgcggccatgggtgctcgctgctccaagctctccgtctgctggtggcctccccacttcaaatcgccaatgctcgagaatggcgccgccggagatgatggcagcggcgtgccggtgttcgccgagtacagcttcgacgacctccgggtggccaccgacggcttcgcccccgatcgcatcgtgtcggagcacggggagaaggcacccaacgtggtctaccgtggcacgctcttcagctccggccgcaccgtcgctattaagcgcttcggccgctccgcctggccggactcacgccagttcctggaggaggcgagggctgttgggcagctgcgtagtggcaggctggccaatctgatcggttgctgctgcgagagcggcgagcgtctcctcgtcgcagagttcatgccgcacgagaccttggcaaagcatctcttccactgggagacaaatccattgagttgggcaatgaggatgagggctgcgctttatgtggcacaagcgttggactactgcagtagcaaagggagggcactctatcatgacctgcatgcatacagggttgtctttgatgtggatggtaacccaagattatcatgttttggtctgatgaagaacagccgagatggaaagagctacagtactaatttggccttcacgcctcctgaatatcttaagacaggcagagtaagtcctgagagtgtggtttacagttttggcactgtcttgcttgatctcctgagtggaaagcacattccaccaagtcatgcactcgaccttataagaggaaagaactttctagtgctgatggattcttgcttagaaggtcatgtatccaactcggacggaacagacttgatgcgattagcatcccgttgcctgcaatatgaagcacgtgaccgtccaaatctgaaaactgtggtatctggtctcacaagtctccagaaagatgcttatactccttcgcacactttgcttgggattcaacatgataagaacaactcaggtcaagtttccttatctgctattgggaaagcttttgccagagcagacctgaatgaagtgcatgaaatattgctgcatgatggatataatgaggacgacgaggctaatgctgagctatctctccagtcatggaatggtgatatatctgagagctttgttgttaagaggcgtgcagacaatgcctttaggtctaaggaatacacgactgcaatcgagtgttactcaaggttcctcgactcaggtgcagtggtggctccaaccatgctgggacggagatgcttcgcacatgtggtggccggcaacccacaggaaggcctcgaggatgcaaagagagccgagattattgcatcggactggccgatgggacactacctgcaggccctggcacttcataagctgggtagggaggctgaaagccaagaagcactgaagaatggcactgccttggaagctgcaaggaatagtagagctagaactgtatagccctgaatttgtgataccatgcccttcctgcttgtacctagatcgcctgcatttcgggtgcctacctccaatccaatgctttgccaccagtagggttgtttttggtattccctaacttgtatcgttatttcccgtggttttacaagtcgaagaactcctaggtcagctgttattacacctccaatatatccatgaatacaggaatgggcaactagtctgctatagcattctgttgatgcgagtttgtaaagtgacaggatttcgatttatttcaacaaacccatgtatatacaaacttttgaactctgcaacttaagatatttgaggccaggcaaccttcaactgttgtt

SEQ ID NO: 91074 - DNA, 606 bp, Zea Mays
gctttcgcctcgcgtctcgacagaaccgtgacagaaatccccatcccaagcgagggttttgctgctgctccagccggacccaggacgagaagaagcggcgcgatggcggtgggcgacctggcgttcaaggcgctgacggctgggctgggcgtcgccacgctctacctcgccgccaccttctccgtcaacgtctaccgcggcctctcgtggcactccgagcagtccaagctagaaaaggcgaaaaccgaagattgaaaaagaccagcaagcagttttagagagcagatgaaaggcgggcatttttgttgatgtcttatctttcgtgtcaattgtgtttttgcttgtcccgtagacctttcaggatatctggagtgtatcttcaagtatgtgatatatatatatacgattcaagaacctgtctgggatgattattcatctttcgggacacgtcctgtttggatcattatataacaacatcgcaaatgtcttgtgtatgtaacattttttactctggaactgctaatgctcagttaagaagtggggacacgtgtgtgtttttcctcctttgcagccaactttcatgacatctcaaatactactgaagta

SEQ ID NO: 91075 - DNA, 990 bp, Zea Mays
cgtcttccaaaatccaaaccgctcgctcctcaccgaagacgccattagccatgagcagcttggcttatccgctcctccggctcccgtgccgctgctctatcgcgccggcgccggcgccggcgtctcagctccccgcaccggtgtgtctatctgcttcggcttccgcaaatgcagggggcgatctgacggcgcgggaaaagcgagcgcagcgtcgggaacggcgggagctgcgtgcgacggactggaaggaggaggtgcaggaccggctgatccacgagccagcgcggcggcggaagaagcctcctaagcgttcgtggagggaggagctcaacctcgacctcctcgccgagctggggccgcagtggtggctcgtgcgcgtctccatggcgcccggcaccgactacgtcgacctcctcaccaaggctatctcacggcgctactcggaagtccccttcaagatttacaatccatcaatccaagtaaagaggagattaaaaagtggtgcaatcagtgttaaatcgaagcctctgcatgccgggttggtctttctgcattgtaccttaaacaaggagcttcatgactttatcagagacacagagggttgttatggctttattggagctacagttggttcaatcaagaggcagattaaaaagccaaaacctattccagttgatgaagttgaatcaattattagagaagagaaggaggaacaagagagagttgacagagaatttgaagaaatggagaatatgggaaacattgagcctttcagtaaacccgttgaagaatctgaacttatgttaatgaataagatcaagaagcagtttaagaaatcgtcctcacagggtggcactagacacagtgctttttcgcctggtgcaactgttcatgttctctccgggccttttgcagacttcactggttccatcctggaagtgaatcgcaaaaacaagaaggttgagctgattacagattcatcttagcgaa

SEQ ID NO: 91076 - DNA, 293 bp, Zea Mays
acaggaatcttgtgtttatgtatcacagtagccgataactttttatcaacaacccagatctccagctgggcctgagtgaatgaagcaggaacttcagtgggtgggcagtggaccgttgaagacccagctatcagcaagagaaacagttagcacacctgcgcatgagctaccgtcaaaattaaccatttataaacaatgaggatgctgaggttagaaagctcgctgatttccactaggctgttcacattattttccctgtgctcgaatgcagaaagcagtcccttaggccattc

SEQ ID NO: 91077 - DNA, 190 bp, Zea Mays
gcacgtgttctataaccttattacattgaaattgatttcccctcttcttctttcctgtttgtcggggttactgaaatgcaagtttataaacaatgaggatgctgaggttagaaagctcgctgatttccactaggctgttcacattattttccctgtgctcgaatgcagaaagcagtcccttaggccattc

SEQ ID NO: 91078 - DNA, 374 bp, Zea Mays
gtccctcttaactacaaagtcaaatctcaaggtgatgattacaaacgatgttgatgcgagaattaaattcaaagtcctcttacacatggcgattattactttttttgagattaacaaggagaagtaaatgaaataaaatctacggagccactagtacagtagctatgagcctttgtctgttcttcaccaacgcagccagccagcagctactccgcaggtccagctccaggctccagcagggtgcgcattggcacccaccaacaactctcggaggtgatccgtgggccgcggcgctatgcaacgctaccacgcggtctgtcacgccatgcatgggtctgtcacggtcggccaccacgcggcaccaggtagacccg

SEQ ID NO: 91079 - DNA, 2343 bp, Zea Mays
atccagttgaccgctcccatccagatgttaatgacagttcaattgccaaagtggctacttctaatgaaactcccctaatagatcagaataaatcaggaagtatgaagggaggtgaggccctgaaaaattcatccgagcaacactcagctgaaacaaaacttaattctacgcaagtgcaagagaatgtacagttgccaaacaatgtaaacgacactcattctgagagcatctctagtgtcactactaaagcagagaatacatcgcaaacacatactcagagacgcttgcttgaaacagccgacaagagtgatgatcaaacaggaagctcagaaactcatgaaagtgattcgggggcaaaagcagcagccactgttgaaaatagtgaacccctagacgaagatgcagatgcatcatttgacttgtttcgggacccagaagatcttcctgatgagtacaattatgattatgatgactatgttgatgatcgcttgtggggagatgaggattggaaagagcaagaacatgagaaagaggaagattatgtgagcatagatgcccacatcttgtccaccccagtaattgcagatattgacaaagatggtgtacaagaaatggtgattgctgtatcatacttctttgatcatgaatattatcgtgattcagatcatgcgaaagaactagaaggaattgacatgggaaaatatgtcgcgagcagtatagttgtttttaaccttgacacccggcaagttaaatgggctgcagatcttgatttgagcacggatgctgtaaatttccgtgctcatgtgttttcctctccaactgtggttgatttggatggtgatggatatttggacatccttattgggactgcttatggcttgttttatgttattgatcatcgtggtaaggttaggaacaaattcccccttgagatggctgagattcacgcaccagtcattgctgcggacatcaatgatgatggcaaaatcgagatggttaccactgattcccatggaaatgtagcagcatggactgcagagggagaagaaatctgggaagtgcatctaaagagtctgattccacagagacctactgttggtgatgtcaatggagatggccacactgatgttgtggtcccaactgtgtcaggaaacatctatgttcttagtggaaaggatgggtcaaaaatccaacctttcccatatagaacacatggaagaatcatgagtcctgttctacttctcgacatgagcaaacatggagacaatgcaaaagggctaactcttgcaacaacgtcctttgatggttatttatatttgattgagggatcgagtggctgtgcagatgttgttgacattggagagacctcgtacactatggttttggctgataacgtggatggtggagatgaccttgatcttattgttaccactatgaatggcaacgtcttctgcttctccactcaatcaccacaccatccgcttaaggaatggaggtcatcaaaccaaggaaggaataatgctgcatatcagtacaaccgtgaaggtatctatgttaagcatggttccaggaccttccgtgacgaagagggcaagaatttctggatagagtttgaaatcgttgacaagtacagggtgccctatgggaagcaagctccttataacgtgacggtaactttacttgttccggggaattatcaaggagataggcgcattgttgtcagtggtgtgtatcatcaaccagggaagcaacggatgatgcttcccactgttcctgttagaactactggaactgtggtcgtggagatgatcgataaaaatgggctgtacttctccgacgagttctcactcaccttccacatgcattactataagctgctgaaatggcttctgctactgccaatgcttggaatgtttggtgttctcgtcatcttgaggccccaagaaggtgcgccgctgccatcgttttcacggaatatcgactagtggtgaaatgccggtgacccattgaagctgacgaagtgactccccaacatctccatgacctaaatgtcttgttcagtgtagtatcccaacagttaaccatttcatggattatagttatattttttacaatgtacccatttagttctgcagaacaattttgtacacagccattttcaatattggctcacccaaagaacaagcatattgtcaccattgagagtttacagtaggccttggaaacggtaattgtcagattctaagagaagcgacactcggagaggagaagcaaaactctcggatactgtgtcaaaacgctcttcataactattagtagaaaacaaacctatattaagcctgt

SEQ ID NO: 91080 - DNA, 1695 bp, Zea Mays
gcgtctctttctcttctaacgttcaaatattcaaacgaggagcggatggacagaggggacggaggctggatgaggcactagaccactagtgcactacggaaacgcgagagaagaggcagacggcggcggcggccatggatttccactccctctcccggcgagaacttcaggcgctctgcaagagcaacggcatccgtgccaacatgtccaacgcggccatggcggaagcgcttaggtgcctccccgcggtggacaggatcgacgagatcgggagcacggcgccaccgccggtatcggcgatgaaggaacagacgccggatgcggaagaggcggtcggaggggagcaggagcacgggtgcccgctccctcgcggcggccgtgcacgggggaagagaaggaaggccggggcacggaagagtaagacggagggggatgaggaggaggtgatggtgccgggcccacagaccttgccgggacccaagatgacggtggcacgggaggctgctgcggcacctgtggatgatgcggaagaggcggccgtaggaattaggacgagaaggtcagcgagatccaaggtgaaggtcgcgctggatcagaaagaggaggacgtacaagcggcggcagcccggaaggagcagaaagtttcagataagagctgcgaggattcagaagagcatgcaatagtagtaggtgtggtggaggaagaagaggtcagaaagccacaggaaggtcaaaacgtgacgaggagagccgcgccatataagacacatgaggatttgcagccggatcagaggacggcggaagagttgtccatggcaaagaaaaggacgagaaggtccacaagatccaaggtagcagcggcagcacagaaggggcagaaagctgattcttctgacacaaccgttggacctgaaattgatcctaaatatgatgaagttgttcccaaggtggaggaggccacaaaaccacaggaaggcaagaatgtcactaagagggctacagcttatatttacaaggcacacgaggaggtgcagacaggccaggtgacagcggcacccgaagctacggcagaagaagtggccacgacaaagagaaggaggaggaggtcaacaagatccaaggtgggggcggcagcacggaaggctcagaaagaatgtgcggctgatacttctgatgcagtcaacgggtctacagtaagtgatgatcctaaggaagagcaagtggttgaggtgatagaggaagggacaacaaagcacaatgaagaagaacgagagcaaattaacaacgttcggcagtttgcttccttgccaaaactggaggactcaccaatccttggcatcgtgtccaagcccaatacagcagatgcttcagacaaggcaccggttgcacatcaggaggctagcaaggaagatcgtttcactttcactggtgaggctgatgtgtccaatcttcttgtcaacacacttgacagatttgcaaagcctgtgtatgagtccagagtcaaagaggagaagaaatgcagtgagtgttggtggatgcttctataatttacaagaggtgtaggaccaggtccagtcagaactgccaaaagtatcaaattacatgagatcatgtaatgtgtgggtcaaaaactctagaatcaggattggagagatggtttaagacacgaatctaagcaaagaaaaggaaaaggaa

SEQ ID NO: 91081 - DNA, 1828 bp, Zea Mays
gcgtctctttctcttctaacgttcaaatattcaaacgaggagcggatggacagaggggacggaggctggatgaggcactagaccactagtgcactacggaaacgcgagagaagaggcagacggcggcggcggccatggatttccactccctctcccggcgagaacttcaggcgctctgcaagagcaacggcatccgtgccaacatgtccaacgcggccatggcggaagcgcttaggtgcctccccgcggtggacaggatcgacgagatcgggagcacggcgccaccgccggtatcggcgatgaaggaacagacgccggatgcggaagaggcggtcggaggggagcaggagcacgggtgcccgctccctcgcggcggccgtgcacgggggaagagaaggaaggccggggcacggaagagtaagacggagggggatgaggaggaggtgatggtgccgggcccacagaccttgccgggacccaagatgacggtggcacgggaggctgctgcggcacctgtggatgatgcggaagaggcggccgtaggaattaggacgagaaggtcagcgagatccaaggtgaaggtcgcgctggatcagaaagaggaggacgtacaagcggcggcagcccggaaggagcagaaagataagagctgcgaggattcagaagagcatgcaatagtagtaggtgtggtggaggaagaagaggtcagaaagccacaggaaggtcaaaacgtgacgaggagagccgcgccatataagacacatgaggatttgcagccggatcagaggacggcggaagagttgtccatggcaaagaaaaggacgagaaggtccacaagatccaaggtagcagcggcagcacagaaggggcagaaagctgattcttctgacacaaccgttggacctgaaattgatcctaaatatgatgaagttgttcccaaggtggaggaggccacaaaaccacaggaaggcaagaatgtcactaagagggctacagcttatatttacaaggcacacgaggaggtgcagacaggccaggtgacagcggcacccgaagctacggcagaagaagtggccacgacaaagagaaggaggaggaggtcaacaagatccaaggtgggggcggcagcacggaaggctcagaaagaatgtgcggctgatacttctgatgcagtcaacgggtctacagtaagtgatgatcctaaggaagagcaagtggttgaggtgatagaggaagggacaacaaagcacaatgaagaagaacgagagcaaattaacaacgttcggcagtttgcttccttgccaaaactggaggactcaccaatccttggcatcgtgtccaagcccaatacagcagatgcttcagacaaggcaccggttgcacatcaggaggctagcaaggaagatcgtttcactttcactggtgaggctgatgtgtccaatcttcttgtcaacacacttgacagatttgcaaagcctgtgtatgagtccagagtcaaagaggagaagaaatgcagtgagtgttggtggatgcttctataatttacaagaggtgtaggaccaggtccagtcagaactgccaaaagtatcaaattacatgagatcatgtaatgtgtgggtcaaaaactctagaatcaggattggagagatggtttaagacacgaatctaagcaaagaaaaggaaaaggaaagaatcctgagagtgtaaacagatggtttatactggagcatgaggcagacatgtaaggccactgtggacaccacctccggcatggtttacatgatattaattgacaccacctccggcatggtcttcgccatgaggtctg

SEQ ID NO: 91082 - DNA, 1883 bp, Zea Mays
gcgtctctttctcttctaacgttcaaatattcaaacgaggagcggatggacagaggggacggaggctggatgaggcactagaccactagtgcactacggaaacgcgagagaagaggcagacggcggcggcggccatggatttccactccctctcccggcgagaacttcaggcgctctgcaagagcaacggcatccgtgccaacatgtccaacgcggccatggcggaagcgcttaggtgcctccccgcggtggacaggatcgacgagatcgggagcacggcgccaccgccggtatcggcgatgaaggaacagacgccggatgcggaagaggcggtcggaggggagcaggagcacgggtgcccgctccctcgcggcggccgtgcacgggggaagagaaggaaggccggggcacggaagagtaagacggagggggatgaggaggaggtgatggtgccgggcccacagaccttgccgggacccaagatgacggtggcacgggaggctgctgcggcacctgtggatgatgcggaagaggcggccgtaggaattaggacgagaaggtcagcgagatccaaggtgaaggtcgcgctggatcagaaagaggaggacgtacaagcggcggcagcccggaaggagcagaaagataagagctgcgaggattcagaagagcatgcaatagtagtaggtgtggtggaggaagaagaggtcagaaagccacaggaaggtcaaaacgtgacgaggagagccgcgccatataagacacatgaggatttgcagccggatcagaggacggcggaagagttgtccatggcaaagaaaaggacgagaaggtccacaagatccaaggtagcagcggcagcacagaaggggcagaaagctgattcttctgacacaaccgttggacctgaaattgatcctaaatatgatgaagttgttcccaaggtggaggaggccacaaaaccacaggaaggcaagaatgtcactaagagggctacagcttatatttacaaggcacacgaggaggtgcagacaggccaggtgacagcggcacccgaagctacggcagaagaagtggccacgacaaagagaaggaggaggaggtcaacaagatccaaggtgggggcggcagcacggaaggctcagaaagaatgtgcggctgatacttctgatgcagtcaacgggtctacagtaagtgatgatcctaaggaagagcaagtggttgaggtgatagaggaagggacaacaaagcacaatgaagaacgagagcaaattaacaacgttcggcagtttgcttccttgccaaaactggaggactcaccaatccttggcatcgtgtccaagcccaatacagcagatgcttcagacaaggcaccggttgcacatcaggaggctagcaaggaagatcgtttcactttcactggtgaggctgatgtgtccaatcttcttgtcaacacacttgacagatttgcaaagcctgtgtatgagtccagagtcaaagaggagaagaaatgcagtgagtgttggtggatgcttctataatttacaagaggtgtaggaccaggtccagtcagaactgccaaaagtatcaaattacatgagatcatgtaatgtgtgggtcaaaaactctagaatcaggattggagagatggtttaagacacgaatctaagcaaagaaaaggaaaaggaaagaatcctgagagtgtaaacagatggtttatactggagcatgaggcagacatgtaaggccactgtggacaccacctccggcatggtttacatgatattaattgacaccacctccggcatggtcttcgccatgaggtctgacattgttttgaatgaagtggacagtttgtctagctaattaaaagtaaaattttcttg

SEQ ID NO: 91083 - DNA, 83 bp, Zea Mays
ctttccttaaaggagagaaatattttcgaaataataaaaacaaacaagataaaacttgagggttgtttgttgaattgcaatgt

SEQ ID NO: 91084 - DNA, 807 bp, Zea Mays
gtaggataagccgcttgtggccgcctcgccttccccatcacgaccaccacccaatcaccacgccagcttatatgccccacccggcgccactcgacgtctcacggagaaaaagaaagaggagctcggacaaggcagagcgccatcgttcggtttccttgctgaattcccgatcgctcgctcgctcgaaaagaaagaagctagcttttagcatggcgtctctggcgttcggcagcaccgtagcggcggccgtggcggcgacctcggggaggacgcggccggcgcgccggtccgtgctggtcgtgccgcccgctgccagcaggggcggcccggcgccggccaaggaggagaagggcctcggcgagaccatcttcggcttcatcttcaagaaggaccaactggtggagacggacccgctcctcaacaaggtcggcgccgcgccggccgccgcctcccgcgccaagacgaccgccggcaagaaggctgccggcggcgacgacagcggcagcggcggggggttcaacctcggcggcctcggcgggctcttcgccaagaaaagcagctgaacgtgccaagtgtggcgtggtttatggattgtcgaactcaaagctggatttggcttttgagggggaaatggttgcgcatatatatttgtggacgtgtggtggtgtgaccagtgatctttgatgtcataatgtgatatactctacttccagctgcacctgtgattttttttcaggacttcgttttgctctcaatccatatggattggatgagattgagttagtttaattttcaaacaagtaaaaa

SEQ ID NO: 91085 - DNA, 104 bp, Zea Mays
gctttctcaaaaagggatcatatgtctccgcttctcttcataattaaaaattctgaacaagaacactatcaattagtaaaacctccaagacaacagacaagtag

SEQ ID NO: 91086 - DNA, 1076 bp, Zea Mays
agcagcgacgacgaccgtcctccccgctgccttctcaccaatccctacaacaccgattagagttggggaaggcgaacctcctccttcttgggatccggtaccaactccaaaagagagactttcatatgtgcatgtgaagcggatcaagaatcagctttgatttggctaagaaatgagatggcttagtaggtttgggtaatcaatcggtgatgcttcccctttgagaactttcggtatgagtcgtttctcccttcttacgcattacgtcaaggcaccagtaagagcatggacgatcgtttgtttttttaccaatactacgtgcaggaatctacagtgcactgttgtgattggatattattgctttaggaacttatgcttttgctaccttctattttctatacttgtatgttgcccaattcatttgaagttcatgctttgtgcttttggggttaacctttcaataccctttgcccatgtccttggaaggcattagtgcatgacacccatatgagggtcaacaagctgacaagacatgattttttcttgagtcggttgcctgtgatttaactttgccatttggttaatagaatactttaacgtgctattgctagtaggtatctaaatctctctccctcctctcttgtcatatactcacatgctgctattttcttttcagattgaggagatgcatcgtgaactttgcagcttggtaatatgctttattccaccaatgtctacgcctcagcctccaggctctgtatttaggtcctttgtacaaagtttggtgctcaaagctagaggtggagatcataggatggttgtcaatgggactttcaacaacactgtgcttgtttcattgtacacagtaatcctgcatttgttgtctgctggtgcccttccatcatggtggagcctaagattcaaaaggaatgatgcctatcatagtacaggaatgataccagagttggataaaaaaaatttatcacaattttttttgttgtggtccgacatcgcctactaccgctgtcagtgtgtggctgaaaatttgctttctttcaactgaagtgacaggattc

SEQ ID NO: 91087 - DNA, 2291 bp, Zea Mays
gtgggccgcgggccgggcagcacggttttcttggcccgacccttgatcaaatcaggtctagcgaaatccaaaagcccgttcgaccccaaacaccgactgaccgacacgactccccccttcgtcttccaatccgccgctgttcgagtagtcggcggcgcggcgccggcggccggggcggcggcgatgaatcccctcacgcaggtgaagcggacgcagattatcaaccagaaggaggcgctcctgggcatcggcgaggacgcgtcgtggcacgccaagtttaaggactcggcctacgtctacgtcggcggcgtccccttcgacctcaccgagggcgacctcctcgccatctttgcgcagtatggtgaggttgtcgacgtgaacctcgtgcgcgacaagggcaccggaaaatccaaggggttcgcgttcctcgcgtacgaggaccagagaagcacgattcttgctgttgacaatttgaatggagctaaagttcttgggaggatcataaaggttgaccatgtgagcaagtacaagaagaaggaagaggaagatgaggaggagctgcagaagaagagggaggcccgtggagtctgctatgctttccagaaaggcgagtgcaaccgcggagcttcctgcagatattcacatgatgagcagagaaatgcaaacaccggttggggttctaaagaggatagtggtgcacgatgggagcatgacaaacacagtgatgtaccgaagagtcgaggcatgtgctatgctttccagaagggagagtgcaaccgtggagcatcctgcaaatttttgcatgacgagcagagaaatgcaaacagtcgtcgggactctagggatggtggaccatcgagatcagagcggtatggagaccgagaatctaggagtaggcatgatgatagaagagcagaagatcgggacagattcaggcgtgacaactcacctgagagatcacgaggtgagaggcagagggacgatgacagatccgacagaggaagagaagcaaaatcagaaagacgcagatatgatgtggaacatgaggatcgcaagcggtcaaggcacggcagagagtgatgccatgaaagaagtgtttacaaagaacacaaatggtgcaagaggccgtgggggattgacgtttgtactcttaaattgcaacacaaccagtgctgttaaattttgatatttgaatgtagttgccttcggctgctgctcgtgctgctgctttattcagataagtttctttatatgcctccatttgattacatctggtgttctttttcgctcttcagatcggtgtcatttttagttatcatcactgaaaccgtctgactggattgtgttggtgccaattgcgtggtttttgccgaggaagttgtttactggttaatcttcagctaggatggtgggcgcgcctccgcaaggaccacaatgcctgttctggctacgcgctgatgaacaatgaaaatggtatctagagcttaatatgtttgctagtacttggtttgtatgctcaagtcatgtgagaaggctgactaaagtaagcaggttccaccagtctaagccggttttagatgctgtattttgcagaaccactgttacctgcaacagcatcagcagcagcatgtgcaacccaaaaggagccgtattccccagtagaaattttgtactggacagaggtactgcaaagcatcatgtgaagcttatgttgtgtgagctctgaagctatccggatagctctgaaccgaaattttctaagataggatagctctatccggatgttttcagttctcgcaaaggctctgaagcttatgttgtgtgagctgttatttgcaggcacggttccaaaaggttcggccctaaaaattgctctgcaatgtcagtggtccagcgtagatgatgatgatcgcttctaacatagtctataaaaaatgcatactggagatttggtactagataacaagaggaccttgagtaccgagttttttccggtgaaagattgatgggcgatgccacagcctgaagacgaagaggatgtaaagaaaaaaactcgccaattaagggcttgttcggttattcctatcccatatggattggatgagattggaaaaaattgtgaaagattttgacttgtttgggattgaaacccatccaatcccacccaatccacatggattgagagcaaaacgaacaagccctaagaattgatgatgttgtagtacaaattccaggccttcggttgattttctaagagttagtttggttaattttctaagagttagtttgac

SEQ ID NO: 91088 - DNA, 823 bp, Zea Mays
tatagagtagttgcccacatattctgatggttgcaaattatgctttcagagaaatgcaaacagtcgtcgggactctagggatggtggaccatcgagatcagagcggtatggagaccgagaatctaggagtaggcatgatgatagaagagcagaagatcgggacagattcaggcgtgacaactcacctgagagatcacgaggtgagaggcagagggacgatgacagatccgacagaggaagagaagcaaaatcagaaagacgcagatatgatgtggaacatgaggatcgcaagcggtcaaggcacggcagagagtgatgccatgaaagaagtgtttacaaagaacacaaatggtgcaagaggccgtgggggattgacgtttgtactcttaaattgcaacacaaccagtgctgttaaattttgatatttgaatgtagttgccttcggctgctgctcgtgctgctgctttattcagataagtttctttatatgcctccatttgattacatctggtgttctttttcgctcttcagatcggtgtcatttttagttatcatcactgaaaccgtctgactggattgtgttggtgccaattgcgtggtttttgccgaggaagttgtttactggttaatcttcagctaggatggtgggcgcgcctccgcaaggaccacaatgcctgttctggctacgcgctgatgaacaatgaaaatgaaccactgttacctgcaacagcatcagcagcagcatgtgcaacccaaaaggagccgtattccccagtagaaattttgtactggacagaggcacggttccaaaaggttcggccct

SEQ ID NO: 91089 - DNA, 3246 bp, Zea Mays
atggcatcagaagctcgttgcacatttgcatcaagctacaacattgacaataagggacatcaggcagaacggatgggttcggggtcttcaaagtcagagtttgaggactttcatgccaatgcggttgaagaggctgtgaaaaacctagctccttatttggaggacacaagggtgcgaaaccaggccatttactttgatggatgggatggacttggtgcatctgctgtccttaactcgatcgctgaacgccctccgccatctctgaggaacaaatttgatgatattattctacacattgactgttcaaggtggaaaagccggagagcactgcagaggacaattgcacagaaactagggcttcctcaacatgtcatggctgtttttgatagacaagacgaagaggacgatctagttggagtacatgaaggctcaagaactgagataagagacatcgggagagagatatatcgagtcctacaaagacagagcttcttagtggtcttccataacgggagtgataccatggttgacttcaatgactttggcatccctcgagctgctgcagatccttggtcaaacattatccggaaggtattgtggaccttccgtggaaggcttcatgccatcaaagaaacggaggaagtttcaggtcatctcaaacctgataaacgacaaccaaagggaactgagaccgtggacacttcatatctttgctttcgttcgttattttctggaggcccatcagatgtatcttcgtacaggcttcaaatactgtgtgaggaagctgcagcaatagctcaatacacgaataatcctatagtcactcaggaaatagctgaaatatgctgcaggtatttgttatcattgaattccaaggggaatggcaagctagatttcaactggagtgctcatgcctccaactattgggtttgtgatgggattctaaacgaatgccaaccagagcaagcatgggagattgccgcttctctgcacaaagagttacgactggagggctactcatctgctcgtaagttctgtcatcctggtgctgacacaacatcctgggttgtaaccatcaaatctagtgaagatattgtaccaactgtgaagccagagacaacgtctttctttttggcagtcaaaagaaaacatggccattcggttttgccattacccatgaaaatgttccaaagatccgagcaacttcatgttttgaagctctaccactgcagcttcagctttgcttcacctccattcctttgttgcctaaacctaagatttcttggacttgatagctgcacggatcatcaatcaatgaaaccgaaagaaaacaaagaagaggagtcggaggaggcaggggcagagggggaggaggagaatacagcaacaatcgaattctttcaaagcctatgggtgcttgacatatgttgcactgattgggaattgactttatccccaaatacaatagtgaaaatggcaacaaacattagggagataaacataaagaggggaagaatctggcacagcagtatttcatggagatttcttggtaacattcacaagcttcgagtgattgagcctacaagtccttgggagacaagtaataaggatgaatttatggacatggtgaagctggagcttcttgacctgtcagggaataccacaatacaatttttgccaagcttgtcaggtgcaatcagcctcagaacccttattctagatggttgtattgaattgcaacatgttgtgcctgaaacactccctccatggcttgaaacatttagctttgatggaggatataaacaagctaaaatctcatgtatctccttggctggttgtgcaagactggtcaacttcagattgtgtgggtcagtacagaaccttgaggagctggacctctcaaacacatcaatcaaaacacttgacctcagtgataaagtggtgcaggtcccatgcctagagcgcatcatcttgctgggatgtgagcggcttcgtgctgtcctgtggccaaaggatggaatgcccaatctaatggtgctaggcattgacactcggggaggcgcagaagcagctagtgcaaaaacagtacatgataactttgccatcagtaaagaacgagaagaaggttgtcgtgcatttgttgctgttatggaaatgaggttccttcagtcgttggtgctagcaagttccaataaactttgctgggacactgaccgtaagtatgatcttaacatctgcttgtcttcctctaggagtagcagcaaaggtgttggacaacacagctacaaggaggagacgatgggccctctgcagaagtcgatgatcacctccaagacttacctgacctacagcgatgtgaatattgacaaggcaggtagtgtgaggcagtttcagccactgcaccgtcatgtagagattggtgagggaataagcaactctagcatggtaaccgttcgtgaaatcagcgctgcgatccttttgataaatagggtctactcattgctcgtgcatgacaattcatccatcaggactgttatccctgaaaacataatgtctatagacacgaagaaggtctattggtcttgtctcaggtggtgctgtgtcgagagatgccccagtttggacagtgtcttcgccactaactacgatgccgtctgctttaatgctctagagaccttctgggcagctgatctcttggtggcccgatgtatctggagtaaaggaagaacaactaatgtgaaggacaccgaatccttcgctaaactgcaggctatacatctccactcctgtcctaggctggcatttgtcctcccactatcgtggttctacaccctgtccagccttgagacccttcacatcgtctattgtgataaccttggtcaggttttccccgtagaggcagagttcttaaacgaaatatctactggccatccaggaggtttgttggaattcccaaagctgaagcacatctggctacaggagctacccaagctgcagcagatatgtgaagccaagatgtttgctccggagctcaggaccatcaccttaagaggatgctggagccttaagcgcctccccgctaccgccgaccgcccaggtgatcgccctgtcgtggactgcgagaagaatttgtgggcgaagctggagtgggacgggaaggaggctggccaccacccttgtctcttcgagccacgccactccaagtaccacaagaagagagttcttagaaccacgcttctccgatga

SEQ ID NO: 91090 - DNA, 1091 bp, Zea Mays
gcttctctcgcattcggcctccccttcccaccctcaacagcgaagagcacacatggataccgccgtcttctcccccgccgatctcttccacggagtcgacgacagcgacgacgaccgagatgagatgcaaatctgctccgatggggagaagccggtggcgttggagtatcaggagagagtccacgacttccctgacatggttgagccattacgcagtgaaagctgctgacttgtgaccacaaggtcctgtgtctgagttgtggaagcctcttgcaaatgcagggaaaggccgtgtactatagacctaatagaaactgagtgtaagggagttctcatgtcatgagcttaacgccaacctgttgtggccggggacattttcatttgctacttggctggttaagaaccggtcaattttggatggacgacgagtcctggaattaggaagtgggacaggagcgcttgcgatctttcttaggaaggcatttgaggtgaacattacaacctctgattatgatgacggcgaaattgaaaagaatatatcttacaattgcagagcgaatgccttagatgtgttacctcatattagacacacgtggggagatccatttccagtttgcacaccaaattgggacattgtcattgcaagtgatatcctactctatgtcaaacagtatgacaacttggtcaagacagtgtcctttcttttgaatgagtacaagcagaaggatcacaaatctggctgcataaccatcactgacaaatcagggacacaaatatctgcaaaaccaccggtgtttctaatgagctggcgcagaagaatcggcaagggtcatcaatcactcttcttcgacgggtgtgagaagacgggcctgcaagtgcagcacctgggtgatcttgtgtaccttattagcaataaacaagaggcggattttgtggaaacgaagtcagacggtggcagtagtgaggggatgattttttgagtaggttttgttaagtcatattttgttcaatttcccccaaacacttgattttttgtttctctgattctatttgggatattctgtttgattctgttgcaagattgtttatgc

SEQ ID NO: 91091 - DNA, 876 bp, Zea Mays
gcttctctcgcattcggcctccccttcccaccctcaacagcgaagagcacacatggataccgccgtcttctcccccgccgatctcttccacggagtcgacgacagcgacgacgaccgagatgagatgcaaatctgctccgatggggagaagccggtggcgttggagtatcaggagagagtccacgacttccctgacatgtgggacaggagcgcttgcgatctttcttaggaaggcatttgaggtgaacattacaacctctgattatgatgacggcgaaattgaaaagaatatatcttacaattgcagagcgaatgccttagatgtgttacctcatattagacacacgtggggagatccatttccagtttgcacaccaaattgggacattgtcattgcaagtgatatcctactctatgtcaaacagtatgacaacttggtcaagacagtgtcctttcttttgaatgagtacaagcagaaggatcacaaatctggctgcataaccatcactgacaaatcagggacacaaatatctgcaaaaccaccggtgtttctaatgagctggcgcagaagaatcggcaagggtcatcaatcactcttcttcgacgggtgtgagaagacgggcctgcaagtgcagcacctgggtgatcttgtgtaccttattagcaataaacaagaggcggattttgtggaaacgaagtcagacggtggcagtagtgaggggatgattttttgagtaggttttgttaagtcatattttgttcaatttcccccaaacacttgattttttgtttctctgattctatttgggatattctgtttgattctgttgcaagattgtttatgcactgaggtggtttataatggcttaagcatgc

SEQ ID NO: 91092 - DNA, 1052 bp, Zea Mays
gcttctctcgcattcggcctccccttcccaccctcaacagcgaagagcacacatggataccgccgtcttctcccccgccgatctcttccacggagtcgacgacagcgacgacgaccgagatgagatgcaaatctgctccgatggggagaagccggtggcgttggagtatcaggagagagtccacgacttccctgacatgaaactgagtgtaagggagttctcatgtcatgagcttaacgccaacctgttgtggccggggacattttcatttgctacttggctggttaagaaccggtcaattttggatggacgacgagtcctggaattaggaagtgggacaggagcgcttgcgatctttcttaggaaggcatttgaggtgaacattacaacctctgattatgatgacggcgaaattgaaaagaatatatcttacaattgcagagcgaatgccttagatgtgttacctcatattagacacacgtggggagatccatttccagtttgcacaccaaattgggacattgtcattgcaagtgatatcctactctatgtcaaacagtatgacaacttggtcaagacagtgtcctttcttttgaatgagtacaagcagaaggatcacaaatctggctgcataaccatcactgacaaatcagggacacaaatatctgcaaaaccaccggtgtttctaatgagctggcgcagaagaatcggcaagggtcatcaatcactcttcttcgacgggtgtgagaagacgggcctgcaagtgcagcacctgggtgatcttgtgtaccttattagcaataaacaagaggcggattttgtggaaacgaagtcagacggtggcagtagtgaggggatgattttttgagtaggttttgttaagtcatattttgttcaatttcccccaaacacttgattttttgtttctctgattctatttgggatattctgtttgattctgttgcaagattgtttatgcactgaggtggtttataatggcttaagcatgcagcccagcgaggtgatctatgcaggcttaagcgtgctgctct

SEQ ID NO: 91093 - DNA, 1737 bp, Zea Mays
cgtgcaggacgggatttcttggcgggccagagagagatccgaagcaggagcagagaagatgccatcacgccgtacaaatacgaggggagacacaataaaaataaaataaaacaaaaaccgggcggcagccggcagggctacgcaggcgccgaggggaagacgacgcggactcacaaggcgaatatcccccgtccgggacccacccgacagcgacccaacacccccaatcatcatcccctccgcctctcctccactggagacgacgagtgccctcgtctccctctcccctcgccgtcgtcgtcctccctcctctcctccgctcccaccgaggaggggaccctctataagaaggcaggagcgacgaatccgatcgtctgtcgtgtgggagagccgcggccccatcctccgtgtgatgaagttcgggaaggatttccggaaccacctggaggagacgctgccggcgtggagggacaagtacctcgcctacaaggccctcaagaagctcatcaagaacctggtgccacgcgagcccgcagcggcccctcctctccctcctcctgcccccgccgccgccgacgccgaggggccgggggctcctgccgccgcgcacgggaacgtcaacctggccaactggttcgccagcatcctcgacgcggagctgcacaagctcaacgagttctacatcgagagggaggagtggtacgtcatccgcctccaggtgctcaaggagaggattgagcgcgtcaaagctaagaagaatgacgcttttacatccaggagtgaatttaccgaagaaatgttagagatacgtaaggattttgtgatcatacatggtgaaatgattcttctgcaaacctacagctccctaaattttgctggactagtgaagatactgaagaagtatgacaagagaacaggtggcgtgcttagcctgcctttcactcagcgtgttcgtcaccagccatttttcacaaccgaacctttaacaaggcttgtccgagaatgcgaggctaacctcgaactacttttcccggtcgaagcagaggttcttgagcctagttcatcctcgaatctagaaccgcacgatgtggctaggtgtgacccgacatcgtcccgcgatgtggaaaccgtcgatgtttaccgaagcacactcgcagctatgaaggcgatacagggccttcggagagccagctctacttacaaccccctgtctctgtctaggttcttccacggcgaggatggcgaaccctgctcgggtgccatcacttctgagagctcactgtcagattcctcaacggactcccagattcaggatgctgggaaggatgataaggaggtgcaatcaaattcgagggaccagaatgctgcccaaggggaacagaatgcacaaggcgagccgactgatgaataaacagtttttttcccacacgctgttcaataagacaataaccattgataagtgtaaatgctaataatcttgctggttaaccctcttttgaagtgacacatatgcaatgactccctggtggcgcagtttcatttttcttctttttccttaattaatgggtaaagagtatatgggatgttggatttatcatgttcctatcgtgttgacagcatgccagttgccagaagtttgacacttgataagagctatgatcgtaatcagcatgttggatctattatgtttttgttgtgttgacactacagggaccaccatgtcagtacttcataagc

SEQ ID NO: 91094 - DNA, 1718 bp, Zea Mays
cgtgcaggacgggatttcttggcgggccagagagagatccgaagcaggagcagagaagatgccatcacgccgtacaaatacgaggggagacacaataaaaataaaataaaacaaaaaccgggcggcagccggcagggctacgcaggcgccgaggggaagacgacgcggactcacaaggcgaatatcccccgtccgggacccacccgacagcgacccaacacccccaatcatcatcccctccgcctctcctccactggagacgacgagtgccctcgtctccctctcccctcgccgtcgtcgtcctccctcctctcctccgctcccaccgaggaggggaccctctataagaaggcaggagcgacgaatccgatcgtctgtcgtgtgggagagccgcggccccatcctccgtgtgatgaagttcgggaaggatttccggaaccacctggaggagacgctgccggcgtggagggacaagtacctcgcctacaaggccctcaagaagctcatcaagaacctggtgccacgcgagcccgcagcggcccctcctctccctcctcctgcccccgccgccgccgacgccgaggggccgggggctcctgccgccgcgcacgggaacgtcaacctggccaactggttcgccagcatcctcgacgcggagctgcacaagctcaacgagttctacatcgagagggaggagtggtgctcaaggagaggattgagcgcgtcaaagctaagaagaatgacgcttttacatccaggagtgaatttaccgaagaaatgttagagatacgtaaggattttgtgatcatacatggtgaaatgattcttctgcaaacctacagctccctaaattttgctggactagtgaagatactgaagaagtatgacaagagaacaggtggcgtgcttagcctgcctttcactcagcgtgttcgtcaccagccatttttcacaaccgaacctttaacaaggcttgtccgagaatgcgaggctaacctcgaactacttttcccggtcgaagcagaggttcttgagcctagttcatcctcgaatctagaaccgcacgatgtggctaggtgtgacccgacatcgtcccgcgatgtggaaaccgtcgatgtttaccgaagcacactcgcagctatgaaggcgatacagggccttcggagagccagctctacttacaaccccctgtctctgtctaggttcttccacggcgaggatggcgaaccctgctcgggtgccatcacttctgagagctcactgtcagattcctcaacggactcccagattcaggatgctgggaaggatgataaggaggtgcaatcaaattcgagggaccagaatgctgcccaaggggaacagaatgcacaaggcgagccgactgatgaataaacagtttttttcccacacgctgttcaataagacaataaccattgataagtgtaaatgctaataatcttgctggttaaccctcttttgaagtgacacatatgcaatgactccctggtggcgcagtttcatttttcttctttttccttaattaatgggtaaagagtatatgggatgttggatttatcatgttcctatcgtgttgacagcatgccagttgccagaagtttgacacttgataagagctatgatcgtaatcagcatgttggatctattatgtttttgttgtgttgacactacagggaccaccatgtcagtacttcataagc

SEQ ID NO: 91095 - DNA, 2782 bp, Zea Mays
gttccatttcttatcccctcccctccggtcctccccctccccccgatggcgtccctcacgctcccagcactcgctctcgccctctctaaccccggcgccgtccgcctacgcgccgcggccttccgctgctgggcgctccggcggcgcggctgggcggcggcgggcgccctggcctcgcccaactccgtgcttagcgagcatgccttcaagcggctccagctcgggagcgacgacgaggacggggaagggccgtacgggagcgacgccgacgaggggttcgaggcgggggagggggacaacgaggagctcgccattgccaggctcggcctgcccgacgagctcgtcgccacgctcgagaagcgcgggattacgcacctgttccccatccagagggctgtgttgattcccgctctcgagggccgtgacctgattgctagagcaaagactggaactggaaagacactggcctttggcatacccatgatcaagcaattaatcgagcaagacgatggtcggattacaaggagaggtcgtactcctcgggttctggttctagcacctaccagagagttagccaaacaagtcgagaaggaaataaaggaatcagcacccaagctcggcacagtgtgtgtttatggcggcgtctcatataatgtccagcagaatgcactctctcgtggtgtcgatgttgttgttggaacacctggccgcataatcgatttgataaatggcggaagcctccagttgggagaagttcagtatttggtcctggatgaggctgaccaaatgctcgcagtggggtttgaggaagatgtggaaacaatattacaacagcttcctgcaggcaggcaaagcatgttgttctctgcgacgatgcctagctgggtgaagaaactgtccagacggtacttgaacaaccctttgacgattgacttggttggtgatcaagatgaaaagcttgctgaaggaatcaaactctatgctatcccactcacaacaacatcaaagcgtaccgttcttagtgatctaatcacggtttatgcaaagggtgggaaaaccatagttttcactcgtacaaagaaagatgcagatgaggtatcattggcactgacaaacagtattgcttctgaggcacttcatggtgatatttcacagcatcagcgtgagaggacactaaatggattccgtcaagggaaatttactgttctagtagcaacagatgttgctgcccgtggtcttgatataccaaatgttgatctgattatccattatgaattgccaaatgatccagaaacttttgtccatcgttctggacgcactggacgtgctgggaaagcaggaactgcaatcttgatgtttaccagcagccagaaaaggacagttaagtcacttgagcgtgatgttggttgcaactttgagtttataagccctccgtccatagaagaagtgctggagtcatctgctgagcatgtcattgctacattgcgaggtgtgcacccagaatcaactaaatactttcttggggctgctgagaaattaacagaagaattgggacctcatgctcttgcttctgcactggcacatctgagtggattttctcagccaccttcgtcacgttctctcatcagtcatgagcagggatgggtgacgttgcaactaactagagaacagggatttggcagaggcttcttttctcctagatctgttactggttttctatctgatgtttgttcagctgctgcagatgaagttggcaaaatatacctaacagcagatgagaacgtccaaggagcagtcttcgatttacctgaggaaattgcaaaggacctgcttactatggagctccccccaggaaacacattaaccaaaatttccaagctgcctgcgttgcaagacgatggccctgctactgatagctacggtcgcttttcaaacgaccgaggttccaggaacaacaggcgttctaggggtggcggcgcttcaagaggccggggtggttgggacactgacggcgaggaccgattccgccgtggtggtaggagcttgaggtctgacaatgacagttggtcagatgatgactggtcaggcggtgggagaaaatcaaaccgttcctcatcattcggtagccgctcatcatcctacagcagccgtggctcaccatccttcggtggccgctcatcatccttcggcggtagggagagcaacagaagcttcagcggtgcttgtttcaactgcggcgaatccggccaccgcgcaacggactgcccaaacaagtagtaagatggaagagatggcgcggtctccccttgccgcacggggtcgatgatcctgattggccggagcatcaatcaggatgcacgcagagcgaaatcccaaagcccactccacctgctgatcggtgtactacgcccgacacccagccgacgttattactggctacagttttgcgtggtcgtctggcgtcggaaaacagaggaaggttttggcatcctgactacagttactacatcaagcggagttccttcagcttattcatgtcacacggacactactctacactacagggatatgttagtatttctttttttatatgtattttttttgtggtgctcttgatttgaggatctcggtataactgtaaccacacgcactggttacggttgcttctgcttcacaatcgctggcgacggttggattctttgaatgttatagatctgtatgctgtcttgcttcggacgtgaacttccatccctagattagcccccctttcgcttcttttggc

SEQ ID NO: 91096 - DNA, 797 bp, Zea Mays
cacgtccacaactcccatcccacgtcgcagagccgttcctgtctgcgcctcctccctagacacgcgacgcagagcatatatatagcagcaggggcaggggcaaggacgaagggacgaaagagccgtcgccgccgccgcgccgccatgtccgtccgcgtggcgtccgtgccgtacctggagcagatggcgcggtgggagcggcaggtggagcggcggcagctgttcctccgcagctaccacttctcgcgcgacgccgacgcggcggcggcgctccccccgcgcgcccgcgccaggcgcgtcgtctgggcggggatgcgccgcctgcgccgcgcagccgccacgggcctccgccgcctccgcgcgcgcctccgcctctgcttcggctgggccgcccgccgccgctcttcctcccgctacggccgcctctccggcgccggcaggccccgcgccgccgccgccgccggtgccgccgagtctgcatgcttctggtaggactgcactgcacaaggtttcgaagcgttctttgcttcgtctcccttggttggcgtgcgtgcgtgcgtgtgtgtgaaagtgagaaggtgagcttactttagacatggattagccggtgcgtgtgttgtttgtttgtttgtttgataacttggactgctgctccgtggagtggagttgagtgcctaattaaattagaatgaatgaatcgtctagtagtaattttggttttttgctcgaacaaagtgtctgtctgtaaggctttctccagcaggattcgtaaaggggctcgcatcctcaatttacgt

SEQ ID NO: 91097 - DNA, 838 bp, Zea Mays
acgccaagggccgcagcggcaggccacgcatctctctcccttccttctccccgttctccgtgcaatctcggccgtttccgctcccgccatcgccatggaggaggccaaggttgtggagtccaaggacgggacgatctcagttgcttcagcatttgctggtcatcaggaagctgtgcaagacagggaccacaaatttttatcaaaggcagtggaggaagcataccgaggagttgactgcggcgatggaggaccatttggtgcagttgttgtccataatgatgaagtaatagttagctgccataacatggttttgaagaacactgatccaactgcgcatgctgaagtaactgcgataagagaggcttgcaaaaagcttgggaaaattgagctgtcggattgtgaaatttatgcatcttgtgagccatgcccaatgtgttttggtgctgttcatctatcccggattaagaggctggtgtatggagccaaggcagaagctgcaattgccattggatttgatgatttcattgctgatgctctcagaggaactgggtactatcagaaggccaacatggagataaagcaggcagatggaaatggagccatgattgctgaacaagtatttgagaagactaaagcgaagttccaaatgtattgaaccgtggaattacttggtgggatgatttaacattgtgatagccctctgattctcaaaaaagaataacacaacctctggtattatgtaatttgtgacgggccacaaattgtcattgtgcttccatttatgaaaacaagattgatgtcactccttgttcttcaatgagcagttgattcttaactt

SEQ ID NO: 91098 - DNA, 753 bp, Zea Mays
ttggttactccttccatgctttggtgttagtaccacattcagcatgtaaatagtcaaatgttacattcatcttttacagatgtggaatgactcattccatctaaacattcaatttgcaaggttcaaatttagttccagtaagttaagatgattatctgcagctgaagtcagttaaaacgaaccaatcaacaactggcaaaatttatttatatttctgtgaggagttaaaagttaaaactgatggttggtctttaatatttcattaactttgtttttatttttttttcattagcagtagattgtatggaactagatgctttcaaggtcactgaacctaaaaaaagtatcgtgtttgttccgcctaacttttggcattatagttctgaaatatttttcattcagtgttcgctgcattctacattagttttcctttcattgttaaggcaagagaatactcatctcttataaccaatgtatcttttgtaaactaggcttgcaaaaagcttgggaaaattgagctgtcggattgtgaaatttatgcatcttgtgagccatgcccaatgtgttttggtgctgttcatctatcccggattaaggttgatttcttaacttacatattcttcatatgatagaatatatggagcatgttactgatagcaatcttgttcaatgctgtactgcagaggctggtgtatggagccaaggcagaagctgcaattgccattggatttgatgatttcattgctgatgctc

SEQ ID NO: 91099 - DNA, 1738 bp, Zea Mays
tgacattgacgagcatgccggcgccgccgaagtcgcagctcgccgccgacgggttgcgctggaagtagctgttgaaggcgtaggaggcgtgggcctgcagcgtgttggggttgtagcaggcgcccatgggctggatggccgagcagtcggccccgccgacgccgcacgcgtagtcgatcccgtcctggagggcggtgtccatgagccccgacttggcgacgcaccacgccgcctgccctgccacggtcggcgcgcccggctgcaccgtgccgggcatcgccgtcgccggaggctggtacaccgctggcggcgttgttgccggcatgccgccctgctgcgggtacggatacgtggtcaccgggttggtgacaggcgacgagccagggaactgcgtcggcgtcgtcgccgggttcgtcaccgccgtccccggcatggtgttcggcgcggcgaccggattcgtgaaggcgggtggcacggtcacgggcgtcgtcgtcgggtcaggcatgggcatggtgcccggcgtcgtcggctccgggtacaacggcggcaggttcgggttggtcgcgatcccgttgcccgggttggtcgatggcacggtgacgaagcccgggggcatcgggttggtggccggcacggtgactgggttgctcacgggagtcgtcgccgggttgctgaccggagagaactcgtcgcgcgccgtggctcttgcctcgccgagctcccgccgaggggagggcacgtcgaccaggacacccaagagcctcttctcccggccgctactcattgccaccgcgcttggagccacacggctcttgacgtggggcacgacgccggccccttcgatctccgcaaccacggcgagctcgccgtttgcctctggctcatgccgtttggcaccagcaatagcctcgttgacaaatgagccggcggcggcgataggctccgacgatctgcatggcttgtctctgcacacaaacggcttctggaagacgtaataggcacgccgcttgtcggtgaccgtgactctgtactcggtgacggctgagctggacagcgccttgacctgtgctgaatcgtatgatagctccacagatactcctggaatggaagaaaacaccatttctatttcaggaaggcagatcagatacatttcatcaagcatatgcgccagctgcatcaattgaacagcattttgctgatcagtgaaggtgtggacagattgtttgaaggaggatgcaggagaagaggaatctgagagtaagagggcaggcagatgccattgaagaagggagagagatctttgcagtggaggcaaggatgcggctgagctgagcagagcaggctctacctctagcgaggggggagtgagctggagatggccaagcaaacggcagtggggaaggaaggggtgggagacaggagcttttgcaatttaagtacaaagtgggaaagcacgagcattatgcgcggcaaagtggatgactatcgtattagattagaaatgcgatgcatgctccttttttttttctctctctctctcgcaccttagaacaggggagacagcaaggagcgcagtgcagctggtaaagctgctttctttgacgactggactgttacatatgagctcttccgtcaccttgtgctcaacgattggttgcttccctgagtttaatattactgtaatgtagagccccttttatgcatggccaagtagggttttttttgctgcgaaacaaga

SEQ ID NO: 91100 - DNA, 3573 bp, Zea Mays
ccgccaattcgctcggttcggcgccgcgctgattcgcttcggtactctctttctgcttccccccctggaatgtttccggtgattcgcgcggcatgagctcgggttggaggtggtgcctctgattcccgctggcccgaggcggaggcgcgagggcatgtgggtttctctggtgtggatccggggctgcgtgggcgtcacgttcgtcgatttccagagcgggaggggagccgactagatctctcggctcctgcggttgctgcgctccgtcgggagagttacctgtgaccggagaaggttgccggagggttttgggaggtgaggggacatggaggccgccaggttcggcgcgcggagcagccacttgtacggcagcgggctgggcgagcttgatctcaacaggcgcgagagcagggtgtttggctgggatctcaacgagtggagctgggacagtcagcggtttactgccacgccggtgcctgttgaggcggcgaatggctctggactgaacagctcgccgtcatcgtccgaggaagccggggaagagatggctaagaatggtggcttgggaggtgatactgacaagaggaaaagggccgtggtcattgacgacgacgacgatgatgaaacggaggatcaggacacggtcgtgaatggtggcgggtcgctcagcctgataatagggggtagtgctgctggtgctggagcgatggagaacggcgatgtaaatgaggatgagagaaatggaaagaagatcagggtgcaaggaggcggctcaagtgggccggcatgccaggttgagggctgcggagcagatctgactgcagcgaaggattatcaccgccggcacaaggtctgcgagatgcatgctaaggccaccaccgccgtggtcggaaacactgtccagaggttctgccagcaatgcagtagatttcaccttcttcaagaatttgatgaagggaagcgaagttgccgtcgacgcttagcaggccacaataaacggaggagaaaaacccgccctgatactgcaagttgtgggactgcttcaattgaggacaaaatcagcaattatctactgttgagccttattggaatctgtgctaatttgaactctgataatgttcagcattcaaatggccaggagttgctatccactcttttgaagaacctagggtctgttgccaaatcactggagccaaaagaactatgtaaactcctggaggcataccaaagcctgcaaaatggatcaaatgctggaacctctggaacagctaatgccacagaagaggctgcagggccatctaactctaagttgcctttcgtgaatggtagtcattgtggacatgcatcatcatctgttgtgccagtacagtcgaaggctaccatagtggtaactccagagcccgcatcatgcaagcttaaggattttgatctgaatgacacttgcaatgatatggaaggctttgaggatggacaagaaggttcacctacacctgcctttaagacagctgactctcctaattgtgcatcatggatgcaacaagattctactcaaagtccaccgcagactagtggcaactcagattcaacatcaacacaatcattgtcaagctcaaatggagacgctcagtgccgaactgataagattgtcttcaagctttttgacaaagttcccagtgatttacccccagttttgcggtcacagattcttggttggttgtcaagtagccctactgatatagagagccatattagacctgggtgtattattctaacaatatatctacggttagttgagtctgcatggcaagagctttctgagaatatgagcctgcacctggataagcttttgagtagctccactgacaacttttgggcatctggcttggtatttgtgatggttcggcgtcgcttagcttttatgctcaatggtcaaattatgttggacagacccctggcacccagttctcatcattactgcaagattttatgtgtcaaacctgttgctgcaccttattctgcaacaataaatttcagagtcgaaggatctaatctactcagtacttcctcaaggctaatttgttcatttgaaggacgttgtatattccaggaagacacagactctgtagcagaaaatgatgagtatgaggatagggccatcgaatgcctcagtttttgttgttccgttcctggtccaagaggaagaggatttatagaggttgaagatagtggttttagcaatggcttcttccccttcataattgctgagaaagacatatgctttgaggtttctgagctggagagcatatttgagtcctccagtatcgaacatgcagatgctaatgataatgccagggaacaagctctggagtttctaaatgagctgggttggcttcttcacagagcgaacagaatgtctaaagagaatgtaactgatacatctgtagctacctttagcatgtggagattcaggaatcttggtgtatttgccatggagcgggagtggtgtgctgtgatcaaaatgctgttagatttcttatttattggccttgtcgatgtgggatcccgatctccagaagaggtggtgctttcagaaaatttgttgcatgctgctgtacggaggaagtctgttaacatggttagatttctgctgagatacagaccaaacaaaaactccaaggggactgcacagacatacttatttagacctgatgctctgggcccgtcaatgattacccccctccatatagcagctgccactagtgatgcagaggatgtgttggatgtgctgaccgatgatcctggactgattggaattagtgcttggagcaatgcacgggacggaacaggttttaccccagaagattatgctcggcagagaggcaatgatgcttacctgaatctggtccaaaagaagattgataagcatcttggcaaaggccgtgttgtcctcggtgttccgagcagtatatgctctgtaataactgatggtgttaagcctggcgatgttagcctcgagatctgcatgccaatgtctgcatcagtgccaggttgcctcctctgcagccgtaaggcacgggtgtatccgaattctacatcgaggaccttcctttacaggccagcgatgttgactgtgatgggagttgctgtggtctgtgtctgcgtgggcatactcctccatacctttcccagggtttatgccgcgcccacattcagatgggagttgctggagcgtggacccatgtaagttttaggatgagccttagctgttgtttgtaacttgtaagttgagagttttagcgttgtggctaagatcaaaggaacatgattaccgtgtgaagaagttcatctgtgtttaacgcaagatgctgttgcggctgtaagctttatatacatcgtcgatttcaactatatttacagcctatcatgctcccattccattcatccattttgttttagaattcattccttgcggagaatttgtgaaccatcagaataaaaaacaggttcttgtatttataatcgttgagacataatatttcttggaatgatgctgaaaaactcatgattgcattt

SEQ ID NO: 91101 - DNA, 579 bp, Zea Mays
tacccttattctcagtatgcggatgatacccttattctcctgcgtgccaacattgcagacatcacagctctaaaatcagttcttgatgctttctcagaggctacagggctaaagatcaacttccataaaagtactgcagtgcccataaacgtggacaacacccaactctcagacatgcttaatattcttggatgcaaacttgaaggtttcccacagacttatctaggcctacctctgtccagcacgaaactacacctatcagcattcacaccccagattgcaaaaactgacaaatatctagcaggttggcaagcctccctcctaacgcccatgggaagagctgtcctggtcaactctgttttggacagccacctcatttatatcatgtctgcaatctctcttccattgggagttgtcgcacaaattgatcgtaggcgacgttcctttctgtggactggggaggacaaagcctctggagcgtgctgcctggttgcatgggaaaaagtttgcaccccaaaggtagtggggggacttggaatcaaagacctcagactgcacaacagatgcctccttgtcaag

SEQ ID NO: 91102 - DNA, 246 bp, Zea Mays
atgcccaaacctgtcctcgctctgttcctctccttctccttctccttctccttctccttcctcctcgcgctatctgcttcttctgatcctaggcacgtcattgtcctgaagacgccggcgtcgatcaattgcctggaaacagcccacagcaaatttataagcctacagcagcaacaccatcacaacccagacattgcgcatcttagacggaatgcagcagcgcctacagcgatacaggtgggttag

SEQ ID NO: 91103 - DNA, 1458 bp, Zea Mays
atgttcgacggggaccccgcggccgagccgttcgggcgcctgggccccgcggacgtgtgctccagggagcaccaggacctggcgctcgacgcgccgcgccagggcgtcgtgctcctcaagaaccggagcggtgggtggctacacccatactttgcagctacacccatactttgcagttacttaattcggagcggtgggcggccgctccctgccccgctccatctcgccagagaaggcaaagatctagctgccaagttctggcagctctctctgtgtgaatcaaacgatacgtacaggaggctttggatgcatgtctatctacgcagctggtcattgatatctcctgatgaagttaaactaagccaattttctttctcaatcttattaggggaaactcaaccacaggtgtcaagtgggttgaagctttgggaaggttcattagacttggtgaaggccctgaattctgatatcaaagaatataaattgcgtgtagaaggcaaacacgtattagagcttggatgtggacatggactccgtggcatttttgcaggtctcaaggcaggcaagagcgctccacattcattaaggcatacattcgtagatggaagcataagtgaactatttgagtattgtgatttagtgcttgctcgttcgtggagtatagtgaactacatcataagctgtagcattcatcgatccagatccaaacgtccttcggactcttccttctgcatttgtgtggagtggggattcatccggccttcttctcttgcagatgaaaagcgtcatgagaaaggcaaagctgagtttaagaaggttgtagaatcactgggacatgtaatactcgggtggcgtctggttccgactgacaactcagacttgggtgaatctgcactcgagactgagccagtcattgagcaggttttcgttaccaagagctcaagatcagaggctgagtttgagcaacaggtattatcaagaaaacaaaaagaaaagaaacagatggctactttgagggcggcggtgggcatgctgctcggcggcgaggacatgcacaggttcccggtgcgctccccgcggatggaccgcggcgacctcatctgcagtcccgccgcgcggcagatcgtgtccaactacttcagcatgttcgggccggtgcaggacgtgcgcatcccgtaccagcagaagcacatgttcggcttcgtcaccttcgtgtacgccgagacggtgaaggtcatcccaagcaagggcaacccgcacttcgtgtgctacgcgcgcgtgctcgtcaagccctacaaggagaagggcaagatccccggcaggttcaggaagctgcagcacgcgcaccatggcggagccgagttcggcgattgcgcgtcgcccaccagattgctggatttcagggacccctacgccctcctgcttctttcaggtgcccaggttttctcctgggcatga

SEQ ID NO: 91104 - DNA, 1366 bp, Zea Mays
attttcttaaaaaaaatctcaatcgcaacaacacaaaaaagacccgcaatatcgattagcgagagtcgttcctccaccaaaccaaccaattcgcttctccgtcaacttcacttcctcgtcgacgcctccgtcccaccaaccatgccggcggccatggcggctgcggcggcgcagaggctcctcgcggcgagcacgaaaatcatcggcgttgggcgcaactacatagcccacgccaaggagctcggcaatccggtccccaaggagcccgtcctgttcctgaagccgacctcgtcgtttctccacgctggtgtggccaccgccgccgtcgagatcccggagccgctcgagtcgctacaccacgaggtcgagctcgccgtcgtcatctcccggcgtgggcgcgacgttcccgaggcgtccgccatggactttgttggaggttatgcacttgctttggacatgacagcaagggaccttcagtctgttgctaagtctgcaggccttccatggactttggctaaaggacaagacaccttcaccccaattagtgcagtagttccaaaatcagctgtcactaatcccgatgatctcgagctctggctgaaggtagatgatgaactaaggcagaaaggaccgacaagcgacatgctattcaagattccttttctgataagctatatcagttccatcatgacattaatggagggtgatgtgatactaacaggtactcctgagggtgtgggtcctgtccgagtaggtcagaagattacagctggtataactgacctaattgatgttgagttcgatgttcagaggcgcaatcggtcattttccacatgatgcaataagcaagaaagtaatggtgaatacaaagtgcagtactcgtcctcgaccttgaatcgcattactggacctggagccattgcagatagctcttgagccttaccttgatttaatttacctgggttttgagagactatctatgaatatgctaactcgttcgtaaagtatctttttgtcccaattttgattgatggagctttaagcttgcttttctgtatgcaataaaaaaacttatcacatttttctttctttctttctttccagcagcgacttgaaacagcttccgagtggggtgcacggccgatctatgtaacgtacgcgcataagaaatggtgtcctacaaaatgccttccacttgcttgaaacgatatgtagatggacagcgacgacgaacaccttaactccctctcgctagatatcgagccagcttagttcggttcgactgagcttgagctgactcgttaaggtaaagagatgacttggttcgttaaacaattgagtcagagaattagcttggctcgtttgc

SEQ ID NO: 91105 - DNA, 661 bp, Zea Mays
cagcacaacgcaacgtgggtcccttgaatagatcgtcagtacttcataccattcataatatatagatctgcagcactacaaacaactacaatagctcccagaccatttgagttatgtacagaagccatcaggtctctcacagctttgaaactctcagtggcggcagaccacaagcttcgaacttcttgatgtagtcatggatgtgctcactgatttcctgcgctctttcctgctggatgaagtgcccagcgcccttgatgaccaccacctcctcaagcatgggcacgtccctcttgaacccgcccttgtggatgtacctcttcactccagggtgatggtacgccaggtcaccgtccccaacgatgaacttggttggaacttgcacctttgctcctgtccatggcgccatcagttcccagttcctgtccaagcagcgatagtaatttactccaccagcaaatccagtttttgagtacacacttgcaaggtaactgacatcttcctcagatagccaagaaggtagcaccatttgcttactgtaagtttgcatttttcgaaggtccatagctgaagaacctgttgcccgaagagtcaatgccaatgtgaagaaactcttcaagtcaaacgtagcaaattctgcttcgagtcctggttcctgcca

SEQ ID NO: 91106 - DNA, 110 bp, Zea Mays
accccccccccccaccaggttgtacgtgttgcaaccactgctcaggtgaagatgaagtcgtggaggaggacttccaggagttccaagagtacgatgagttctaggcgtgg

SEQ ID NO: 91107 - DNA, 1013 bp, Zea Mays
ggggttgcaagtgttgccgcgctgctcgtgcacggccggcaccccccgccgatcgaggatcgtcgttgttctagtctagctactaaccagtcaggcgggcgggcggccgatcgatctagcaacaatggtgggcgctggcgcggcgacggacgcggccagggcgctggcggcacgggaggtgtgcgctgcgtcggcggcgttcgcgtcctgcacgcaccgccgccgccgccggtcgtccccgcgcggcccgcacttcgtcgactggtacctcgtcctctccatcggcgaggccgcgtcggaggacgccgtgcggaggcggtaccggcagctcgcgctgcagctgcacccggacaagaacaggcaccccaaggcggaggtcgcgttcaagatcgtctccgaggcgcacgcgtgcctgacggaccaggcgaggcggcgggccttcgacctggagcggcggggcagcttctgcgccgcgtgccacgaccgctacgccgccaggtggtcccagccggcgtccggccaccaggcgccggcgccggcggcgtccaggagcaaggcggcgcgggagacgatccagagccggctgcgggacgagtgccgggtcatcgacggctgcctgcgggccaacgacgccgcggcctgcgcgcgccgccgccagtcgttcccgctcttcgatccctctgacggccgtcgcttcccagactacccgcacgtccgcccgccgccgtttgagctccggcactccgaggactggcttggccgcgcagcagtggatcggcaagccctgaaccggaggtggtgcaggggcggcggcgagtcgccagtgtaccagatcaggacggtggcgacagagtgcaccgataggcgtgcatggtgaactcggcacgccatcagcaatcagcatatgagcagcagagctctctctctctagtttttcagctcgaaaaggaaaggatgtaccgaacaatctttagatcagaaattctccttaggatacagaacaagcaagaaaa

SEQ ID NO: 91108 - DNA, 1279 bp, Zea Mays
atttccgttttccctccacggccgcgcccctctttccctcctccatttttgagatcaaaccctcggacagcgcccctttttcttctctccccaccccctctcacccccaacccaccccactccactccacccgcgcacaacagatcgcacgcctcggttccctccactcgacgcttctcccgctcctaacccctagtaccttcgctcgctctgccgcccccgccgacgacgcgccagatccgcgcagcagtggtgtcctccgcggcggatcgagctcccgatccgcgcagtgggagtggcggcgagcgcaggagcgctcggccgggggttccgcgaggctggagacggaggaggaagggagcggtagttccgcggtggtagatccgccggtcctgtcgccggagatggactcatccgtcgagaagcaggggagcgtggcgctggatccggacgagcgcgcgccggcgtccggcgaaaccaaggcctgcaccgagtgccacaccaccaagaccccgctctggcgcggggggccctgcggacccatgtcgctgtgcaacgcgtgcgggatccggtaccggaagaagagacgggaggccatgggcctcgagtccagcagcaaggccgccaccgccggcggcagcgagcaccagcagcagcagcggaagaagaaggccaccgcggcggcggccgccgcctcctccaagcgggagcgggagcgtgagcgggagcggaacaaggaggcggacgaggtcaccgtggagctccgcgcggtggggttcggcaaggaggtggtgctgaagcagcggcggcggatgcggcggaggcgccgcctgggcgaggaggagcgcgcggccatcctgctcatggcgctctcctccggcgtcgtgtacgcctgacttggctagcaaccgcgccggcccccgagacgccgcgcccaaaggcggcgaaaggagaggagggcccgattcgctggacgtgcggcatgatctgagccccagacagatccgtccgtctggatctatgctaagttttcccggctaagtagtagctcgtcggttcgaacaaggcgagttaataatccgtgtccgcgctaggctagcagctctgttcctctctccccctcccgttgcttgctgtgttcttgccaccgcctcctctagttgtaatcctgccgctagtagtgtgctagtagtagctgtcctgctgtaaccttctcttgcaatgtaaggagagattatatggttggtcattcttgcaatcctaacgctagtcctgtgct

SEQ ID NO: 91109 - DNA, 1198 bp, Zea Mays
tttttcttctctccccaccccctctcacccccaacccaccccactccactccacccgcgcacaacagatcgcacgcctcggttccctccactcgacgcttctcccgctcctaacccctagtaccttcgctcgctctgccgcccccgccgacgacgcgccagatccgcgcagcagtggtgtcctccgcggcggatcgagctcccgatccgcgcagtgggagtggcggcgagcgcaggagcgctcggccgggggttccgcgaggctggagacggaggaggaagggagcggtagttccgcggtggtagatccgccggtcctgtcgccggagatggactcatccgtcgagaaggggagcgtggcgctggatccggacgagcgcgcgccggcgtccggcgaaaccaaggcctgcaccgagtgccacaccaccaagaccccgctctggcgcggggggccctgcggacccatgtcgctgtgcaacgcgtgcgggatccggtaccggaagaagagacgggaggccatgggcctcgagtccagcagcaaggccgccaccgccggcggcagcgagcaccagcagcagcagcggaagaagaaggccaccgcggcggcggccgccgcctcctccaagcgggagcgggagcgtgagcgggagcggaacaaggaggcggacgaggtcaccgtggagctccgcgcggtggggttcggcaaggaggtggtgctgaagcagcggcggcggatgcggcggaggcgccgcctgggcgaggaggagcgcgcggccatcctgctcatggcgctctcctccggcgtcgtgtacgcctgacttggctagcaaccgcgccggcccccgagacgccgcgcccaaaggcggcgaaaggagaggagggcccgattcgctggacgtgcggcatgatctgagccccagacagatccgtccgtctggatctatgctaagttttcccggctaagtagtagctcgtcggttcgaacaaggcgagttaataatccgtgtccgcgctaggctagcagctctgttcctctctccccctcccgttgcttgctgtgttcttgccaccgcctcctctagttgtaatcctgccgctagtagtgtgctagtagtagctgtcctgctgtaaccttctcttgcaatgtaaggagagattatatggttggtcattcttgcaatcctaacgctagtcctgtg

SEQ ID NO: 91110 - DNA, 603 bp, Zea Mays
gagcgtccgtccgtcaccttccgctctgcagcccgcaaggcatctctcgcaagaggatcgacatggccgccgcctctgccgctgctctccgcggcctcgtggtcgtcctcgccgtcctctccgtctccacgtggggcgcggtggccacgatcaacgtcaaggatacgtgctccttcacggcgcacccgaacctgtgcgagaaggccatgaccaagctgatggggcagaacggcgtgcccacgtcggcgccggcggctccggagacgtcggcctgagatcgattagctcatgcatgctgcatgcattcgccttcgcgatatctagtgtgctgtaacattattggtgtgccctgccgtgtttgatcgtccacctgagagtgagatgatggaggatcgattgcaagtttcgttgtcgtgagagtttcactagtagaaaaaatcgattttcactggcggtcctcagttacccgcctgtaaaaatgatgatttctactggccctaccactggcggttacgaaaaacgccactataaataggtttacaaccgccactatagaacttctctgtactagaatttcatttatttttgattaatcaagatctc

SEQ ID NO: 91111 - DNA, 1934 bp, Zea Mays
ggtgtgacgcgcccaccgcgctctggctccagcccctgcgtctctcctcctcgcctcctcctcgtccgcacgaccacgcacgctcgcgcagtcgcttcgccgctttcagatccaaacccagcgtgttaaaaaagcgctcaaagcgaccaaaaccctaaccctaatcaccgcaattcctcaatccccggcaccgcgcaaaaccctagcccagccccaccgccacatacccgcccctctcgccgctgccgacatggcaggcccatccggcgccgcggcctcctcctccacttctcgtggcgtgccggagaaccggttctacaaccctcctcacgtacgtcgacagcagcagcaggagcaacagcggttgcggtccgcgtccccgtccccgtcaccgtcgccgtcgccgcggtcggcacggcagaagcccccgccgccgccgggggccctggcctcggcggcggatgtggacagtcgggtggattctgacgactcctcgtcgacgacctcgtccaagccgtcggtggcgtccacggcggcggggaatttggagaggtttctcacctccacgacgccttccgtgaccgcgcagtacttgcccaagacaagcctaaggatgcggcggggtggtgattctatggattcacggccttatttcgttctgggagatctttgggaatctttcagggaatggagtgcttacggggctggtgttccactggtgttaaatgacagtgactctgttattcagtattatgtgccatatctttctgctatccaactatttgcggacccatctagaccagcttcaagaaacagttaattttctcgcttacttaaggcgtcctggggatgaaagtgatggggaatctatggatactagcagtgagagcagcattgagaatgatgttgagcggctaagagtctcatcattactagaaggtacacatcgattggaaaatggtggcgtacgaagtgatgatggtaaaggtgatgcatcttcaagctttccaatatttgagtatatggagagggatcctccatatggtagagagcctctgacagacaaggcatcaactcttgcacatagatttccagctctgaagacgttcaaaagctgtgatctgctgccatcgagctggatgtctgttgcatggtaccccatatatagaattccaacagggccaacactgaaggatctcgatgcctgttttttgacattccattgcctagcaacgccttgcaaggattgtgaccctcctacgccagcatgccctggctttggggggatcaaccgctgcacagctgcatctgggaagctatctttgcctacctttgggctggcaccgtacaaattccgtgcctccatttggatacctgacggaacccaagaacaggaccgcgtcacctcactgatgcaggaggctgacagctggctccgcagaatacgagtagaccatccggacttccggttcttcgtctcccgttccagtacgatgtggagatgactcgcggctgtaaatggtttttcttttttagtatgattaccgcctcgccgtacaaactgaacccccttctggtgcaccaagtgccctctcgtaacgggggttgtatgaattataagcctgcatttttaacttttttcttttcttccgtgcctccaataagttgtaactgttgtaggtttgttttgtgggaaagtaaagatggatggtggaaaaaggcagatgtagaactggaatgaaagaggcaaaaataggacaaaattgaaaggtaactattagagttgagaagtctcagtgtgttcattcatgtattgtattggatgtcgctcaccggagtccagaggtgccatggacgaacatgctgagcctatgttacccccaagtacaacgtttatttgttttcataatataggatgctgatgtatctttctc

SEQ ID NO: 91112 - DNA, 1945 bp, Zea Mays
ggtgtgacgcgcccaccgcgctctggctccagcccctgcgtctctcctcctcgcctcctcctcgtccgcacgaccacgcacgctcgcgcagtcgcttcgccgctttcagatccaaacccagcgtgttaaaaaagcgctcaaagcgaccaaaaccctaaccctaatcaccgcaattcctcaatccccggcaccgcgcaaaaccctagcccagccccaccgccacatacccgcccctctcgccgctgccgacatggcaggcccatccggcgccgcggcctcctcctccacttctcgtggcgtgccggagaaccggttctacaaccctcctcacgtacgtcgacagcagcagcaggagcaacagcggttgcggtccgcgtccccgtccccgtcaccgtcgccgtcgccgcggtcggcacggcagaagcccccgccgccgccgggggccctggcctcggcggcggatgtggacagtcgggtggattctgacgactcctcgtcgacgacctcgtccaagccgtcggtggcgtccacggcggcggggaatttggagaggtttctcacctccacgacgccttccgtgaccgcgcagtacttgcccaagacaagcctaaggatgcggcggggtggtgattctatggattcacggccttatttcgttctgggagatctttgggaatctttcagggaatggagtgcttacggggctggtgttccactggtgttaaatgacagtgactctgttattcagtattatgtgccatatctttctgctatccaactatttgcggacccatctagaccagcttcaagaaacaggcgtcctggggatgaaagtgatggggaatctatggatactagcagtgagagcagcattgagaatgatgttgagcggctaagagtctcatcattactagaaggtacacatcgattggaaaatggtggcgtacgaagtgatgatggtaaaggtgatgcatcttcaagctttccaatatttgagtatatggagagggatcctccatatggtagagagcctctgacagacaaggcatcaactcttgcacatagatttccagctctgaagacgttcaaaagctgtgatctgctgccatcgagctggatgtctgttgcatggtaccccatatatagaattccaacagggccaacactgaaggatctcgatgcctgttttttgacattccattgcctagcaacgccttgcaaggattgtgaccctcctacgccagcatgccctggctttggggggatcaaccgctgcacagctgcatctgggaagctatctttgcctacctttgggctggcaccgtacaaattccgtgcctccatttggatacctgacggaacccaagaacaggaccgcgtcacctcactgatgcaggaggctgacagctggctccgcagaatacgagtagaccatccggacttccggttcttcgtctcccgttccagtacgatgtggagatgactcgcggctgtaaatggtttttcttttttagtatgattaccgcctcgccgtacaaactgaacccccttctggtgcaccaagtgccctctcgtaacgggggttgtatgaattataagcctgcatttttaacttttttcttttcttccgtgcctccaataagttgtaactgttgtaggtttgttttgtgggaaagtaaagatggatggtggaaaaaggcagatgtagaactggaatgaaagaggcaaaaataggacaaaattgaaaggtaactattagagttgagaagtctcagtgtgttcattcatgtattgtattggatgtcgctcaccggagtccagaggtgccatggacgaacatgctgagcctatgttacccccaagtacaacgtttatttgttttcataatataggatgctgatgtatctttctcatgttatagtgcacaagtccgtcagtcacctgt

SEQ ID NO: 91113 - DNA, 777 bp, Zea Mays
ccaatgccatgccaagcaccagcgacgaaagcagccttttcacgtctcgccgctagatatacgtgcgggcgccacggggcctcccacgtccgtccagagcctgcaagagcgcgatgaggggcctgcaggaggagttccggggcggtgcgcagccggcggcgtcgcacgacgggggcggcagcgaggggcgcgcggcgtcgtggtggtcgtcgggcgaccccgaggcgaagcggcggcggagggtggccgggtacaaggcctacgccgtggaggccagggtcaaggcgtcgctccgcaagggcttccgctggatcaaggaccgctgcaccggcctcgtgcgccgctactgaatctgaccacccgcccatcgacctgcagctgctgcgtcgtcgtgttgttacgatcgtccttttttttttgaaaatttattgaaggcccgtgcttcttcttctcttcttcttttccttctccactgttttcctcgcatgctacatgacagtctctctctctcgttaactctgttggtgttcttattatttgatccggatgcaagtaatactatacaaacaggaatcgggaatgcacgctcccaatttttgacgcctccatgcatgtagtggtggagttccgtaaaattaacgtccgagatgtactattctatcttttgattttttttttcgtgttttatttaaaaataaacaacggatgataaatatttaataacagagagtaacatttaaaacaatccagttaaactatgacaagtagggaaagtgg

SEQ ID NO: 91114 - DNA, 1337 bp, Zea Mays
tcccctccaatccggcaccctcctctctcctcaccccacctcacgcaggcggcattaatggattccgcagccgcggccacctccctccgccccgcgtcctcccggccgcggcgagagccctgacgtgacgcgcttccccccgcacggatcctcctccctccacgccgtcgtttgctcggggtgttcgttgggggagaaggaaaaggtcgctaacctgtgagcttccacggcgactcggcgcggcggcccaatgcggctcgatccggactgctcaacgcagtgattcgcctcgggttgggcgccggctccgtgagcccccacgccgttgaccccacgctgccgctgctccagcgccgccgtctccgcctcggaaaggttggatctttatgccgttctgtgccatctgtgtgggagacttgtggattcttggagtggtttgtgctgggggctacctgcattctggttgaattcgtagaagcggacgcctcttcagaatactccgacacggcctcatcaatcacagtggccacagcagaaatcgctcgatcagaaagtagcagctcgtggcatatggatagcagacaggaggtggagtttataagagagatactgaacgccagctctcccgcccgccgcatctcctatctggagcggttcggcaacggcaactcttcgggtattttggatccacatctactggaggagttaaatggcggcactaggctgctggccggtgaagagggcaaaggtcacagactgaggcggaggctgctcttcgactgcgtcaatgaatcgctgagcgtgaaatacgcgcactacttcagcgccggctacagcttatggttcacggggatggcggttctgcagagcctgtcggcggcagaaatgcatcgggagatgacgagcctgacggtcgccgaggagtggatggtggacgagctcgtgtacagggagatgagtggtcctatggggagctgggtcgatttcaggactgaagcgtaccaggccggcggagacgtggcggcggagctgctgggttccttggtcgatgaagcggttgctgaacttctgacttccggcggctcgtcgtcgtctttgtagctgatgttggattggattggattgggtccccgcgctaacgataccagttgacagccgcaaggtttttgctccatgtattgttccttgtttgtatcctgtatatcggtaggtcgctcgagaaattcgtgtagcgtagcattcctaagatgaaatgtcactaacttacaattgttcgatggttgatcggtttcctgccgagagtggaaagaagaaacattcttgacctgttcactgtt

SEQ ID NO: 91115 - DNA, 3054 bp, Zea Mays
ggcggcattaatggattccgcagccgcggccacctccctccgccccgcgtcctcccggccgcggcgagagccctgacgtgacgcgcttccccccgcacggatcctcctccctccacgccgtcgtttgctcggggtgttcgttgggggaggttgcggtgaggagaaatggatgtagagaaacctgcttccaaggcgcatggtttctttgcgctcttcgattggggaaagaagtctaagaagcgcctgttcgtcgggagcaccagcagtgatccaaatctgaaggatgctgcagatgggaaggatattgatgatagtacaccaacaacaagtacacggtcaaattctatccttgaagatgccccaagtttgaaggaaagcagtgagcacagctgctcatcttcagtaattgatgaagaagctcagtcaagaagaagtccgactgttgtggctaggcttatgggtttggattctatgcccgcggcaagctcacccgaatccaatcccgttccattaactgtgcaaccccctttccaacccaacagccacgaggatttgatcggcagaagttatgttggtagtccccttaagatgccgggtagtcctattgatcggtttaaaatggaagcactgcctccaagacttgccaagaggacactatctgtcgcacagtataagttgctgtctcccatgaaaaaccctaaccatatatccagcaggaatgcagctgatataatggaagcagcatcaaggatcatcagacctggagtagaaaatatcagttcttacagagttcacgatgttgggaacacaaatgctgcacgtgcctacaacccaggagagctcataggagtccaacaaaggtcacagaagcttaatgaagcactgaggaaacgtgatggctctgcgtcttttaggccgccaagtggaaaaccttcagatggaaggttgagaggttcggagggcacctcgtcttccaggatctcacaggcaaatggatgtgctccagttgctccaaaggtcaaacccggcaatagattagatactgctcgagctatgcatgcccaggaaaaaggggggatgagaaaatttggtaaaaagcttgaaacccacaagaaccctgaaaatagcaatgctgaaagaagtgggctgaacagacaaaaggatagtaaccaactgggcacaagttcgtctagtgtgcttgtgccaaacagcagaaaacagaatgctacagtcaccaaacataaagtgcactcaaacccagcaacccccagtaggcaacggagcaatattcaccaaataaatgcccatccaagaaaagcgagggctgccaacacatttgctggaagcagtagtcaaggtagcagaaaggtggacttgcagccagatgctcgtgcaaatgtaagaaataattctgtatccaaagcaatcccgaagccaagaagattacaagacagaagagtgtactctgatacaagccagtcaagtgatagtattaattctgacaggagccagaggcggattcggcacaatattgtgattgatgagcagtcatctttttcaacaaacaaaaagaaagtcagcactgagattgtttcattcacatttacctcgccagttcataagtcactacatggcacccacttccccaatcattcagtggaaaaacaaatattagggaatcagaacactgtgtcaacttcaagcaatacatcaaacactaaacttgatgtcatagatggaaaatttttgggactcctgttggagcagaaattgagagagttgacatctggtgtgagatcaccctacactaaaccagccgaaggtgctcaagtgtaccacacttcaacagctttggaagatatggcatcagcatgtgaaacatctagcattgcttctactgattatgatagggagtcattacagtctttcagtgatggaaaagctactctgccctatacaaatcttgctactagaagtgtccagtcatctcagcctgtgaagtacgatcatggcgtcacggaccgatcagagctcgagcatcttggccaaagcccccttttcacatgggaggtttctatttcaactgaaacctgcagctcatcagagagctggaggaggcctgcaaatggaggaacaagactgttcagttcgaccgaaggagcgacaacttctgattcgacgcgcttcaacaaactcctagaagcggacgcctcttcagaatactccgacacggcctcatcaatcacagtggccacagcagaaatcgctcgatcagaaagtagcagctcgtggcatatggatagcagacaggaggtggagtttataagagagatactgaacgccagctctcccgcccgccgcatctcctatctggagcggttcggcaacggcaactcttcgggtattttggatccacatctactggaggagttaaatggcggcactaggctgctggccggtgaagagggcaaaggtcacagactgaggcggaggctgctcttcgactgcgtcaatgaatcgctgagcgtgaaatacgcgcactacttcagcgccggctacagcttatggttcacggggatggcggttctgcagagcctgtcggcggcagaaatgcatcgggagatgacgagcctgacggtcgccgaggagtggatggtggacgagctcgtgtacagggagatgagtggtcctatggggagctgggtcgatttcaggactgaagcgtaccaggccggcggagacgtggcggcggagctgctgggttccttggtcgatgaagcggttgctgaacttctgacttccggcggctcgtcgtcgtctttgtagctgatgttggattggattggattgggtccccgcgctaacgataccagttgacagccgcaaggtttttgctccatgtattgttccttgtttgtatcctgtatatcggtaggtcgctcgagaaattcgtgtagcgtagcattcctaagatgaaatgtcactaacttacaattgttcgatggttgatcggtttcctgccgagagtggaaagaagaaacattcttgacctgt

SEQ ID NO: 91116 - DNA, 3574 bp, Zea Mays
atggcgctgctggtgcgcgcgcggctctcctcgctggacgacgacgaagacgactgggcctcggcatcctcgctctcctcggccgcctcctccccgccgctctcgcccgccgccgcctcccctccgccgcgtgcagcggtgctcgccgccccgcgggtcgcggcgcagctctcgtccacggaggaggacgtcagcgagcccttcgacggtacctccagctccggcgacgacgccgacctggacgaggaagtgtccaacggcttcttcttcagcgtcgccagggtaccgccgcccgaggaccttagcacggtccccggcggcgaggcggcgagggctgtttctggggcggagcccgagggaggggacggctggggcactgcggaggagccgctggaggacagcttggtgagcgccgagagcgtcttcgaagcgctcgatgccggcgtcattgcggatggcgacggtacgggcgccgagggttctctgggtggtagcttcctcatttccgggagcttcattggcacgcagaacggcaaggaggctgctgcgtcaggtgatttcgtgctcgtttcagatggtgctgtgctgaaggatgatgacaagcagggggaggaggttggcaatgacgctgcgtctgagcctttaatgatgcatgttgccggtgtcgatgacctgggcaccgtggatgttttggaggggatgcttgatcgtgaggttgctgaattgcttcctattcccagtgctacagaaggagatggtgctggtgctgaaattcacagcagtgagtccgatgcagaagctagtacaaccaatgttgatgctagtcctgattatgctgccacacgagatgtcacatctgatgtcgcgcgagttcatggtaaagttgatgacccagactccattgcagacgatggtcatgataaggtagatgaggaagctgatggtgaccatgaagcttctgatgaccttaaattcatgccgatctcttcaagtgaggatgctgtggaacttgcaaaagaattggaggacaacatgcctacttccaaaggcatgcactttggtgtggatgactcagatgatgtggagatctatggtgatgatgaatttgtagaggggatggatggaaaggagatcgagctttttgattatgcagctttaatcaagcttctaagggctgcaagcagctcacctgaacaaggcaaggctaaggttttcccagttgaatcttccgaacccaggcgtctgcctcctactgtagcaagcaatactaggacgagtgtggcttctgctcctgtgccagaagtaactgctgaccttgagaaagagatgacagatgaggaaaataagatatacagaaaggtggacatggcacgaatcaagtacatgcgtcttgttcatagattggggtatgatattaaccatcaggtaccagtacaagtgttgtatcggcttagtcttgttgaaggttttaagcgcggaaggatgacaaaccattcctcagagaccgagaatgcctggaagagggctttgcagcatgaggcagaggcaattgatgaccttgaattctcctgcaatgttttggtccttgggaagactggagtggggaagagtgcaacaataaattccatcttcggggaagataaatgcaaaacaaatgcttttctaccggcaacatcatctgtgaaggagattactggagttgttgatggtgttaagtttcgtgtcattgacacccctgggcttgggacttcgtccaaggatgaaaaatcaaataggaaagttctcaatgctgtcaagaagtatatgacgagatgccctccagatattattctgtatgttgataggcttgatacccagcgagaggaggcaaatagcctattcctcttgcgaagcattaccagtgtgctaggcctgtcaatatggcccagaacaattattactctcagtcactcaggaggtgcccccccagaaggccctaatggttcggaggtgaactatgatattcttgtgactcatcgaactcgtgcaattcagcaaagcatccggcagataactaatgatcctcaaattgagaatccagtggctcttgtggagaatcatcatctgtgtcggaggaatgcagaaggtgaaaaggtccttcctgatggccttatttggaggcggttcctcctcctcctatgctactcactgaagttgattgctgagatcgataacctctcaacccgtcgtgcttcttctacaggttttttaggtcactttttccaagtgcctccaattccttacttcttatcgtctttgttgcaatatagagagcaccctaggcattccaatgaactgaatgttgggagcctggactcagattttgacctagatgaattgttgaatggggaccaagaggatgaagaagatgactatgatcaacttcctcccttcaagccactaagcaaatcccaggttgcaaagctctccaaggagcaacaaaagttgtattttgatgaatatgattaccgaactaagcttcttcagaagaagcacttgaaggaacagcttggaagatttaaggaaatgaagaagaaagagtttgatgataatgatgtaccttctgatgatcatcccgatgatggatatgatacagatagatatcctatgccagaatggaccttgccatcttcatttgattctgatgatcctgtgtaccgctatcggtgccttgtgtctacaccaaacctcatggtgcgtgctgttaacaatcctgatggatgggatcatgattgtggatttgacggtgtgagtgtccaacacaaccataatgttgctaacaaatatccagcttctctgtgggttcaagttaacaaggacaagaggcagttcaccattcatttggattcctcaatgtcagttaagcatggtgactatgcctcgagcctggctggctttgacatccaaacaatgatgaatcagcttgcttacaccctcagaggtgagaccaaattcaaaggcttcaagaaaaacatcactactggtggtttatccatgacttttttgggaaataacatggtagctggagcaaagcttgaagacaagcttttaattggtaacaggctaacactgtcaggcaacactggtgctgtatccatgagaagtgatgctgcatatggagtgaatgtggaggcaactcttcatgaaaaaacctatcctgtaggtcaaggccttgccactttgggtgcatccttagtgaaatggcgaaaagagtggaccatgactgcaaatttagattcccatgtatctatcggaaggtcttcaaacatggcagttcatgttgatgtaaacaacaaactaactggacgggtcagcatcaaggccagcacttcagaacagttgaacattgcccttttaggtacctgttcagtgataatgtatttgtgggacaagatacaccctggtgcagattctaatgatgactagcactggttagtatggcaattttgaactcttaacattttgtatattttcctggttccttctgtttttgtacttgttggttataacaactactgttgaagtttgttagtca

SEQ ID NO: 91117 - DNA, 3759 bp, Zea Mays
atggcgctgctggtgcgcgcgcggctctcctcgctggacgacgacgaagacgactgggcctcggcatcctcgctctcctcggccgcctcctccccgccgctctcgcccgccgccgcctcccctccgccgcgtgcagcggtgctcgccgccccgcgggtcgcggcgcagctctcgtccacggaggaggacgtcagcgagcccttcgacggtacctccagctccggcgacgacgccgacctggacgaggaagtgtccaacggcttcttcttcagcgtcgccagggtaccgccgcccgaggaccttagcacggtccccggcggcgaggcggcgagggctgtttctggggcggagcccgagggaggggacggctggggcactgcggaggagccgctggaggacagcttggtgagcgccgagagcgtcttcgaagcgctcgatgccggcgtcattgcggatggcgacggtacgggcgccgagggttctctgggtggtagcttcctcatttccgggagcttcattggcacgcagaacggcaaggaggctgctgcgtcaggtgatttcgtgctcgtttcagatggtgctgtgctgaaggatgatgacaagcagggggaggaggttggcaatgacgctgcgtctgagcctttaatgatgcatgttgccggtgtcgatgacctgggcaccgtggatgttttggaggggatgcttgatcgtgaggttgctgaattgcttcctattcccagtgctacagaaggagatggtgctggtgctgaaattcacagcagtgagtccgatgcagaagctagtacaaccaatgttgatgctagtcctgattatgctgccacacgagatgtcacatctgatgtcgcgcgagttcatggtaaagttgatgacccagactccattgcagacgatggtcatgataaggtagatgaggaagctgatggtgaccatgaagcttctgatgaccttaaattcatgccgatctcttcaagtgaggatgctgtggaacttgcaaaagaattggaggacaacatgcctacttccaaaggcatgcactttggtgtggatgactcagatgatgtggagatctatggtgatgatgaatttgtagaggggatggatggaaaggagatcgagctttttgattatgcagctttaatcaagcttctaagggctgcaagcagctcacctgaacaaggcaaggctaaggttttcccagttgaatcttccgaacccaggcgtctgcctcctactgtagcaagcaatactaggacgagtgtggcttctgctcctgtgccagaagtaactgctgaccttgagaaagagatgacagatgaggaaaataagatatacagaaaggtggacatggcacgaatcaagtacatgcgtcttgttcatagattggggtatgatattaaccatcaggtaccagtacaagtgttgtatcggcttagtcttgttgaaggttttaagcgcggaaggatgacaaaccattcctcagagaccgagaatgcctggaagagggctttgcagcatgaggcagaggcaattgatgaccttgaattctcctgcaatgttttggtccttgggaagactggagtggggaagagtgcaacaataaattccatcttcggggaagataaatgcaaaacaaatgcttttctaccggcaacatcatctgtgaaggagattactggagttgttgatggtgttaagtttcgtgtcattgacacccctgggcttgggacttcgtccaaggatgaaaaatcaaataggaaagttctcaatgctgtcaagaagtatatgacgagatgccctccagatattattctgtatgttgataggcttgatacccagcgagaggaggcaaatagcctattcctcttgcgaagcattaccagtgtgctaggcctgtcaatatggcccagaacaattattactctcagtcactcaggaggtgcccccccagaaggccctaatggttcggaggtgaactatgatattcttgtgactcatcgaactcgtgcaattcagcaaagcatccggcagataactaatgatcctcaaattgagaatccagtggctcttgtggagaatcatcatctgtgtcggaggaatgcagaaggtgaaaaggtccttcctgatggccttatttggaggcggttcctcctcctcctatgctactcactgaagttgattgctgagatcgataacctctcaacccgtcgtgcttcttctacaggttttttaggtcactttttccaagtgcctccaattccttacttcttatcgtctttgttgcaatatagagagcaccctaggcattccaatgaactgaatgttgggagcctggactcagattttgacctagatgaattgttgaatggggaccaagaggatgaagaagatgactatgatcaacttcctcccttcaagccactaagcaaatcccaggttgcaaagctctccaaggagcaacaaaagttgtattttgatgaatatgattaccgaactaagcttcttcagaagaagcacttgaaggaacagcttggaagatttaaggaaatgaagaagaaagagtttgatgataatgatgtaccttctgatgatcatcccgatgatggatatgatacagatagatatcctatgccagaatggaccttgccatcttcatttgattctgatgatcctgtgtaccgctatcggtgccttgtgtctacaccaaacctcatggtgcgtgctgttaacaatcctgatggatgggatcatgattgtggatttgacggtgtgagtgtccaacacaaccataatgttgctaacaaatatccagcttctctgtgggttcaagttaacaaggacaagaggcagttcaccattcatttggattcctcaatgtcagttaagcatggtgactatgcctcgagcctggctggctttgacatccaaacaatgatgaatcagcttgcttacaccctcagaggtgagaccaaattcaaaggcttcaagaaaaacatcactactggtggtttatccatgacttttttgggaaataacatggtagctggagcaaagcttgaagacaagcttttaattggtaacaggctaacactgtcaggcaacactggtgctgtatccatgagaagtgatgctgcatatggagtgaatgtggaggcaactcttcatgaaaaaacctatcctgtaggtcaaggccttgccactttgggtgcatccttagtgaaatggcgaaaagagtggaccatgactgcaaatttagattcccatgtatctatcggaaggtcttcaaacatggcagttcatgttgatgtaaacaacaaactaactggacgggtcagcatcaaggccagcacttcagaacagttgaacattgcccttttaggtacctgttcagtgataatgtatttgtgggacaagatacaccctggtgcagattctaatgatgactagcactggtgtattcaggactcccaagatccaagcagtcacaggttggcaagcacatcatttgtgcacccagcttgtgattcaagaactggaagtagctgtaaactgtacactctggcaacttgctaggaatggaagttgaaccatcgctttctgtcaagaatcaagataagtgtagctgtgctgccgtttctttcttttttccatccagtgcgcagttggtggccaacttcatggttatcatcacatattttgtcaaaaatgtaattagtaacacgtctgatggttctcggctaa

SEQ ID NO: 91118 - DNA, 770 bp, Zea Mays
ctgggccttttgtgataagcacgaggacgtgggcacacgtgcagctgtccccaacccaaggaccgacccatccaaatcagttccgtcacgtctcttcctctcccgtctccgcagacgcctcccttttcttctcactccactccgccgcccggattcagagcgagaggaggcggagagggcggacatggcggcgatgttggtgggcgcgctgcggaggggaagtggatgccgcggcggcttgcgccttatcgctcattcgcttcgcagattcgtgagcacgctcgtcgtagcggagcacgaaggcgggttcgtcaagccgtcgtcgctgagcgcattggccgccgcggaggccattgccaaggacaacaaagtttctgtcctgctgggtggttccgggccggcgcttcacaaggccgccgaccatgccgcgtgcagccatccactggtgtctgaggtgctcgtggccgattcggaagccttggcgcatcctctggctgaaccctgggccgagctactccgttccgttcagcagaaaggaggctactctcatgtcatagcttcatccacatcattcgggaagaatttgcttccacgtgctgcggctctccttgatgtgtcccctgttactgatgtcaccgctgtaaaggagccacacgtctttgtgaggtctggtattctgctgtttagctgtgatcgttagcattttatttaagtacatatgggaccatttttcgtatcttggagaacacctcaatttataagttcctatc

SEQ ID NO: 91119 - DNA, 1686 bp, Zea Mays
ctgggccttttgtgataagcacgaggacgtgggcacacgtgcagctgtccccaacccaaggaccgacccatccaaatcagttccgtcacgtctcttcctctcccgtctccgcagacgcctcccttttcttctcactccactccgccgcccggattcagagcgagaggaggcggagagggcggacatggcggcgatgttggtgggcgcgctgcggaggggaagtggatgccgcggcggcttgcgccttatcgctcattcgcttcgcagattcgtgagcacgctcgtcgtagcggagcacgaaggcgggttcgtcaagccgtcgtcgctgagcgcattggccgccgcggaggccattgccaaggacaacaaagtttctgtcctgctgggtggttccgggccggcgcttcacaaggccgccgaccatgccgcgtgcagccatccactggtgtctgaggtgctcgtggccgattcggaagccttggcgcatcctctggctgaaccctgggccgagctactccgttccgttcagcagaaaggaggctactctcatgtcatagcttcatccacatcattcgggaagaatttgcttccacgtgctgcggctctccttgatgtgtcccctgttactgatgtcaccgctgtaaaggagccacacgtctttgtgaggccaatttatgctggaaatgcactttgtactgtgaaatatactggagaggggccttgcatgatgagtattagatcaacttcattttccccagctactgaggctatgtctgaaacaaaggttgcacctatcacccaggttgatctctctttcctcagtgaagggaaatctacatgggtgaatctgacatcacaagacacggagcggcctgatcttgcaaatgcacccgtagtagtcaccggaggcagaggtttaaaaagtgctgaaaattttaaattgttggagcagcttgctgagaaacttggcgcagcagtgggtgcgactcgggctgctgttgatgcaggttatgttccaaatgaccttcaggttggtcagacggggaaaatcgttgcgccggatctttatatggcttttggagtatccggagcaatacaacacttggcaggaatgagagactcgaaggtcattgtggctgttaataaagatgctgatgcccccatatttcaggttgcagattacggactggttgctgatctgttcgaggttctggatgagttattgaagaagatcccagagaagaaataagtggccgttattagctcttcactcctgcatgttcatttgcccatgtggcgctaataagatctcacgatgtcaatcccgtaaaatctgtaatgctctatttggatgtcgatattgaaaggtatgaattgaattgggttcaatactaaatcagctatggtattaaaattagatgtaattcaaactctattgtttggatgtctctgaattagagtttggaattatgtggtctaattatatgcaatacagagagctcaagctctgtattgggagtgcgagtttgtttttagttatagttcaaatccagagaattgggtctctgattctaaattcaatttcacgtgcaatcaaacaatagtattctagaaagttgatttcaattcttaatttcttactctaatacctacatccaaacgggatacaatgttttgttttctggt

SEQ ID NO: 91120 - DNA, 1960 bp, Zea Mays
ctgggccttttgtgataagcacgaggacgtgggcacacgtgcagctgtccccaacccaaggaccgacccatccaaatcagttccgtcacgtctcttcctctcccgtctccgcagacgcctcccttttcttctcactccactccgccgcccggattcagagcgagaggaggcggagagggcggacatggcggcgatgttggtgggcgcgctgcggaggggaagtggatgccgcggcggcttgcgccttatcgctcattcgcttcgcagattcgtgagcacgctcgtcgtagcggagcacgaaggcgggttcgtcaagccgtcgtcgctgagcgcattggccgccgcggaggccattgccaaggacaacaaagtttctgtcctgctgggtggttccgggccggcgcttcacaaggccgccgaccatgccgcgtgcagccatccactggtgtctgaggtgctcgtggccgattcggaagccttggcgcatcctctggctgaaccctgggccgagctactccgttccgttcagcagaaaggaggctactctcatgtcatagcttcatccacatcattcgggaagaatttgcttccacgtgctgcggctctccttgatgtgtcccctgttactgatgtcaccgctgtaaaggagccacacgtctttgtgaggccaatttatgctggaaatgcactttgtactgtgaaatatactggagaggggccttgcatgatgagtattagatcaacttcattttccccagctactgaggctatgtctgaaacaaaggttgcacctatcacccaggttgatctctctttcctcagtgaagggaaatctacatgggtgaatctgacatcacaagacacggagcggcctgatcttgcaaatgcacccgtagtagtcaccggaggcagaggtttaaaaagtgctgaaaattttaaattgttggagcagcttgctgagaaacttggcgcagcaggtttgactttatatctcaattttttcctcttccctgtccatactattatttatactccatctgttctaaattataagatattttgacttttctatatacattgtttttatatctagctacaatgtatgtttaaatgcattagcaaatctatgtatctaagaaagccaaaacttcttatgatttgaaccaaagggggtatcatggtggcatgtaatcttgcaaaattcactccctgtagactatttttctgattggttagttctcttctctgtagtgggtgcgactcgggctgctgttgatgcaggttatgttccaaatgaccttcaggttggtcagacggggaaaatcgttgcgccggatctttatatggcttttggagtatccggagcaatacaacacttggcaggaatgagagactcgaaggtcattgtggctgttaataaagatgctgatgcccccatatttcaggttgcagattacggactggttgctgatctgttcgaggttctggatgagttattgaagaagatcccagagaagaaataagtggccgttattagctcttcactcctgcatgttcatttgcccatgtggcgctaataagatctcacgatgtcaatcccgtaaaatctgtaatgctctatttggatgtcgatattgaaaggtatgaattgaattgggttcaatactaaatcagctatggtattaaaattagatgtaattcaaactctattgtttggatgtctctgaattagagtttggaattatgtggtctaattatatgcaatacagagagctcaagctctgtattgggagtgcgagtttgtttttagttatagttcaaatccagagaattgggtctctgattctaaattcaatttcacgtgcaatcaaacaatagtattctagaaagttgatttcaattcttaatttcttactctaatacctacatccaaacgggatacaatgttttgttttctggt

SEQ ID NO: 91121 - DNA, 1661 bp, Zea Mays
ctgggccttttgtgataagcacgaggacgtgggcacacgtgcagctgtccccaacccaaggaccgacccatccaaatcagttccgtcacgtctcttcctctcccgtctccgcagacgcctcccttttcttctcactccactccgccgcccggattcagagcgagaggaggcggagagggcggacatggcggcgatgttggtgggcgcgctgcggaggggaagtggatgccgcggcggcttgcgccttatcgctcattcgcttcgcagattcgtgagcacgctcgtcgtagcggagcacgaaggcgggttcgtcaagccgtcgtcgctgagcgcattggccgccgcggaggccattgccaaggacaacaaagtttctgtcctgctgggtggttccgggccggcgcttcacaaggccgccgaccatgccgcgtgcagccatccactggtgtctgaggtgctcgtggccgattcggaagccttggcgcatcctctggctgaaccctgggccgagctactccgttccgttcagcagaaaggaggctactctcatgtcatagcttcatccacatcattcgggaagaatttgcttccacgtgctgcggctctccttgatgtgtcccctgttactgatgtcaccgctgtaaaggagccacacgtctttgtgaggccaatttatgctggaaatgcactttgtactgtgaaatatactggagaggggccttgcatgatgagtattagatcaacttcattttccccagctactgaggctatgtctgaaacaaaggttgcacctatcacccagggaaatctacatgggtgaatctgacatcacaagacacggagcggcctgatcttgcaaatgcacccgtagtagtcaccggaggcagaggtttaaaaagtgctgaaaattttaaattgttggagcagcttgctgagaaacttggcgcagcagtgggtgcgactcgggctgctgttgatgcaggttatgttccaaatgaccttcaggttggtcagacggggaaaatcgttgcgccggatctttatatggcttttggagtatccggagcaatacaacacttggcaggaatgagagactcgaaggtcattgtggctgttaataaagatgctgatgcccccatatttcaggttgcagattacggactggttgctgatctgttcgaggttctggatgagttattgaagaagatcccagagaagaaataagtggccgttattagctcttcactcctgcatgttcatttgcccatgtggcgctaataagatctcacgatgtcaatcccgtaaaatctgtaatgctctatttggatgtcgatattgaaaggtatgaattgaattgggttcaatactaaatcagctatggtattaaaattagatgtaattcaaactctattgtttggatgtctctgaattagagtttggaattatgtggtctaattatatgcaatacagagagctcaagctctgtattgggagtgcgagtttgtttttagttatagttcaaatccagagaattgggtctctgattctaaattcaatttcacgtgcaatcaaacaatagtattctagaaagttgatttcaattcttaatttcttactctaatacctacatccaaacgggatacaatgttttgttttctggt

SEQ ID NO: 91122 - DNA, 1654 bp, Zea Mays
ctgggccttttgtgataagcacgaggacgtgggcacacgtgcagctgtccccaacccaaggaccgacccatccaaatcagttccgtcacgtctcttcctctcccgtctccgcagacgcctcccttttcttctcactccactccgccgcccggattcagagcgagaggaggcggagagggcggacatggcggcgatgttggtgggcgcgctgcggaggggaagtggatgccgcggcggcttgcgccttatcgctcattcgcttcgcagattcgtgagcacgctcgtcgtagcggagcacgaaggcgggttcgtcaagccgtcgtcgctgagcgcattggccgccgcggaggccattgccaaggacaacaaagtttctgtcctgctgggtggttccgggccggcgcttcacaaggccgccgaccatgccgcgtgcagccatccactggtgtctgaggtgctcgtggccgattcggaagccttggcgcatcctctggctgaaccctgggccgagctactccgttccgttcagcagaaaggaggctactctcatgtcatagcttcatccacatcattcgggaagaatttgcttccacgtgctgcggctctccttgatgtgtcccctgttactgatgtcaccgctgtaaaggagccacacgtctttgtgaggccaatttatgctggaaatgcactttgtactgtgaaatatactggagaggggccttgcatgatgagtattagatcaacttcattttccccagctactgaggctatgtctgaaacaaaggttgcacctatcacccagggaaatctacatgggtgaatctgacatcacaagacacggagcggcctgatcttgcaaatgcacccgtagtagtcaccggaggcagaggtttaaaaagtgctgaaaattttaaattgttggagcagcttgctgagaaacttggcgcagcagtgggtgcgactcgggctgctgttgatgcaggttatgttccaaatgaccttcaggttggtcagacggggaaaatcgttgcgccggatctttatatggcttttggagtatccggagcaatacaacacttggcaggaatgagagactcgaaggtcattgtggctgttaataaagatgctgatgcccccatatttcagattacggactggttgctgatctgttcgaggttctggatgagttattgaagaagatcccagagaagaaataagtggccgttattagctcttcactcctgcatgttcatttgcccatgtggcgctaataagatctcacgatgtcaatcccgtaaaatctgtaatgctctatttggatgtcgatattgaaaggtatgaattgaattgggttcaatactaaatcagctatggtattaaaattagatgtaattcaaactctattgtttggatgtctctgaattagagtttggaattatgtggtctaattatatgcaatacagagagctcaagctctgtattgggagtgcgagtttgtttttagttatagttcaaatccagagaattgggtctctgattctaaattcaatttcacgtgcaatcaaacaatagtattctagaaagttgatttcaattcttaatttcttactctaatacctacatccaaacgggatacaatgttttgttttctggt

SEQ ID NO: 91123 - DNA, 1396 bp, Zea Mays
aaggaccgacccatccaaatcagttccgtcacgtctcttcctctcccgtctccgcagacgcctcccttttcttctcactccactccgccgcccggattcagagcgagaggaggcggagagggcggacatggcggcgatgttggtgggcgcgctgcggaggggaagtggatgccgcggcggcttgcgccttatcgctcattcgcttcgcagattcgtgagcacgctcgtcgtagcggagcacgaaggcgggttcgtcaagccgtcgtcgctgagcgcattggccgccgcggaggccattgccaaggacaacaaagtttctgtcctgctgggtggttccgggccggcgcttcacaaggccgccgaccatgccgcgtgcagccatccactggtgtctgaggtgctcgtggccgattcggaagccttggcgcatcctctggctgaaccctgggccgagctactccgttccgttcagcagaaaggaggctactctcatgtcatagcttcatccacatcattcgggaagaatttgcttccacgtgctgcggctctccttgatgtgtcccctgttactgatgtcaccgctgtaaaggagccacacgtctttgtgaggccaatttatgctggaaatgcactttgtactgtgaaatatactggagaggggccttgcatgatgagtattagatcaacttcattttccccagctactgaggctatgtctgaaacaaaggttgcacctatcacccagggaaatctacatgggtgaatctgacatcacaagacacggagcggcctgatcttgcaaatgcacccgtagtagtcaccggaggcagaggtttaaaaagtgctgaaaattttaaattgttggagcagcttgctgagaaacttggcgcagcagtgggtgcgactcgggctgctgttgatgcaggttatgttccaaatgaccttcaggttggtcagacggggaaaatcgttgcgccggatctttatatggcttttggagtatccggagcaatacaacacttggcaggaatgagagactcgaaggtcattgtggctgttaataaagatgctgatgcccccatatttcaggttcctcctcgcatttgataaataattacgtaattgtccaccagtattagccagaaagtcctccaaattctaaagcaaccgggcattggcgttctccaggttgcagattacggactggttgctgatctgttcgaggttctggatgagttattgaagaagatcccagagaagaaataagtggccgttattagctcttcactcctgcatgttcatttgcccatgtggcgctaataagatctcacgatgtcaatcccgtaaaatctgtaatgctctatttggatgtcgatattgaaaggtatgaattgaa

SEQ ID NO: 91124 - DNA, 1596 bp, Zea Mays
ccatccaaatcagttccgtcacgtctcttcctctcccgtctccgcagacgcctcccttttcttctcactccactccgccgcccggattcagagcgagaggaggcggagagggcggacatggcggcgatgttggtgggcgcgctgcggaggggaagtggatgccgcggcggcttgcgccttatcgctcattcgcttcgcagattcgtgagcacgctcgtcgtagcggagcacgaaggcgggttcgtcaagccgtcgtcgctgagcgcattggccgccgcggaggccattgccaaggacaacaaagtttctgtcctgctgggtggttccgggccggcgcttcacaaggccgccgaccatgccgcgtgcagccatccactggtgtctgaggtgctcgtggccgattcggaagccttggcgcatcctctggctgaaccctgggccgagctactccgttccgttcagcagaaaggaggctactctcatgtcatagcttcatccacatcattcgggaagaatttgcttccacgtgctgcggctctccttgatgtgtcccctgttactgatgtcaccgctgtaaaggagccacacgtctttgtgaggccaatttatgctggaaatgcactttgtactgtgaaatatactggagaggggccttgcatgatgagtattagatcaacttcattttccccagctactgaggctatgtctgaaacaaaggttgcacctatcacccaggttgatctctctttcctcagtgaagggaaatctacatgggtgaatctgacatcacaagacacggagcggcctgatcttgcaaatgcacccgtagtagtcaccggaggcagaggtttaaaaagtgctgaaaattttaaattgttggagcagcttgctgagaaacttggcgcagcagtgggtgcgactcgggctgctgttgatgcaggttatgttccaaatgaccttcaggtaagactgctagtctaccatgagttttgtataatgccttgtactgctgtcattctagcctcattaccaccatgctcaacatctcatcttcttctccaagttcattgctgtcttccttttctgaacaaccatagcggtcattccctagtcgttttattcatgcaatgtgttttccgtccacaggttggtcagacggggaaaatcgttgcgccggatctttatatggcttttggagtatccggagcaatacaacacttggcaggaatgagagactcgaaggtcattgtggctgttaataaagatgctgatgcccccatatttcaggttgcagattacggactggttgctgatctgttcgaggttctggatgagttattgaagaagatcccagagaagaaataagtggccgttattagctcttcactcctgcatgttcatttgcccatgtggcgctaataagatctcacgatgtcaatcccgtaaaatctgtaatgctctatttggatgtcgatattgaaaggtatgaattgaattgggttcaatactaaatcagctatggtattaaaattagatgtaattcaaactctattgtttggatgtctctgaattagagtttggaattatgtggtctaa

SEQ ID NO: 91125 - DNA, 2328 bp, Zea Mays
cgaccgtggggcgctactgtttccatcctcctgctctgacttctctgcttcgtccgatcccctctcccccacctgccagactccccgccgtccaccgctcgccgcccccggccgccatccagccgccggtacagggctcatcctcccggtcgcagccgtgtccacttccttcacgaagagaggcgcgtagactggggagctggagcgaggacaaggagacgagggaaaggatgcagcagctgcaaccgaagcagatgcactgggtgagggccgactcctccgacttcgggggcgaccgtcccgccccccgcagcgggcacactgcggttatcattggcaagtccaaggtggtcgtcttcggaggattcgccgacaagcgcttcctcgctgatgtttccgtctacgacgtcgagaataagctatggtacacacctgagtgcactggtaatgggtcggatgggcaggccggcccaagcccaagggcttttcacatagctgttgtcattgactgcaacatgttcatctttggtggccgatctgggggcaagcgtttaggtgatttctggatgctagacactgacttatggcaatggtcggagatgactggctttggtgatttaccgtcaccacgagagtttgctgctgcttcagccataggaaacagaaagattgttatgtatggtggatgggatggcaaaaaatggctttcagatgtatacatcatggacacaatgtcactggagtggacagaattagctgttactggatctgtgccacctccaagatgtgggcattcggcaaccatgattgagaagagactccttatatttggaggcagaggtggagcaggaccaataatgggtgatttatgggctttaaagggtattactgaagaagacaatgaggcgccaggttggacacagttgaaacttccagggcaatctccctcaccacgatgcggtcattcagtaacatctggtggaccttatctcttgctgtttggaggacatggaactggtggttggctaagtagatatgatgtgtactataatgaatgcattattttagacagggtatctgttcaatggaagcgcttaccaacaagcaatgaaccacctcctcctcgggcatatcattccataacttccatagggtctcgatttcttttatttggtggctttgatggaaagaatacatttggtgatttgtggtggcttgttcctgaagacgatcctattgcgaaacgagacttagttcctagcatcgattcaaacagcaaacctagcactgtgactgatgataaccagctattgaacctaaaggagtcacaagctctagaaaatccaataacagaattggccaaacgtctggggattgcactttctgaagaagtttcagcaagttttgttgacgaagccaatgataaagaacttgtggaattgtcatctagacttgctggtcaatcgcttccagctagtgaccaggttgcatcaattcaggtacttcgtgatcattggaaaagttctccagcaagctcactacaactacaggaactaggacctttgctgagggactatcaacgcctcatcttgcgacactatacgggaaattcattgccagcttttcgtgaaatggaagctctccgttttttccatctaaaaagtgcttcacagttgcgcatggatgacattcccgtcctgttgagcgagtatggaaggctgctttcaacatgagatggtgtcttgcaagctgtgccctcctgcttggtcctaacagaacttctgctccatgtaatttgcggagaactttctgcctgacaaaagcacacccgtggagccattccttgccatcagttggtctgttagtgcaagtcatagtcgtagcagcgatagcgcactgagctgaattcctttttcttttgaggactggacgcagacgcacacatatttcgtgcagcctggctgggcgctggaatggggtcatggtcatgggctcatggccatccacacgtggttaggcctagcttaggcgaggagctgggcggcgtggcaaacttggcaggccgcccatggtcgcgtggaattccaagaaaacggggttttgtgtgatgtgaggctggaaacctggggggtcagcagcacatgtttccagtctattgcactccctctgaccgaaagggcgctgcactgcaattttattttactacctttgttcaaaaataatgggcgtctccttttcagatgtcaatcagtttcaactttgattagatttagtaaaaaaatctaacatttgttggatcgtattaaatattagtacttttatgtgtat

SEQ ID NO: 91126 - DNA, 953 bp, Zea Mays
tagctatgccagaccacgggcacggggtactgtccgcaggcgagggttcgtcaggcccaagtgagcgtggcctagtcctcgctgtcccaggcccaggtggaaccgggtgtccgtccgggcagttccagaaccttcctcctctccgatgcgatcggaaacgcgagccagccgaaactggaaaccaccaccaaccccacccggccggcaggcggggcggggggccgcacccggattccatcccacccgaccgcgccccattaaaaacgagggctcggccgccgcctcggccgcccactcccagaggctcttctcctcctcgcctcctctccctagtctccacgacgcaagggagagtgacggaaagcgacgcggcgcgagcgaggagggccaaggcgaagaggggaagcaccgcaccaggacccttgttcgccgccgccgcctctgatctccgcgaggtacctgcctcttgccttgctggtgggttttgtctgtagggtggtaggatctctctctctctctctctctctctctctctctgctctccggccctaggtggtgtgggtgttggtctgcctgctcgccttcgcgggtttcttagcggggcgatctcgggactcttaagtccagtggatggatggtgggatctcgcgttattttctccctgccttgttttcgtgaattcctaagtaagactaagaactcagaaccaaaccaaagagaattactgctggcggagctggtccgtgcgtaacttcaggtttccgttatttccgcgtgtaattaccgcctcgaatcctcgatcctgtggtggttttagtgttcatgggattgggaaggacctgtttaagagctgtgcatgtgcagtgaatctcgcttgctttggtggtccttgtccgggtaatttttgcagtgaaccatctagcggattgttctacttctatgaagtcaggcag

SEQ ID NO: 91127 - DNA, 1443 bp, Zea Mays
tagctatgccagaccacgggcacggggtactgtccgcaggcgagggttcgtcaggcccaagtgagcgtggcctagtcctcgctgtcccaggcccaggtggaaccgggtgtccgtccgggcagttccagaaccttcctcctctccgatgcgatcggaaacgcgagccagccgaaactggaaaccaccaccaaccccacccggccggcaggcggggcggggggccgcacccggattccatcccacccgaccgcgccccattaaaaacgagggctcggccgccgcctcggccgcccactcccagaggctcttctcctcctcgcctcctctccctagtctccacgacgcaagggagagtgacggaaagcgacgcggcgcgagcgaggagggccaaggcgaagaggggaagcaccgcaccaggacccttgttcgccgccgccgcctctgatctccgcgaggttgtcaggattcaatatgtcgaccagcacattcgctacttcctgcacgctgttgggcaatgttagaacaacgcaggcctcccagacagcggtgaagagcccttcgtctctaagcttcttcagccaagttacgaaggttccaagcctgaagacctccaagaaactggatgtctccgccatggctgtatacaaggtgaagcttgtcgggcctgaaggtgaagagcacgagtttgatgctccagacgacgcctacatccttgacgcagccgagactgccggtgtggagttgccatactcgtgccgtgctggggcttgctccacctgtgccggcaaaatcgagtctggttcggttgaccagtcggatgggtccttccttgatgacgggcagcaggaggaaggttatgtgctgacatgcgtctcctacccaaagtccgactgcgtcatccacacccacaaggaaggcgacctgtactagggctagggattttcaatttggcgagggaccaaaaatgctctcgagtggtgctttgtcaagcaaagctccatctgcgcgccctaccccgttgtgcgaactgtttggcatcaaacttgtgtggttgctgtcttctatgttctgctagtttatgttcggagtccgtgggaatatactagctgattaataaaaagaaaaaactgatgtgatgccataatagtataatttcatggctttttgttatgttgggagaagtgatgttgtaagctattgattctgaatgccactgtggcatgctggcatccttctatttccaaacacttgtttttgccaaattggagggtgtctggatgcaggcgcaactgcggacgaaatgagaacgaaacaaaaatatgcatgacatgctgagccacaacgacccaagacatgttttgtgtgccaggaatcttagaatttctcgttaggcggggatgctgaaggcaacagcttgctcgctcgcgtcatctctgacagcga

SEQ ID NO: 91128 - DNA, 1204 bp, Zea Mays
tagctatgccagaccacgggcacggggtactgtccgcaggcgagggttcgtcaggcccaagtgagcgtggcctagtcctcgctgtcccaggcccaggtggaaccgggtgtccgtccgggcagttccagaaccttcctcctctccgatgcgatcggaaacgcgagccagccgaaactggaaaccaccaccaaccccacccggccggcaggcggggcggggggccgcacccggattccatcccacccgaccgcgccccattaaaaacgagggctcggccgccgcctcggccgcccactcccagaggctcttctcctcctcgcctcctctccctagtctccacgacgcaagggagagtgacggaaagcgacgcggcgcgagcgaggagggccaaggcgaagaggggaagcaccgcaccaggacccttgttcgccgccgccgcctctgatctccgcgaggttgtcaggattcaatatgtcgaccagcacattcgctacttcctgcacgctgttgggcaatgttagaacaacgcaggcctcccagacagcggtgaagagcccttcgtctctaagcttcttcagccaagttacgaaggttccaagcctgaagacctccaagaaactggatgtctccgccatggctgtatacaaggtgaagcttgtcgggcctgaaggtgaagagcacgagtttgatgctccagacgacgcctacatccttgacgcagccgagactgccggtgtggagttgccatactcgtgccgtgctggggcttgctccacctgtgccggcaaaatcgagtctggttcggttgaccagtcggatgggtccttccttgatgacgggcagcaggaggaaggttatgtgctgacatgcgtctcctacccaaagtccgactgcgtcatccacacccacaaggaaggcgacctgtactagggctagggattttcaatttggcgagggaccaaaaatgctctcgagtggtgctttgtcaagcaaagctccatctgcgcgccctaccccgttgtgcgaactgtttggcatcaaacttgtgtggttgctgtcttctatgttctgctagtttatgttcggagtccgtgggaatatactagctgattaataaaaagaaaaaactgatgtgatgccataatagtataatttcatggctttttgttatgttgggagaaaaagaaaaaatattacaactagg

SEQ ID NO: 91129 - DNA, 371 bp, Zea Mays
ctggtcaaacccagaaatcacgaccaaatctgaatagagccacagcgcagacgtgaatgaatcttacaaaacgaaaacagatcgagcaaagagagatctactacctactacgcgtaaagaaatccataagcgatgaagaacaggacgtaggtacctgcgaccgagagcgagcgaggaagaggaagcgcacgtcaaatcgaagatgcctctgcctcgttatttttagcaaagggaggacaagatggagaatagatcgagggaaggaggcagtcgcccgccccaggattggattggagtggagtcggcccgggctagaagtagaaccctaataaatcccagcggcggcgcagacgagatgtagatatttccct

SEQ ID NO: 91130 - DNA, 988 bp, Zea Mays
ctccctatcctgccgcggcggcgagcacgtgcggagctgcgggcgccaccagacaaacccgctcattcgttcagcccccctgcccggagcaatggaggcgctgcgggcgtggagggcctcctccaatctcatcggcttcgcggcctcccgcgccgccgcctccgcttcaaggccccttggcctccgtatccgctgctgctccgcggccgccgccaccacgaacccgccggcgcagcctcaggaccgccgacgccgtagtgcctcctcatccgcctccacctccgaccgcgactccatccgcgccatccgcctcaaaaaagttgatgagctcagagggaagggttatgagccgtacgcgtacaggtgggacaggactcacacgaccaaggcgcttcaggaacagtacactcatcttatgaacggtgaagtctgcgaggacgtgtcggtgtccgttgctggccggattgttgcccgaagagcatttggaaagcttgtttttatgactgtaagagatgatgcggggactgtgcagctttattgtgagaaagacagccttacggaggaccaatttgagcaactaaaggcgtttattgatattggtgatatattaggtgcaagtggatccattaaaaagacagagaaaggggagctatctgtttatgtgaaaaatttcgaaattctcacaaaatcattactcccactaccagataagtatcatggattaactgatgtggacaaacgttatcgtcaaaggttggctttcatcttgcttcttgtacctgctaagtcatatcctatctgttcaaaattagaacccatctaatacaacaacaacaacaacaacaaagcctttttgtcccaagcacgttggggtaggctagagatgaaaccccgtatgaaaacctcagagctcaacccccaaagaacagaaaagggaaacaaaggcaaaggagaaccgaaaacaacgaaacggggaaacacataaaag

SEQ ID NO: 91131 - DNA, 684 bp, Zea Mays
atggaggcgctgcgggcgtggagggcctcctccaatctcatcggcttcgcggcctcccgcgccgccgcctccgcttcaaggccccttggcctccgtatccgctgctgctccgcggccgccgccaccacgaacccgccggcgcagcctcaggaccgccgacgccgtagtgcctcctcatccgcctccacctccgaccgcgactccatccgcgccatccgcctcaaaaaagttgatgagctcagagggaagggttatgagccgtacgcgtacaggtgggacaggactcacacgaccaaggcgcttcaggaacagtacactcatcttatgaacggtgaagtctgcgaggacgtgtcggtgtccgttgctggccggattgttgcccgaagagcatttggaaagcttgtttttatgactgtaagagatgatgcggggactgtgcagctttattgtgagaaagacagccttacggaggaccaatttgagcaactaaaggcgtttattgatattggtgatatattaggtgcaagtggatccattaaaaagacagagaaagattctaaggaatttgttttgtttggatctaagtgagttcttagtactacatatctgatgatagcgaaagggcctctagtgtaatggttaaggtttccgagtagcacctacaagtcccggattcgattctcc

SEQ ID NO: 91132 - DNA, 1358 bp, Zea Mays
ataggtggtttctgaaatccgcaagacaatggaatcatttggttttattgaagtcgaaactccagttctacagggagcagcaggtggtgctgaagctagaccttttataacctaccataactcacttcaaagagatctttacttgaggattgcaacagagctgcatttgaaaaggatgttggttggaggacttgagaaagtctatgagattgggagaatattccggaatgaaggcatttctactcgtcataatcctgaatttaccactattgaaatgtatgaagcatattcagactatgaaagcatgatgaatatggccgaagaaattgttactcgatgtgctatggctactcatggcaagcttaaggttgactatgagggaactgaaatctctctcgaaagaccatggaggagggagaccatgcattctcttgtcaaagaagcaactggaatcgactttaacagctttggacaagacgttgaatctgctaaaagagctgtgaggggactgccaggtttcgttgtagggaacagtgaaagtacttcactgcaagcctgttcatctgttggacatgttctcaatgaggtgtttgaaacatttgttgaatctactcttgtacaaccaacatttgtccttgactatccagttgagatatcaccattggcaaaaccacatcggagtcatgttggccttactgagcgattcgaacttttcatttgtggtcgtgagattggcaatgcgttttctgagctcacagacccaattgatcagagaagccgttttgaaaatcaaataaaacagcacaatgctaagcgtgctgcaatggctaaggaggtcaaatctaccgagggtgaaggcgacgacgattactcgtatgaagtttctttagacgaggacttcttgacttcattggaatacggaatgccaccggcatcaggaatgggcctcggtatcgaccggttagtaatgcttttgacgaactcttctagcataagggacgttattgcctttcctgtcttgaagattcagcaatagatccccttcattctgtgaagaggcgtggctgctgaagaaaacaccagcagccttccttttgtgcttggttcagtacagcaggttttatatctgctgacctttttatagctcatagatgtggccatttattatttgatgatgtaattgagatgtactatagttcagagtccaagccgatattaaaaactttatagatgtttgaataataatggaatccacattttacaattaatgtgctgcaaaacagctatctccactggatactctgattcttcagtgacatggttgccttgaactaccatttaagagattctttggtcta

SEQ ID NO: 91133 - DNA, 1545 bp, Zea Mays
atttgcttaaagttaaacattgttgatttttcgagaacgacaactaattttgtaacggagtaaaggcatgtttggttcgttgcctcaattgccacattttgcctaacttttctgcctaaggttagttattcaattcgaacgactaaccttaggcaaagtggggcacagttagacacaaaccaaagaagccttaagtactgtacccgatttggcacgggcgctggcgcgctctccccccagtaaagtgcaccagctcaccaaccagcggccggcggccggtggaagtggagcagcatctccgtccagcgacacaacccgtctcctgaatcctgattaatttcacttgcaatgcccttccatttctccaagatttcggattggtgggtggctgatttccccgagtgtgaccttcctccgtgtcccttgtccggcgatgaccccaaccaagtcttggtcgtcgtcccctggccggctggccctccctcttttattcgttcttcaacaataacaatcggtgagtggcaggcagggcgattgattctctcaacaccaagcagcaccgttgccttggatagccagccagaggcccgcaagatccgcgtcccccacccgaccacccccacacccgagcagcgcgggcggccatggcgttctgggagggctggtgcggcggcaagggcgacggctgctgtgacgactgcagctggacgcagctcgccatctgggccgccgccatcgtcgtcgtgggaggcctcatcaccgtcctggtgctcgccttcggcgtggtgttcccgcccaaggccacggccgacgacgccgtgctgcagcggttcgcgctggcgcccgccgacccggcgtccaactccaccatctccttcaacgtcaccgccacggtgtcgctccggaatcccaacatgtaccgggccatcgagtacggcgcgctcgccgtgaccttctccttcaacggcacccgcttcgatgactccgcgtccgtgccggggttcaagcacaaggcgcggaagacggcgacgctgagcgtgagagtcggcggcgtgggcaagcccatcaagctgaccaggcccggggtgggcgagttccgggcggagaacgacacgggcagcttcggcgtggagatgcggctggacacggtgctccagtacaagggccggtccgccaagtgcccgctcgtcgtcgtctgcccgctccagctgcagctcgtcgaccccgacgtcgccgccaccgcgttccagcggaccaagtgcactatcctccgggccaagaagtccgggtgctagctgactcagctccggctccattggtggcctggctagctccgttgggtggctttcgtttctttcttttcttcatgtgtaattaactgattgtttcttcaagacaggaggagatttgttcctcttcttgcttctctttttccaagagattgatagctgttgtagtgttgtgtacttgtgtgtgctttgaagagtatttgtaggagtggagaagttcaattggatgtgcagaaatttctggaaatttgcaact

SEQ ID NO: 91134 - DNA, 1674 bp, Zea Mays
atggctgatgtcgacgagtaccgttgcttcattgggaacctgtcctggtcaacgactgatgaaagcctcaaggatgcgttcagcaaattcggcaacctcactgaggcaaaggtggttcttgacaaattttcaggacgttctcgtggtttcggctttgtaacttttgatgagaagcaagccatggaggatgctattgagggaatgaatggactggacttggacgggaggaacatcactgttgataaagctcagccacaaggacctggtagagaccgtaatggtgaccgtgattatgaccgcgagcgtggatctcgttatgaacgtggtcgtgactatggtggtgggcgtgcaccgcgaggtggtggtggtggtggtggtggtggtgactgcttcaagtgtgggaaacctggtcattttgctagagagtgcccatctggggatggtgggagaggggacagatatggtgggagagatgacaggtatggtggcggtggcggtggcggtggcggtcgttatggttctgaccgtggtggtgaccgatactctggccgtagccgagatggcggcagctatgggggtggcgatcgctacagccgtgaccgatcaggtccttactgatggccttagttcttgattgagaagtatgtgccatccaggtatgaaagtctatctactattataaggcttgttattgtgtctggaactttgttatcctgtagttggagtcgacatgtaccgtgagaaatcagctgctttgttatagaccgtattactgaccggtttattatcgtttcctgcttgccaggcatatgacttggtcatagtgcttggcgcttggatcctgcatgtttgcttgatgtgctatttggctattaaaagatggattttgtcactgtgtttgatgaccctggtcctaattaagcttatgcctgtgatacgggggattggatggcaagttagtgtccgcatttgtgttcttttcggggaagcaaggggttgactactataatctacttgaacacacctacagctacaagaaaaaactatgttcttgttacctcttctgaaagcaagtgatgaatcgtccattagagaaaattaactggcttctttttggttatttgttcttgttgtggattggttgatactgtggttctggatttggttacttgcgtcctaagatcattttagtctggccagttgatccacgaatgcaaagagattatcctttggttccattctatgtgcctttagcattggagggcctctatttatggttgcttgatgaactggttatgtttgcttcgccatgttggtggggtgttccttgagctgtcccgtgttccttgtgacttgtgagaacaccagaggttatgcttgcctgagtggatgtgatgctacctggttgctgttcctttgacaatgcaccaatgtcctatcgcagcttatatactctggttccagattaattactggtgcccctttgagaggagttatgatgatgttattattcatcagcagcattctaattgcccttgatttagtgtagcctttttttcttagttcaccgaatctcaggatgcaaacgttaggttacttttactgttcgtactaaccaattgagcttttgtactaaaaaaagtatgttacattaagctgctccaggttccgttt

SEQ ID NO: 91135 - DNA, 1525 bp, Zea Mays
atggctgatgtcgacgagtaccgttgcttcattgggaacctgtcctggtcaacgactgatgaaagcctcaaggatgcgttcagcaaattcggcaacctcactgaggcaaaggtggttcttgacaaattttcaggacgttctcgtggtttcggctttgtaacttttgatgagaagcaagccatggaggatgctattgagggaatgaatggactggacttggacgggaggaacatcactgttgataaagctcagccacaaggacctggtagagaccgtaatggtgaccgtgattatgaccgcgagcgtggatctcgttatgaacgtggtcgtgactatggtggtgggcgtgcaccgcgaggtggtggtggtggtggtggtggtggtgactgcttcaagtgtgggaaacctggtcattttgctagagagtgcccatctggggatggtgggagaggggacagatatggtgggagagatgacaggtatggtggcggtggcggtggcggtggcggtcgttatggttctgaccgtggtggtgaccgatactctggccgtagccgagatggcggcagctatgggggtggcgatcgctacagccgtgaccgatcaggtccttactgatggccttagttcttgattgagaagtatgtgccatccaggcatatgacttggtcatagtgcttggcgcttggatcctgcatgtttgcttgatgtgctatttggctattaaaagatggattttgtcactgtgtttgatgaccctggtcctaattaagcttatgcctgtgatacgggggattggatggcaagttagtgtccgcatttgtgttcttttcggggaagcaaggggttgactactataatctacttgaacacacctacagctacaagaaaaaactatgttcttgttacctcttctgaaagcaagtgatgaatcgtccattagagaaaattaactggcttctttttggttatttgttcttgttgtggattggttgatactgtggttctggatttggttacttgcgtcctaagatcattttagtctggccagttgatccacgaatgcaaagagattatcctttggttccattctatgtgcctttagcattggagggcctctatttatggttgcttgatgaactggttatgtttgcttcgccatgttggtggggtgttccttgagctgtcccgtgttccttgtgacttgtgagaacaccagaggttatgcttgcctgagtggatgtgatgctacctggttgctgttcctttgacaatgcaccaatgtcctatcgcagcttatatactctggttccagattaattactggtgcccctttgagaggagttatgatgatgttattattcatcagcagcattctaattgcccttgatttagtgtagcctttttttcttagttcaccgaatctcaggatgcaaacgttaggttacttttactgttcgtactaaccaattgagcttttgtactaaaaaaagtatgttacattaagctgctccaggttccgttt

SEQ ID NO: 91136 - DNA, 1761 bp, Zea Mays
atggctgatgtcgacgagtaccgttgcttcattgggaacctgtcctggtcaacgactgatgaaagcctcaaggatgcgttcagcaaattcggcaacctcactgaggcaaaggtggttcttgacaaattttcaggacgttctcgtggtttcggctttgtaacttttgatgagaagcaagccatggaggatgctattgagggaatgaatggactggacttggacgggaggaacatcactgttgataaagctcagccacaaggacctggtagagaccgtaatggtgaccgtgattatgaccgcgagcgtggatctcgttatgaacgtggtcgtgactatggtggtgggcgtgcaccgcgaggtggtggtggtggtggtggtggtggtgactgcttcaagtgtgggaaacctggtcattttgctagagagtgcccatctggggatggtgggagaggggacagatatggtgggagagatgacaggtatggtggcggtggcggtggcggtggcggtcgttatggttctgaccgtggtggtgaccgatactctggccgtagccgagatggcggcagctatgggggtggcgatcgctacagccgtgaccgatcaggtccttactgatggccttagttcttgattgagaagtatgtgccatccaggtatgaaagtctatctactattataaggcttgttattgtgtctggaactttgttatcctgtagttggagtcgacatgtaccgtgagaaatcagctgctttgttatagaccgtattactgaccggtttattatcgtttcctgcttgccaggcatatgacttggtcatagtgcttggcgcttggatcctgcatgtttgcttgatgtgctatttggctattaaaagatggattttgtcactgtgtttgatgaccctggtcctaattaagcttatgcctgtgatacgggggattggatggcaagttagtgtccgcatttgtgttcttttcggggaagcaaggggttgactactataatctacttgaacacacctacagctacaagaaaaaactatgttcttgttacctcttctgaaagcaagtgatgaatcgtccattagagaaaattaactggtaatgttttcaatcttacatcttcaatactgtgttacaacgtcattctcaaatgacttttgttttggcaggcttctttttggttatttgttcttgttgtggattggttgatactgtggttctggatttggttacttgcgtcctaagatcattttagtctggccagttgatccacgaatgcaaagagattatcctttggttccattctatgtgcctttagcattggagggcctctatttatggttgcttgatgaactggttatgtttgcttcgccatgttggtggggtgttccttgagctgtcccgtgttccttgtgacttgtgagaacaccagaggttatgcttgcctgagtggatgtgatgctacctggttgctgttcctttgacaatgcaccaatgtcctatcgcagcttatatactctggttccagattaattactggtgcccctttgagaggagttatgatgatgttattattcatcagcagcattctaattgcccttgatttagtgtagcctttttttcttagttcaccgaatctcaggatgcaaacgttaggttacttttactgttcgtactaaccaattgagcttttgtactaaaaaaagtatgttacattaagctgctccaggttccgttttctcccggctttgaac

SEQ ID NO: 91137 - DNA, 114 bp, Zea Mays
atgcggtggcagcggttcccaggccggcggtggcggcccccgatccagagggcgagcggcgacagcggatcccaggccggtggccgcaactccgttacctccacgcgggtggag

SEQ ID NO: 91138 - DNA, 4126 bp, Zea Mays
gcagcgaagcgcgccgcgcaggcgcaacgcaacaaagggaaaccccagccggaggagcaaaagctagcaagcgtgtccctccccctccctcactcccgtttcattccattcccccccagacgccgctaccgccgccgccgcacgcacgcttgccccgggatctggagatctggtagcgccagggggatggaggccagcgccgggctggtcgccggctcgcacaaccggaacgagctcgtcgtcatccgccgcgatggcgagccagggccgaagcccatggaccagcggaacggccaggtgtgccagatttgcggcgacgacgtggggcgcaaccccgacggggagccgttcgtggcctgcaacgagtgcgccttccccatctgccgggactgctacgagtacgagcgccgcgagggcacgcagaactgcccccagtgcaagacccgcttcaagcgcctcaaggggtgcgcgcgcgtgcccggggacgaggaggaggacggcgtcgacgacctggagaacgagttcaactggagcgacaagcacgactcccagtacctcgccgagtccatgctccacgcccacatgagctacggccgcggcgccgacctcgacggcgtgccgcagccattccaccccatccccaatgttcccctcctcaccaacggacagatggtcgatgacatcccgccggaccagcacgcccttgtgccctcgttcgtgggtggcggggggaagaggattcaccctctcccgtacgcggatcccaaccttcctgtgcaaccgaggtctatggacccttccaaggatctcgccgcatatggctacgggagcgtagcatggaaggagaggatggagagctggaagcagaagcaggagaggatgcaccagacgaggaacgatggcggcggcgatgatggtgatgatgcagatctaccactaatggatgaagctagacagccattgtccagaaagatcccgcttccttcaagccaaatcaacccctataggatgattataataattcggctagtggttttgtgtttcttcttccactaccgagtgatgcatccggtgcctgatgcatttgctttatggctcatatctgtgatctgtgaaatttggtttgccatgtcttggattcttgaccagtttccaaagtggtttcctatcgagagggaaacctatcttgaccggctgagtttaaggtttgacaaggaagggcatccttctcaactcgcccctgtcgatttctttgtcagtacggttgatcccttgaaggaacctccattggtcactgctaatactgttctatctatcctttcggtggattatccagttgataaggtttcatgctacgtttctgatgatggtgctgccatgctgacatttgaagcattgtctgaaacatctgaatttgcaaagaaatgggttcctttctgcaaaagatatagccttgagcctcgtgctccagagtggtacttccaacagaagatagactacctgaaagacaaggtggcgccaaactttgttagagaacggagagcaatgaagagagagtatgaggaattcaaggtcagaatcaatgccttggttgctaaagcccaaaaggttcctgaggaaggatggacaatgcaggatggaactccatggcccggaaataatgtccgtgatcatcctggaatgattcaggttttccttggtcaaagtggtggccatgatgtggaaggaaatgagctgcctcgattggtttatgtttcaagagaaaaacggccaggctacaaccatcacaagaaggctggtgctatgaatgcattggtccgagtctctgctgtactaactaatgctccttatttgctgaacttggattgtgatcactatatcaataatagtaaggctataaaggaagcaatgtgttttatgatggatcctttgcttggaaataaagtttgctatgtgcagtttcctcaaagatttgatgggattgatcgccatgatcgatatgctaacagaaatgttgtctttttcgatatcaacatgaaaggtttggatggtatccagggcccaatttatgtgggtactggatgtgtcttcagaaggcaggcattatatggctacgatgctcccaaaacaaagaagccaccatcaagaacttgcaactgctggccaaagtggtgcatttgctgttgctgttttggtaacaggaagaccaagaagaagaccaagacctctaaacctaaatttgagaagataaagaaactttttaagaaaaaggaaaatcaagcccctgcatatgctcttggtgaaattgatgaagctgctccaggagctgaaaatgaaaaggctagtattgtaaatcaacagaagttggaaaagaaatttggccagtcttcagtttttgttgcatccacacttcttgagaatggtggaaccctgaagagtgccagtccagcttctcttctgaaggaagctatacatgtcatcagctgtggatatgaagacaaaacaggctggggaaaagatattggttggatttatggatcagtcacagaagatattcttactgggtttaagatgcactgccatggttggcggtcaatttactgcatacctaaacgggccgccttcaaaggttccgcacctctcaatctttccgatcgtcttcaccaggttcttcggtgggctcttggttcaattgaaattttcttcagcaaccactgccctctctggtatgggtatggtggtggactaaagttcctggaaaggttttcgtacattaactccatcgtatacccttggacatctatcccgctcttggcctattgcacattgcctgccatctgcttgctgacagggaaatttatcacgccagagcttaacaatgttgccagcctgtggttcatgtcacttttcatctgcatttttgctacgagcatcctggaaatgagatggagtggtgtaggcatcgatgactggtggagaaacgagcagttttgggtcattggaggcgtgtcttcacatctctttgctgtgttccagggactcctcaaggtcatagctggtgtagacacgagcttcactgtgacatccaagggcggagacgacgaggagttctcagagctgtacacattcaaatggacgacccttctgatacctccgacaaccctgctcctactgaacttcattggagtggtagctggcatctccaatgcgatcaacaacggatatgaatcatggggccccctgttcgggaagctcttctttgcattttgggtgatcgtccatctttacccgttcctcaagggtctggttgggaggcagaacaggacgccaacgattgtcattgtctggtccatcctcctggcttcgatcttctcgctgctttgggtccggatcgacccgttccttgcgaaggatgatggtcccctgttggaggagtgtggtctggattgcaactaggaggtcagcacgtggacttccccgtcagtgtgtggtcgaagaagtatttttgcagatgttttgtgcccatatttcttttttcaatttttgtccctctgtagatagaaacaaggggagaaggggaaaaaaagtacttgtatttcttttgttccatggtggtggtggtggtgggcggctcagcctcgtgagtgcagtattgggcaaaccggaggctgcggcaaccttgtgcagttcggccacgaatatactagggaagatcgcgaccaatcaatcaatcgatgaccgagttcaattgttcagcattctttattagttttggtgggtggatacttcaatcggtgagccgaacagacagttgttttgagtatgaattgctctgcatctgcaaagttgttgtttgtcatccgtcgtctcaatgaggcgagggtggaactggaatagatggtgctgtctggaacaggggaagcgcattgtttgtttgttttgtttatgtagtaagatgcgtgcgttccttcccttgctcctcgtcctggtgcatttctcctttactaggacacacaaactccattggtgagtgtctagtgatctagcgtagcagcgtcgtcaggcaatgtaatatgtaaacgtgccattttgtcgatcaacttcatgcgcaaagaaccgaatggaa

SEQ ID NO: 91139 - DNA, 1643 bp, Zea Mays
gtttcaggtgctagcataccttctgatatcgtcatcagcaactgctcgagcaagtgatttgactgagaactgggggagcgattccttcccgaacatggcgaactgctcgagcatgacatcacaatggtcatcagttggtgtgcaatcagccaatcaccacatacatatactacggatcaaggttcataaaccataatgcagctccaacaacaccgtttacaagttgcaacagctggaactggcaagaattgcaaagatacgcaggctactacagcctaactatctggattttgtgtatgctgttaactgagagttcttaaaaattaatgaattaacgaatccccaaggcccagccggatgaactgcatgcattgtcatctgcttgcagctgcctctgcaacggcttggagctccacgtgagctcctgcacggcggccgggaagatgaccgtaggtttcctcctgctctcctccaggtacgggaagtcctcggtgaagtgcaggccgcggctctcgcgcctggccagcgcgctcctgacgacgagcttggcgcagcagaagaggttgcgcatctcgcagacctcgacgcccttcagccgccccgttgagcgcacgatgccgacatactcccacatcacctactgcagctccatcctggcctgcctcgtctgccccacgatgtccgacagcgcgccgtcgcccagcgccgaccgtggcagcgtcagccgtgcccacctcgccgccagcgacggtcgtggagaactctcgcgctctggagagattttgcgcccgtggatccgtcgtaagaaacagactgccgtaacaacaaggattactgggctaaaactgactcggatactaaaattccgaatttcaatggattataatactacaattccaattgctctgttcgggataccaatttttagaagcccgaatgttcgggatatcacggttccaaaaagctcctcctcgagcgcgtgcgcagcggctctcctccccacaggcagtcgcgcggcggcctcatccccgccggcgagcctccactcccctccgccggtacgcctctatcgccggtggcctcccctcggcagacagcctcgcctcgcttgcttctattgctgtgctccaccacagagccctaggtggagctacgaaccccgtgatccccgacggtgtggcaccggagctcggcggcgacagcgggcacatccccctcatgccctaggtggagcaacgaaccccctgacttcccgacgccaccctcgcacaagatcccgatgtggcaatggcgaccagcgacgggcgctcaacgccaccgcgccgcctgcgaacccatggtgagaagtgtggtatcgatctagagccgaaggacttccccaacaccccttcctccatcggcgtgacatcggccagctcatctgcgacgacgaggcatcttcgaccgacttctcgacaccccatcctccatcaatgcggctccagtaccccttcctccatcggcgcagcagcatccaattcatctacgatgacaaggcatcttcgaccaaccacgccctactacaagtggtgtcagtccatctcagataagtggagtaatttgtttgtatctgtatcttctattttatttcttccctaatcctg

SEQ ID NO: 91140 - DNA, 1347 bp, Zea Mays
taccatgaacctcctcgctgacacgtcgccccacccccaagctgacttcccgacgccaccctcgcacaagatcccgatgtggcaatggcgaccagcgacgggcgctcaacgccaccgcgccgcctgcgaacccatggtgagaagtgtggtatcgatctagagccgaaggacttccccaacaccccttcctccatcggcgtgacatcggccagctcatctgcgacgacgaggcatcttcgaccgacttctcgacaccccatcctccatcaatgcggctccagtaccccttcctccatcggcgcagcagcatccaattcatctacgatgacaaggcatcttcgaccaaccacgccctactacaagtggtgtcagtccatctcagataagtggagtaatttgtttgtatctgtatcttctattttatttcttccctaatcctgattaatagcctaatcacgcgacaactaatacatgttgatttctttccttagtcggtgtcgtgcgcatgtgagatctagggagaggaagaggaggaagggttgtggggaccgggggtgcaagatggcggattcacctgcaactacaagaaaagaaagagcgagagatttacagaaaccttcagagccgcggaggaggagaaggagattaggaggatctctacggcgctgacggattagttaaggaacgaaatatcacatcgtgtccggtaaccagattcagatgtgggcaccatgcgtgggtgcagggccaggccgaggtgaaagagattcgacgattgagaatacatcaaagaataaaaatgtggaactcggattttcagatgaagagcgtgaccaagaatttcccgattttccatcatttattccattcttacctcctctgagtgcagctaacctaaaggtctactatgccacacgtttcaccatcatagttgggataatggtgttcggtggttttcttgcaccaatcttaaacttggtctaggggcacatcttatgaagactccatctgcagcgttcatctgtcgacgtagttgagatgaattctctatgcctacttctagagtgatgttcaaagaggttgacgctccttcaccatccccagctttgtggaatgggccacaggtagccatttaggatgacaaagccacaagggtgtccttcatcaaggctatgctagaagcctcagacttgtgtctgaggaaaattcataaaaatggtacacagaagctgggaagaaagtggaagaggaatttagcacttgccctctgtcagtcctaatgatgagcgttaagaacaacaccaagtcgggcagcggcagcagaggggatggggccaatgacggagg

SEQ ID NO: 91141 - DNA, 3089 bp, Zea Mays
taccatgaacctcctcgctgacacgtcgccccacccccaagctgacttcccgacgccaccctcgcacaagatcccgatgtggcaatggcgaccagcgacgggcgctcaacgccaccgcgccgcctgcgaacccatggtgagaagtgtggtatcgatctagagccgaaggacttccccaacaccccttcctccatcggcgtgacatcggccagctcatctgcgacgacgaggcatcttcgaccgacttctcgacaccccatcctccatcaatgcggctccagtaccccttcctccatcggcgcagcagcatccaattcatctacgatgacaaggcatcttcgaccaaccacgccctactacaagtggtgtcagtccatctcagataagtggagtaatttgtttgtatctgtatcttctattttatttcttccctaatcctgattaatagcctaatcacgcgacaactaatacatgttgatttctttccttagtcggtgtcgtgcgcatgtgagatctagggagaggaagaggaggaagggttgtggggaccgggggtgcaagatggcggattcacctgcaactacaagaaaagaaagagcgagagatttacagaaaccttcagagccgcggaggaggagaaggagattaggaggatctctacggcgctgacggattagttaaggaacgaaatatcacatcgtgtccggtaaccagattcagatgtgggcaccatgcgtgggtgcagggccaggccgaggtgaaagagattcgacgattgagaatacatcaaagaataaaaatgtggaactcggattttcagatgaagagcgtgaccaagaatttcccgattttccatcatttattccattcttacctcctctgagtgcagctaacctaaaggtctactatgccacacgtttcaccatcatagttgggataatggtgttcggtggttttcttgcaccaatcttaaacttggtctaggggcacatcttatgaagactccatctgcagcgttcatctgtcgacgtagttgagaagtgcactcaggttatacatccagtaaagagcaagacatttgaaagcttatgggccaactgtgttgctattgatgcaagcgaaagttggctgatgaattctctatgcctacttctagagtgatgttcaaagaggttgacgctccttcaccatccccagctttgtggaatgggccacaggtagccatttaggatgacaaagccacaagggtgtccttcatcaaggctatgctagaagcctcagacttgtgtctgaggaaaattcataaaaatggtacacagaagaaagtggaagaggaatttagcacttgccctctgtcagtcctaatgatgagcgttaagaacaacaccaagatactgaaagcaaacatggcttgttcagtcgggcagcggcagcagaggggatggggccaatgacggaggcggagaggagaacccatcgatttggtggcgtaagtgggagctcatcgaggccgccaccggccggtccacctcttcaataatcgtccttcatcgcccttcagttgacctgagatctagaaggacacaacaggcaaggtggatgtattcgtagttgattatatgttaaaagcaaattttggatgacattggtggagattgcttatctctaagacacatctactcattctttgaatggaaatcacatccacgttctagaaagtctatttttacttcaaaagtactccttctgttccaaataaattagtgttagcatctctgcactctattgcccacttcccccctcatcggtgttttttattgttgcatatcaattttgtggctcaaatgcccctttgaaacatatagcaccaaaattatcctaattaattaattggtttctaactggctactctatttgcaacaatggggatatataaccttaccatgtctgtttatcacagtgcatcttagattgcatcgtattgtaattgttttagttccttgacatactgtttgtgcaacaggaactgcttgatgtacttacggttgggtatctgtgtagctgtagctgccaagttgcctaaagaaaagttcccgacctttcacatgctgccacattgccacaataccttaagagcttttctatacttctatgatttgtgttttcgagatctgagttatttaaatgttgtctgctattttgaatttttatatgaagatcaaagttctcaattgataaagtaattaatataacaagcgaacaacacatagacaaactaattaatgtagcatatagacgaataaggaatcctgaaacattgaccgtgaagaaaattattgtgcacatatgcactctttctccaaaatttggcatttaatcttattgcaacatacttgtacagaggggcgagggttgttcagtgctttgacatgtgtgcaactattcaagcacaatggttagatgatatccccattcattttagattattacattgtggtgttcggcttcttcagtcaagcagcaatcatgcaacatgccttactgtagttttttatcactgcacatgttgctggacaaatttatggactggaggattatagaggactaacaagtgctactgggagattctcgagcaccattgaactaagagattccaaatagttctttggagtctattgttgatgttggcggggataatctagcagagatttgtcagattttttgtgcaacacggaggctacatgaggcagcaacgatcccattcttctcgcatgccactttacacaagctaaggatagcttctggtctcactcatggttgtggcagggaaagccgagtcagtagggtttgtcatgtagctggagttatctcagaccacatattagatgcagtgatgatgttaatggaggatgtttacatttaccgtgcaagcaagatgacttatattatgccttaggacaataagtattgttttcactctaatgaaatacttggtaaaaagttgtctctgtagttgtatatttgactgtgaatatttgaacccactgttacaattgttgctaattgaggtcagatttcagaggccaaat

SEQ ID NO: 91142 - DNA, 2251 bp, Zea Mays
taccatgaacctcctcgctgacacgtcgccccacccccaagctgacttcccgacgccaccctcgcacaagatcccgatgtggcaatggcgaccagcgacgggcgctcaacgccaccgcgccgcctgcgaacccatggtgagaagtgtggtatcgatctagagccgaaggacttccccaacaccccttcctccatcggcgtgacatcggccagctcatctgcgacgacgaggcatcttcgaccgacttctcgacaccccatcctccatcaatgcggctccagtaccccttcctccatcggcgcagcagcatccaattcatctacgatgacaaggcatcttcgaccaaccacgccctactacaagtggtgtcagtccatctcagataagtggagtaatttgtttgtatctgtatcttctattttatttcttccctaatcctgattaatagcctaatcacgcgacaactaatacatgttgatttctttccttagtcggtgtcgtgcgcatgtgagatctagggagaggaagaggaggaagggttgtggggaccgggggtgcaagatggcggattcacctgcaactacaagaaaagaaagagcgagagatttacagaaaccttcagagccgcggaggaggagaaggagattaggaggatctctacggcgctgacggattagttaaggaacgaaatatcacatcgtgtccggtaaccagattcagatgtgggcaccatgcgtgggtgcagggccaggccgaggtgaaagagattcgacgattgagaatacatcaaagaataaaaatgtggaactcggattttcagatgaagagcgtgaccaagaatttcccgattttccatcatttattccattcttacctcctctgagtgcagctaacctaaaggtctactatgccacacgtttcaccatcatagttgggataatggtgttcggtggttttcttgcaccaatcttaaacttggtctaggggcacatcttatgaagactccatctgcagcgttcatctgtcgacgtagttgagaagtgcactcaggttatacatccagtaaagagcaagacatttgaaagcttatgggccaactgtgttgctattgatgcaagcgaaagttggctgatgaattctctatgcctacttctagagtgatgttcaaagaggttgacgctccttcaccatccccagctttgtggaatgggccacaggtagccatttaggatgacaaagccacaagggtgtccttcatcaaggctatgctagaagcctcagacttgtgtctgaggaaaattcataaaaatggtacacagaagaaagtggaagaggaatttagcacttgccctctgtcagtcctaatgatgagcgttaagaacaacaccaagatactgaaagcaaacatggcttgttcagtcgggcagcggcagcagaggggatggggccaatgacggaggcggagaggagaacccatcgatttggtggcgtaagtgggagctcatcgaggccgccaccggccggtccacctcttcaataatcgtccttcatcgcccttcagttaggggcgagggttgttcagtgctttgacatgtgtgcaactattcaagcacaatggttagatgatatccccattcattttagattattacattgtggtgttcggcttcttcagtcaagcagcaatcatgcaacatgccttactgtagttttttatcactgcacatgttgctggacaaatttatggactggaggattatagaggactaacaagtgctactgggagattctcgagcaccattgaactaagagattccaaatagttctttggagtctattgttgatgttggcggggataatctagcagagatttgtcagattttttgtgcaacacggaggctacatgaggcagcaacgatcccattcttctcgcatgccactttacacaagctaaggatagcttctggtctcactcatggttgtggcagggaaagccgagtcagtagggtttgtcatgtagctggagttatctcagaccacatattagatgcagtgatgatgttaatggaggatgtttacatttaccgtgcaagcaagatgacttatattatgccttaggacaataagtattgttttcactctaatgaaatacttggtaaaaagttgtctctgtagttgtatatttgactgtgaatatttgaacccactgttacaattgttgctaattgaggtcagatttcagaggccaaat

SEQ ID NO: 91143 - DNA, 2819 bp, Zea Mays
atctttgtccacaccgcagccgccgcccgctcgctcgcctccgctccggcagcgagctctatctcccgcgacgagcagcagctgccaccgacgcacgcagaccgggcaataaatattggtattggtagtgtgatatctataagaagtcaagatggtgaagttcacagctgaagagctccgcgctatcatggacaaaaagaacaacattcgtaacatgtctgtcattgctcatgtggaccatggcaagtctacgcttacagattcccttgtggcagctgctgggattattgcccaggaagttgctggtgatgttcgcatgactgatactcgggcagatgaagcagagcgtggcattacaatcaaatctactggtatctctctttactatgagatgactgacgagtcactgaagaactacaagggtgagagagatggtaaccaatacttgatcaaccttattgactcgcctggacacgttgatttttcttcggaagtcacagctgctcttcgcatcaccgatggtgctctggttgtggttgactgtattgaaggtgtctgtgtgcaaactgaaactgtgcttcgccaagcccttggtgagaggattaggccagttctcacggtgaacaagatggacaggtgcttccttgagcttcaggttgagggtgaggaagcgtatcagactttctcccgtgtcattgagaatgccaatgtcatcatggcaacatatgaagataagctccttggtgatgtccaagtatacccagagaaggggacagttgctttttctgctggtctgcacggatgggccttcaccctcactaacttcgcaaagatgtatgcatctaagtttggagttgatgaaactaagatgatggagaggctatggggtgagaacttctttgaccctgccacaaagaagtggaccaccaagaacacaggttctcctacctgcaagagaggatttgttcagttctgctatgagccaatcaagcaaatcatcaagacctgcatgaatgaccagaaggagaaattgtggcccatgctgcaaaagctcaatgttaccatgaaggctgatgagaaggagttgattggcaaagctttgatgaagcgtgttatgcaaacgtggcttccagctagcactgctctgcttgagatgatgatattccaccttccttccccagcaaaggctcaaaagtatcgtgtggagaacttgtacgagggaccccttgatgatgtgtatgcaactgctatcagaaactgtgatccagagggtcctcttatgctgtatgtttcaaagatgattcctgcatctgacaagggcaggttctttgccttcggtcgtgtcttctcagggaaggttgctactggtatgaaggttcggatcatgggtcccaactatgtccccgggcagaagaaggatctgtatgtcaagagtgtccagcgtactgttatctggatgggaaagaagcaagagtcggttgaggatgttccgtgtggtaacactgttgctatggttggtctggatcagttcatcacgaagaatgctacactcactaatgagaaggagactgacgcttgcccaatcagagcaatgaagttctccgtctctcctgttgtgcgtgttgctgttcagtgcaaggttgcctctgaccttcccaagctagtcgaaggtttgaagcgtctagcaaagtccgatcctatggttctctgtacaatggaagaatctggtgagcatatcattgctggagctggtgagcttcatcttgagatttgcctgaaggatctgcaggaggacttcatgggtggtgctgaaattattgtttcccctcccgtcgtctccttccgtgaaacggttcttgagaagtcctgccgtactgtcatgagcaagtctcccaacaagcacaaccgtctgtacatggaagcgcgccccttggaggagggtctcgctgaggccatcgatgacggccgtattggcccacgtgatgatccgaaggtgcgctcccagatcctctctcaggagtttgggtgggacaaggacctggccaagaagatttggtgttttggacctgagaccactggcccgaacatggttgtagatatgtgcaagggagtgcagtatctcaatgaaatcaaggattctgttgtggctggtttccagtgggcatcaaaggagggtgcactggctgaggagaacatgcgtggaatttgctttgaggtatgtgatgtcgttcttcatgctgatgctatccacaggggtggtggtcaggtcattcccactgccaggagggtcatctatgcctctcagctcacggccaagccaaggctgctggagccagtctacctggtggagatccaggccccagaaaatgcacttggtggtatctacggtgttctgaaccagaagagaggtcatgtctttgaggagatgcagaggccgggtaccccgctctacaacatcaaggctttcctccctgtcatcgagtcctttggtttctccagccaactgagggccgcaacctctggtcaggcgttcccccagtgtgtctttgaccattgggacatgatgggctcagatcctttggaggccggctcccaggctgctcagctggtgctggatatccgcaagaggaagggtctcaaggaacagatgacccctctttctgagtttgaggacaagctctaaaatttttggctgttggtgatactgtttcatctgccgtgccctgccgcgcttagagtctgagactattttgttatctgctgtgatgtttcagatgaaacagagttgatgtctggtttagtaaatggttatattctta

SEQ ID NO: 91144 - DNA, 2819 bp, Zea Mays
atctttgtccacaccgcagccgccgcccgctcgctcgcctccgctccggcagcgagctctatctcccgcgacgagcagcagctgccaccgacgcacgcagaccggggaataaatattggtattggtagtgtgatatctataagaagtcaagatggtgaagttcacagctgaagagctccgcgctatcatggacaaaaagaacaacattcgtaacatgtctgtcattgctcatgtggaccatggcaagtctacgcttacagattcccttgtggcagctgctgggattattgcccaggaagttgctggtgatgttcgcatgactgatactcgggcagatgaagcagagcgtggcattacaatcaaatctactggtatctctctttactatgagatgactgacgagtcactgaagaactacaagggtgagagagatggtaaccaatacttgatcaaccttattgactcgcctggacacgttgatttttcttcggaagtcacagctgctcttcgcatcaccgatggtgctctggttgtggttgactgtattgaaggtgtctgtgtgcaaactgaaactgtgcttcgccaagcccttggtgagaggattaggccagttctcacggtgaacaagatggacaggtgcttccttgagcttcaggttgagggtgaggaagcgtatcagactttctcccgtgtcattgagaatgccaatgtcatcatggcaacatatgaagataagctccttggtgatgtccaagtatacccagagaaggggacagttgctttttctgctggtctgcacggatgggccttcaccctcactaacttcgcaaagatgtatgcatctaagtttggagttgatgaaactaagatgatggagaggctatggggtgagaacttctttgaccctgccacaaagaagtggaccaccaagaacacaggttctcctacctgcaagagaggatttgttcagttctgctatgagccaatcaagcaaatcatcaagacctgcatgaatgaccagaaggagaaattgtggcccatgctgcaaaagctcaatgttaccatgaaggctgatgagaaggagttgattggcaaagctttgatgaagcgtgttatgcaaacgtggcttccagctagcactgctctgcttgagatgatgatattccaccttccttccccagcaaaggctcaaaagtatcgtgtggagaacttgtacgagggaccccttgatgatgtgtatgcaactgctatcagaaactgtgatccagagggtcctcttatgctgtatgtttcaaagatgattcctgcatctgacaagggcaggttctttgccttcggtcgtgtcttctcagggaaggttgctactggtatgaaggttcggatcatgggtcccaactatgtccccgggcagaagaaggatctgtatgtcaagagtgtccagcgtactgttatctggatgggaaagaagcaagagtcggttgaggatgttccgtgtggtaacactgttgctatggttggtctggatcagttcatcacgaagaatgctacactcactaatgagaaggagactgacgcttgcccaatcagagcaatgaagttctccgtctctcctgttgtgcgtgttgctgttcagtgcaaggttgcctctgaccttcccaagctagtcgaaggtttgaagcgtctagcaaagtccgatcctatggttctctgtacaatggaagaatctggtgagcatatcattgctggagctggtgagcttcatcttgagatttgcctgaaggatctgcaggaggacttcatgggtggtgctgaaattattgtttcccctcccgtcgtctccttccgtgaaacggttcttgagaagtcctgccgtactgtcatgagcaagtctcccaacaagcacaaccgtctgtacatggaagcgcgccccttggaggagggtctcgctgaggccatcgatgacggccgtattggcccacgtgatgatccgaaggtgcgctcccagatcctctctcaggagtttgggtgggacaaggacctggccaagaagatttggtgttttggacctgagaccactggcccgaacatggttgtagatatgtgcaagggagtgcagtatctcaatgaaatcaaggattctgttgtggctggtttccagtgggcatcaaaggagggtgcactggctgaggagaacatgcgtggaatttgctttgaggtatgtgatgtcgttcttcatgctgatgctatccacaggggtggtggtcaggtcattcccactgccaggagggtcatctatgcctctcagctcacggccaagccaaggctgctggagccagtctacctggtggagatccaggccccagaaaatgcacttggtggtatctacggtgttctgaaccagaagagaggtcatgtctttgaggagatgcagaggccgggtaccccgctctacaacatcaaggctttcctccctgtcatcgagtcctttggtttctccagccaactgagggccgcaacctctggtcaggcgttcccccagtgtgtctttgaccattgggacatgatgggctcagatcctttggaggccggctcccaggctgctcagctggtgctggatatccgcaagaggaagggtctcaaggaacagatgacccctctttctgagtttgaggacaagctctaaaatttttggctgttggtgatactgtttcatctgccgtgccctgccgcgcttagagtctgagactattttgttatctgctgtgatgtttcagatgaaacagagttgatgtctggtttagtaaatggttatattctta

SEQ ID NO: 91145 - DNA, 2661 bp, Zea Mays
ccttttcggctttcggtttcgggctcaaaagggctttccaggagaggagccgcaccgcacgtccgcacgccgctcttcttcccctgcttgctctgggttcctccattcctctccagtctccatcacaggagcacgcgacgcgcgccacaggaaggaaggggaaaaacatggcggcggcgaacggggacgcgtgccgcagcgtcggcggggtgccgcgcccgacgaaccccatggtgacgccgctgctcaccgacctgtaccagttcaccatggcctacgcctactggaaggccggcaagcacctcgaccgcgcagtgttagccctgagccccagctcttccccactcttaactccccgcgcttcctttgtctcctcaatcctttccctcgatttggggtgtcaatttacacttaacctccactcgatttgtggtatcagtttacacttacctccaggctccagccctcgatttgtggtttgttaggccactgaggagggggtgataatctggtagacatgaccccgcctcgataaggcgtgactgggtagtgttctggaactattttgctacctgttttttttttgaaccgtgtgtgaggctgggctggctgtgacgattgagcacatttgaggctctgcttcgtagttttgtttcagtacgttataagattaggtttgcaatggggaaaccgtttttcgttaggccaagtgttttatctaggtcgtacttggtgtagcaagtgtgtaaaatcagcgtcacagttcttctaccggtcttcaagttacgctctactctctttcacctgtactaactgcgaactgaaatggtgttagctttgatctctacttccggaaaaatccatttggcggggagttcaccatcttcggtggcctcgaggaatgtataaggttcattgctaacttcaagttcacggaggaggaaatcaaatttcttcgatctgtcatgcctgcatgtgaggatgacttctttgagtacctccgttcgattgactgctcagacgtggaggtttatgccataccagagggttatgctgtgttccctaaagttccactgatgagaattgaaggacctgttgctgttgtccagcttcttgaaactccatttctaagtcttgtcaactatgcttctctggttaccacgaatgcggcacggcaccgacttgtagctgggaagtcaaagaatttacttgaatttggacttcgacgggctcaagggcctgatggaggaatcagtgcatcaagatattgttatatgggaggatttgatgcaacaagcaatgttgcagcaggaagattgtttgggataccaatacgtgggactcattcacatgcatttgtgagctccttcatgggtcttgatgaaattactgacaaaacacttactagttctgatggttcaaacacatgtgaagattttatctctctggtgcagaactggctgatcaggattcaggattctagttcattgcatggcacctttggagaaacgagccaaagtgagttggctgcattcacgtcatatgcactggcatttccaaattccttcctggccttggttgacacatatgatgtcatgagaagcggagtgccaaacttctgtgctgttgctttggccctcaatgatatggggtataaggcagtcggaattaggttggactctggtgatttagcatacctatccgttgaggcccgcaagttcttccatgcagttgaaaaagaatttgtagttgttggctttgggaaaacaagtatcacagcaagcaatgatcttaatgaagaaactatagatgctctgaacaagcagggccatgaggtagatgcatttggtattggcacctacctagttacatgctatgcacaagctgcacttggttgtgtattcaaattagttgagattaacaaacagcctcgtattaaactttctgaagatgtcatgaaggtatcgataccatgtaagaaaaaatgctacagattgtatggcaaagaagggtatccgttggttgatataatgaccggagaagatgagccaggtccaaagattggtgaaaggctcctatgtcgtcaccctttcaatgaatcaaagagagcgtacgttgttccacagcatgttgaggaattattgaagtgctactggcctggaaattcatcgaattcacgggaggagcttccatccatccatgagattaggactcggtgtattcaccatctggaccgaatgaggccagaccatatgaggcggctgaacccgacgccttacaaggtaagcgtgagtgctaagctgtatgacttcatccatttcttgtggctcaacgaagcgcctgtcggagaactgcaatgatgaaatgaagtggcggtagggtcggatcccaaacctaactctaataagctgctccgcttatgggtgccgtcggagcaaataacaaactgttgccgccggtgcaatttctgcagtagttttaccatcgcctgcgctctagtaaaatgtgagtatgtgctggtgcatctgtcaaaacagaccatagctgaagtgttacgtactgggaacaagaggatacccataccgagttagatctatatgactgaactaattgcaatgaggagcaatcactaaatttgagacaaatttacttgtcttgtca

SEQ ID NO: 91146 - DNA, 2178 bp, Zea Mays
ccttttcggctttcggtttcgggctcaaaagggctttccaggagaggagccgcaccgcacgtccgcacgccgctcttcttcccctgcttgctctgggttcctccattcctctccagtctccatcacaggagcacgcgacgcgcgccacaggaaggaaggggaaaaacatggcggcggcgaacggggacgcgtgccgcagcgtcggcggggtgccgcgcccgacgaaccccatggtgacgccgctgctcaccgacctgtaccagttcaccatggcctacgcctactggaaggccggcaagcacctcgaccgcgcagtctttgatctctacttccggaaaaatccatttggcggggagttcaccatcttcggtggcctcgaggaatgtataaggttcattgctaacttcaagttcacggaggaggaaatcaaatttcttcgatctgtcatgcctgcatgtgaggatgacttctttgagtacctccgttcgattgactgctcagacgtggaggtttatgccataccagagggttatgctgtgttccctaaagttccactgatgagaattgaaggacctgttgctttttcccatacgtcgagattgtgttgtttgccccaggttgtccagcttcttgaaactccatttctaagtcttgtcaactatgcttctctggttaccacgaatgcggcacggcaccgacttgtagctgggaagtcaaagaatttacttgaatttggacttcgacgggctcaagggcctgatggaggaatcagtgcatcaagatattgttatatgggaggatttgatgcaacaagcaatgttgcagcaggaagattgtttgggataccaatacgtgggactcattcacatgcatttgtgagctccttcatgggtcttgatgaaattactgacaaaacacttactagttctgatggttcaaacacatgtgaagattttatctctctggtgcagaactggctgatcaggattcaggattctagttcattgcatggcacctttggagaaacgagccaaagtgagttggctgcattcacgtcatatgcactggcatttccaaattccttcctggccttggttgacacatatgatgtcatgagaagcggagtgccaaacttctgtgctgttgctttggccctcaatgatatggggtataaggcagtcggaattaggttggactctggtgatttagcatacctatccgttgaggcccgcaagttcttccatgcagttgaaaaagaatttgtagttgttggctttgggaaaacaagtatcacagcaagcaatgatcttaatgaagaaactatagatgctctgaacaagcagggccatgaggtagatgcatttggtattggcacctacctagttacatgctatgcacaagctgcacttggttgtgtattcaaattagttgagattaacaaacagcctcgtattaaactttctgaagatgtcatgaaggtatcgataccatgtaagaaaaaatgctacagattgtatggcaaagaagggtatccgttggttgatataatgaccggagaagatgagccaggtccaaagattggtgaaaggctcctatgtcgtcaccctttcaatgaatcaaagagagcgtacgttgttccacagcatgttgaggaattattgaagtgctactggcctggaaattcatcgaattcacgggaggagcttccatccatccatgagattaggactcggtgtattcaccatctggaccgaatgaggccagaccatatgaggcggctgaacccgacgccttacaaggtaagcgtgagtgctaagctgtatgacttcatccatttcttgtggctcaacgaagcgcctgtcggagaactgcaatgatgaaatgaagtggcggtagggtcggatcccaaacctaactctaataagctgctccgcttatgggtgccgtcggagcaaataacaaactgttgccgccggtgcaatttctgcagtagttttaccatcgcctgcgctctagtaaaatgtgagtatgtgctggtgcatctgtcaaaacagaccatagctgaagtgttacgtactgggaacaagaggatacccataccgagttagatctatatgactgaactaattgcaatgaggagcaatcactaaatttgagacaaatttacttgtcttgtca

SEQ ID NO: 91147 - DNA, 2142 bp, Zea Mays
ccttttcggctttcggtttcgggctcaaaagggctttccaggagaggagccgcaccgcacgtccgcacgccgctcttcttcccctgcttgctctgggttcctccattcctctccagtctccatcacaggagcacgcgacgcgcgccacaggaaggaaggggaaaaacatggcggcggcgaacggggacgcgtgccgcagcgtcggcggggtgccgcgcccgacgaaccccatggtgacgccgctgctcaccgacctgtaccagttcaccatggcctacgcctactggaaggccggcaagcacctcgaccgcgcagtctttgatctctacttccggaaaaatccatttggcggggagttcaccatcttcggtggcctcgaggaatgtataaggttcattgctaacttcaagttcacggaggaggaaatcaaatttcttcgatctgtcatgcctgcatgtgaggatgacttctttgagtacctccgttcgattgactgctcagacgtggaggtttatgccataccagagggttatgctgtgttccctaaagttccactgatgagaattgaaggacctgttgctgttgtccagcttcttgaaactccatttctaagtcttgtcaactatgcttctctggttaccacgaatgcggcacggcaccgacttgtagctgggaagtcaaagaatttacttgaatttggacttcgacgggctcaagggcctgatggaggaatcagtgcatcaagatattgttatatgggaggatttgatgcaacaagcaatgttgcagcaggaagattgtttgggataccaatacgtgggactcattcacatgcatttgtgagctccttcatgggtcttgatgaaattactgacaaaacacttactagttctgatggttcaaacacatgtgaagattttatctctctggtgcagaactggctgatcaggattcaggattctagttcattgcatggcacctttggagaaacgagccaaagtgagttggctgcattcacgtcatatgcactggcatttccaaattccttcctggccttggttgacacatatgatgtcatgagaagcggagtgccaaacttctgtgctgttgctttggccctcaatgatatggggtataaggcagtcggaattaggttggactctggtgatttagcatacctatccgttgaggcccgcaagttcttccatgcagttgaaaaagaatttgtagttgttggctttgggaaaacaagtatcacagcaagcaatgatcttaatgaagaaactatagatgctctgaacaagcagggccatgaggtagatgcatttggtattggcacctacctagttacatgctatgcacaagctgcacttggttgtgtattcaaattagttgagattaacaaacagcctcgtattaaactttctgaagatgtcatgaaggtatcgataccatgtaagaaaaaatgctacagattgtatggcaaagaagggtatccgttggttgatataatgaccggagaagatgagccaggtccaaagattggtgaaaggctcctatgtcgtcaccctttcaatgaatcaaagagagcgtacgttgttccacagcatgttgaggaattattgaagtgctactggcctggaaattcatcgaattcacgggaggagcttccatccatccatgagattaggactcggtgtattcaccatctggaccgaatgaggccagaccatatgaggcggctgaacccgacgccttacaaggtaagcgtgagtgctaagctgtatgacttcatccatttcttgtggctcaacgaagcgcctgtcggagaactgcaatgatgaaatgaagtggcggtagggtcggatcccaaacctaactctaataagctgctccgcttatgggtgccgtcggagcaaataacaaactgttgccgccggtgcaatttctgcagtagttttaccatcgcctgcgctctagtaaaatgtgagtatgtgctggtgcatctgtcaaaacagaccatagctgaagtgttacgtactgggaacaagaggatacccataccgagttagatctatatgactgaactaattgcaatgaggagcaatcactaaatttgagacaaatttacttgtcttgtca

SEQ ID NO: 91148 - DNA, 2607 bp, Zea Mays
atgaaagctctcgcctcgcccgccgcctccttcctcccgggtatcccgagccctagccatctcgcgcgcgcgcttccccgatccgcggcggccgcgctctcgcggcccccttccgggcgctccatcgccgccgcggccgcggccgccacaggggaccactggggcgccgaccaccagcactaccacggaggacgcgcgggcgcgtcggaggccgggcctaccgcgtcggcgcgcggcgtcaagtgcgacgtggacgtggtgtcgtggcgggagcggcgggtgctcgcgtccgtgcctgtggccgccgacgtcgacacgctgtggcaggtcatcaccgactacgagcgcctcgctgacttcatccccaacctcgtccagagtgtgacgattccgtgtccgcatgaagggcggatatggctggagcagagaggcctgcagcgcgcgttgtactggcacattgaggcgcgcgtcgtgttggatctccaggaaatccctgactccgataagtgggatgggaggtcctctagtgcagttttgctgtatgaagttaatgtgataccaagatttaacttcccggctatatttcttgaaaggattataaggtcagatcttcctgtaaatcttcgtgccttggcttgtagagctgaaaagatttatctggaaaatcaaggatgtggttcaagaaaattttttgttgaggacttgaagccatcatatacttctcagcttaataacttccatagtacgacagttgagacttctaagtttaaacaagcacctcccaggtctggtgttagcagtgtgcttccttcaccttcttctgaattgattagcaaatggggtgtatatggaaacatatgcagaattgataagccttgtgtggtagatgagatccatcttcgaagatttgatggcatgttggaacatgagggggctcataggtgtgtttttgctagtatcactgtgaaagcaccggttcgagaggtatggaatgttctcacagcatatgagaatttgcctgaattcgtaccaaacctggctatcagtaggattgttcttcgtgataataacaaggttcggataatgcaggagggttgcaaaggcctgctttatatggtccttcacgcccgtgttgttatggatcttcgcgaaaaacatgagcaagagatcagctttgaacaagtcgagggtgatttttacacatttaaagggaaatggcgcttagaacaacttggggatcagcacaccctgttgaagtacatggttgaaactaagatgcatagggacacctttctctctgaatctatccttgaagagctgaatgctttgataaagtttaatgtctttagagatagtaaagcagactgttcatttttcatgaatctgttacaggtcatatatgaagatcttccatcaaacttgtgtgcaatccgtgattatattgaaaaggctggagccaagagtagcaattccacaggtcattctaatgtgcccacagatccagatccagatgttgatcatgatgaaagcaggcaatctgagcaaacgtgtgtgtcttgctcatccagtaccatgaagcagagaccaaaagtcccaggattgcaaaaggacatcgaggtcctaaaatcagagcttgataatttcattgcagagtatggtcagtatggtttcatgcctaagagaaagcatctccggtctcatggaagagtggatattgagaaggctataacaagaatgggtgggttccggaagattgccagcataatgaacctttctctttcttacaaaaatcgaaaaccaagaggctattgggataatctggagaacttgcaagaagagatcagccggttccagaaaatttgggggttggatccttcttatatgcccagtagaaaatcttttgagagggcaggtcgttatgacattgctcgggcattggaaaaatggggtggggtgcaggaggtttcacgccttctttctcttgaactaagatatcctagaagacaagcagacccggacgatgagagacagtctgaatccccgtctgggatgatgaagaagcacggagtgaaacctgatgaaggcaatgtttccccaaatgcgcagaaatggctcctgaagctgaaggacttggatgtcaattgggtggaatactaggtttagctttggaaaaagatatggtctctcatcatgaactcagctctttcctttcttcggaggtgttctggatgcattccgacaaagacgccgcagattgtgtacagaacagcgcggtgcacgggccaaccccattctgaaggcgagctaccagcaggcaacatgttttcttgccagtaatcacgactcttggctactactgcgtatctagaactgctgacaatactactcagcttcttttgcggtcaaaccgatccatggttttgacaaagtcaggccataaaatgcagaaaagggtgtcgatttcgtgcgcctgttcaaagctgttttgagtcagccacgcctttgaaaaatctgaggtgttcacaggttggtcgcctactttgttattactggtgatataagttgacctggtccttttgaaagagaaggtttacccgtctagtaata

SEQ ID NO: 91149 - DNA, 2604 bp, Zea Mays
  misc_feature (530)..(536): n is a, c, g, or t
atgaaagctctcgcctcgcccgccgcctccttcctcccgggtatcccgagccctagccatctcgcgcgcgcgcttccccgatccgcggcggccgcgctctcgcggcccccttccgggcgctccatcgccgccgcggccgcggccgccacaggggaccactggggcgccgaccaccagcactaccacggaggacgcgcgggcgcgtcggaggccgggcctaccgcgtcggcgcgcggcgtcaagtgcgacgtggacgtggtgtcgtggcgggagcggcgggtgctcgcgtccgtgcctgtggccgccgacgtcgacacgctgtggcaggtcatcaccgactacgagcgcctcgctgacttcatccccaacctcgtccagagtgtgacgattccgtgtccgcatgaagggcggatatggctggagcagagaggcctgcagcgcgcgttgtactggcacattgaggcgcgcgtcgtgttggatctccaggaaatccctgactccgtatgtgctgtcgcagattgaacttccannnnnnncgtcgtgacttcaagaagagtgaaggacaaatggtccataagatctgctcctaggtcctctagtgcagttttgctgtatgaagttaatgtgataccaagatttaacttcccggctatatttcttgaaaggattataaggtcagatcttcctgtaaatcttcgtgccttggcttgtagagctgaaaagatttatctggaaaatcaaggatgtggttcaagaaaattttttgttgaggacttgaagccatcatatacttctcagcttaataacttccatagtacgacagttgagacttctaagtttaaacaagcacctcccaggtctggtgttagcagtgtgcttccttcaccttcttctgaattgattagcaaatggggtgtatatggaaacatatgcagaattgataagccttgtgtggtagatgagatccatcttcgaagatttgatggcatgttggaacatgagggggctcataggtgtgtttttgctagtatcactgtgaaagcaccggttcgagaggtatggaatgttctcacagcatatgagaatttgcctgaattcgtaccaaacctggctatcagtaggattgttcttcgtgataataacaaggttcggataatgcaggagggttgcaaaggcctgctttatatggtccttcacgcccgtgttgttatggatcttcgcgaaaaacatgagcaagagatcagctttgaacaagtcgagggtgatttttacacatttaaagggaaatggcgcttagaacaacttggggatcagcacaccctgttgaagtacatggttgaaactaagatgcatagggacacctttctctctgaatctatccttgaagaggtcatatatgaagatcttccatcaaacttgtgtgcaatccgtgattatattgaaaaggctggagccaagagtagcaattccacaggtcattctaatgtgcccacagatccagatccagatgttgatcatgatgaaagcaggcaatctgagcaaacgtgtgtgtcttgctcatccagtaccatgaagcagagaccaaaagtcccaggattgcaaaaggacatcgaggtcctaaaatcagagcttgataatttcattgcagagtatggtcagtatggtttcatgcctaagagaaagcatctccggtctcatggaagagtggatattgagaaggctataacaagaatgggtgggttccggaagattgccagcataatgaacctttctctttcttacaaaaatcgaaaaccaagaggctattgggataatctggagaacttgcaagaagagatcagccggttccagaaaatttgggggttggatccttcttatatgcccagtagaaaatcttttgagagggcaggtcgttatgacattgctcgggcattggaaaaatggggtggggtgcaggaggtttcacgccttctttctcttgaactaagatatcctagaagacaagcagacccggacgatgagagacagtctgaatccccgtctgggatgatgaagaagcacggagtgaaacctgatgaaggcaatgtttccccaaatgcgcagaaatggctcctgaagctgaaggacttggatgtcaattgggtggaatactaggtttagctttggaaaaagatatggtctctcatcatgaactcagctctttcctttcttcggaggtgttctggatgcattccgacaaagacgccgcagattgtgtacagaacagcgcggtgcacgggccaaccccattctgaaggcgagctaccagcaggcaacatgttttcttgccagtaatcacgactcttggctactactgcgtatctagaactgctgacaatactactcagcttcttttgcggtcaaaccgatccatggttttgacaaagtcaggccataaaatgcagaaaagggtgtcgatttcgtgcgcctgttcaaagctgttttgagtcagccacgcctttgaaaaatctgaggtgttcacaggttggtcgcctactttgttattactggtgatataagttgacctggtccttttgaaagagaaggtttacccgtctagtaata

SEQ ID NO: 91150 - DNA, 104 bp, Zea Mays
ttttcttttctttttcctgctcacattattagagctcagcacttcctttttgtattcgctgcattgcacgccgctattgtttttctgcttgcaggttgacttgg

SEQ ID NO: 91151 - DNA, 2796 bp, Zea Mays
aaatccttccgtacaacccagcgagagagggtcgtcgaggtcgtcgtctctagctagctgctaagagagagagagagagagaggtatacgtaggaccgccggcaactagctaactaacatgtcgtcgtcgtccgggacgacgatgccgctggcgtaccagacgtcggcgtcgtctcccgagtggctgaacaagggcgacaacgcgtggcagctgacggcggcgacgctggtggggctgcagagcttcccgggtctggtggtcctgtacggcggcgtggtgaagaagaagtgggccgtgaactcggccttcatggcgctgtacgcgttcgcggcggtgtggatctgctgggtgacctgggcctacaacatgtccttcggcgacaggctgctgccgctgtggggcaaggcgcggccggcgctgagccagggcgggctggtggggcaggccggcctccccgccacggcgcaccacttcgccagcggcgccctggagaccccggccgcggagccgctgtacccgatggccacggtggtgtacttccagtgcgtgttcgcggccatcaccctggtgctggtcgccgggtcgctgctgggccggatgagcttcgccgcgtggatgctgttcgtgccgctctggctcaccttctcctacaccgtcggcgccttctccgtatggggcggcgggttcctcttccagtggggcgtcatcgactactgcggcggctacgtcatccacctctccgctggcttcgccgggttcacggcagcctactgggtggggccccgggcgcagaaggacagggagaggttcccgccgaacaacatcctgttcacgctcaccggcgcgggcctgctgtggatggggtgggccggcttcaacggcggcgggccgtacgccgccaacgtggtggcgtccatgtcggtgctcaacaccaacatctgcaccgccatgagcctcctcgtctggacctgcctcgacgtcgtcttcttcaagaagccctccgtcgtgggcgccgtccagggcatgatcaccggactcgtctgcatcacgcccgccgcaggtcaccatgcatgcatcatgcgtcgtttctctcgtttccttgtcaaaaaatttcacctcctcgatcaatcgcccgcccggttggtgtacctcctctccgtacatgtgcgatgaacgcaaccgcgtgctcgctctctagctggctagattctcttattagggtacggtggtggactagtatgcaaactacggcgctgaatggttgactttgaattcaaaatacaaatggttctctggttgccatcacagttccgtcagaaatcaggaatctcttgtgtgccagctactttgtcctagctacagtaccttcttaagttgccttctagaagtcagttaactaaagtcaattttttgtctccgtttttacctttcatttgcacacaaagtgcttgtggacaaaggtacaattaattatgacactggacgcacacgtacgttcacacttcactgtctgctgtactgtcgatcaatcggcattatatatatagtatcacatacaataatcacgcataatttgtgtagtaatattattaattattaatggggattttcctggtctagttgatcttccctgcctgccgacgatctaccatgcatgcatgcagaatgatctgacgacggcacggtatgcatccatcaatccatgcatgcagggctggtgcaggggtgggcggccatggtgatgggcgtgctggccggcagcgtgccgtggtacacgatgatgatcctgcacaagcggtcccggctgctgaagcacgtggacgacacgctgggcgtcatccacacgcacggcgtggcggggctcctgggcggcctgctcacggggctcctcgccgaccccaccctgtgcgcgctcttcctgccggtcaccaactccaagggcgccttctacggcgacggcgcgcagctcggcaagcagctggcgggcgcgctcttcatcatcggatggaacgtggccgtcacctccatcatctgcgtcgccatcaacgccgtcgtcccgctgcgcatgacccaggacaagctcgaggtcggcgacgacgccgtccatggcgaggaggcgtacgcgctctggggagacggcgagctctacgacgtcaccgaccacgggccacgcgccgccgccgccgtcgcgcccatgtccacgcccccgaattgaaatagctgcgagaacctcctgtgcgtccatccatccatccatccatccatccatccatccatcgcgtgttgataaccaccgttcattgtgaaaaataccaagtgcacgagctagctagctagtaggccttgctgttcctcctcttcttaatccaacatcgcatgtactgtacattgctgtgtatgtgaacgtcgcatgtagtgtgcattgccgtcgcatgaaaaagacggcataccgaagaatcagtcaacaaaagcttccttgtttcctcgtccttgtgcagttttgcactagttttggattgttaccgagaatcaggatagttatgataacagtaatgggatatatgcagatctgttcctattgatgagctggttttttaaggctttgctcagagaaaggacggaagttaatggcgccgggtatggtgtaataggagtcccgtatagttcctcacccttgtcatcctcgagtgcatctagtgttagagcgccgccgcgatcgtttcataacagcttagacaattaaatttatgtgtgtgttctggatctggatgttgtgttcgatgggtctaagattt

SEQ ID NO: 91152 - DNA, 2053 bp, Zea Mays
caagcttgaccgcagcttacccagcccaataagcagcgagagagggtcgtcgaggtcgtcgtctctagctagctgctaagagagagagagagagagaggtatacgtaggaccgccggcaactagctaactaacatgtcgtcgtcgtccgggacgacgatgccgctggcgtaccagacgtcggcgtcgtctcccgagtggctgaacaagggcgacaacgcgtggcagctgacggcggcgacgctggtggggctgcagagcttcccgggtctggtggtcctgtacggcggcgtggtgaagaagaagtgggccgtgaactcggccttcatggcgctgtacgcgttcgcggcggtgtggatctgctgggtgacctgggcctacaacatgtccttcggcgacaggctgctgccgctgtggggcaaggcgcggccggcgctgagccagggcgggctggtggggcaggccggcctccccgccacggcgcaccacttcgccagcggcgccctggagaccccggccgcggagccgctgtacccgatggccacggtggtgtacttccagtgcgtgttcgcggccatcaccctggtgctggtcgccgggtcgctgctgggccggatgagcttcgccgcgtggatgctgttcgtgccgctctggctcaccttctcctacaccgtcggcgccttctccgtatggggcggcgggttcctcttccagtggggcgtcatcgactactgcggcggctacgtcatccacctctccgctggcttcgccgggttcacggcagcctactgggtggggccccgggcgcagaaggacagggagaggttcccgccgaacaacatcctgttcacgctcaccggcgcgggcctgctgtggatggggtgggccggcttcaacggcggcgggccgtacgccgccaacgtggtggcgtccatgtcggtgctcaacaccaacatctgcaccgccatgagcctcctcgtctggacctgcctcgacgtcgtcttcttcaagaagccctccgtcgtgggcgccgtccagggcatgatcaccggactcgtctgcatcacgcccgccgcagggctggtgcaggggtgggcggccatggtgatgggcgtgctggccggcagcgtgccgtggtacacgatgatgatcctgcacaagcggtcccggctgctgaagcacgtggacgacacgctgggcgtcatccacacgcacggcgtggcggggctcctgggcggcctgctcacggggctcctcgccgaccccaccctgtgcgcgctcttcctgccggtcaccaactccaagggcgccttctacggcgacggcgcgcagctcggcaagcagctggcgggcgcgctcttcatcatcggatggaacgtggccgtcacctccatcatctgcgtcgccatcaacgccgtcgtcccgctgcgcatgacccaggacaagctcgaggtcggcgacgacgccgtccatggcgaggaggcgtacgcgctctggggagacggcgagctctacgacgtcaccgaccacgggccacgcgccgccgccgccgtcgcgcccatgtccacgcccccgaattgaaatagctgcgagaacctcctgtgcgtccatccatccatccatccatccatccatccatccatcgcgtgttgataaccaccgttcattgtgaaaaataccaagtgcacgagctagctagctagtaggccttgctgttcctcctcttcttaatccaacatcgcatgtactgtacattgctgtgtatgtgaacgtcgcatgtagtgtgcattgccgtcgcatgaaaaagacggcataccgaagaatcagtcaacaaaagcttccttgtttcctcgtccttgtgcagttttgcactagttttggattgttaccgagaatcaggatagttatgataacagtaatgggatatatgcagatctgttcctattgatgagctggttttttaaggctttgctcagagaaaggacggaagttaatggcgccgggtatggtgtaataggagtcccgtatagttcctcacccttgtcatcctcgagt

SEQ ID NO: 91153 - DNA, 601 bp, Zea Mays
gtagcgtgcatttatacagctcgtgtgtgcgtccgctgacaagccagggcaaggagagcagccggcagagagcaggcccggcaccgccaccgccagccatgacgttggacgaatcgttcaagaggcccggcaccgtcccgttcaagtgggaggtgcagccgggcatccccaagcagcaaggtgcagccggcgacgtccctccgccgccgaccagtccgaggctggcgcttcctcccgccgcccgcgtcgccgcgccgctggcgaccccgcacccgcagccgtcgcactcgcaccggcggtccatgtccgcgcgcttcgtcacgtcgctggcgctgatgcccttcgtcacgcggcggggacggggaggaggaggaggaggaggaggacgcgccggcgccggcgccggcaactgcgaggacgaattctgcctgctgtacggcgacaaggccgcctagttagtctctgtgcgctgtagatagagatcagatgtagcatgtaaacgtgggaatcaagttctggaacgacaggcgtcgtcgtcgtcgtcgtactatgaacaatcgacggaaaacgaaaacgatgaagggatcgacatgaacaaaga

SEQ ID NO: 91154 - DNA, 420 bp, Zea Mays
cagaccgcagcgctagtcgaaactggaggaccggctccagtagccgtcggccgaggtgtccacggtgctgctgcattgcgactgcgactgcgacagcgtgtcgtcgtcctccacctccaccccgaggagcgcgaggttaagatgcgactgcatgttcaggtcaggggccgccgccgcagcctcctcgtcggacccgtcgaagctggccgtgacctgcgccctcgcccagccgatcgcctcgtcgtcgccctggaggagtctcaggacctgtgacatctcaggccgagagcgagaagatgtcctcgtgcaaagcgaggcggcgagcgtcatcctctccatctcatcgcagtcgtactcgttcctccccagcaacggatcaaccagctctctaattccgccgccgcacagcaaaggcttggc

SEQ ID NO: 91155 - DNA, 275 bp, Zea Mays
ttgttttgtttggtttcttatcttgtatatgtatattatgtatgtgtcatacttttctaatatattggagcgacaagtcttttgccaatccctttaaaaaaaattactagtaaaattagctagctaacaaatagctagctaactattaactaatttactaaaaacaatcaataatttagggtgtttggatatctaaaattaattttagtcaataattattagctctactacgtgtcaatgcatgccttcctatggcatgcatgcatgtcaatgcc

SEQ ID NO: 91156 - DNA, 1263 bp, Zea Mays
attaaacagttatactctcgtctcgccgtcgctatcgaggcgagctccgtggaagtttgctggctgctgaggctcgttcgaggcggtggaggacaggcaggcaggcagctctccgttcggcttggcttggcttggacggctgccgcgtcgcgcacctgcgggcgggcagtggccagtggctgggcggtccggggccggggcagccaggggcgtcgtcgcgctcgtagccactgaggtcggcggcggtggcaccgtggcagtgcggtgccgagaaaccgtcccaccaaggaggctggggcaccgaacagcgaacaacggaagaagagcagctgaacaggcaggggagaggttccagctatgctcaccgcgcagccgccacctgaggtagcgggtgaggatgacagcagtttccaccatgtcttcgtggagtttatgaccaaagccgctcagttcgaggagctcgctgaatctggggagcgattgcttgggagattccgtgaggagcttgagtattttcgtaggccccagattcctaaggaatcagatgtcatgaatcagatacttaaatccaactgcactgtcagaatgaggtcctatgttgaagctggctgcaggcttcactaccaaaacatctcaaacataaatcagttaagctcatccgaagctggacttaaagatcatataaagaaagctaagactttgctcgaagaacttgaatgtctagtcgagaatgtctatggcatcacattaacatccagtttaagtgctctggaagtttcagacagtcattgcctcgacaacatgccaagcaccgattgctatgccatggaggaggataaacgagcagatcatttggacatggacgtatcgctcgttacggtgatggccatggttcgcaacatgctgaagcttgactacacgatgcaggagaagattgtcactgcattgtccttgaaaacaccagcatcggagctcgagggatactgcctcatgtgggatctacgcccgtacatcgatgacgacgtgatgcgtcttgcgtggaacatgtgtccttgaagcattggggctttgagttgtttctgctgggatggatgtctggtctgttcattattttcttatgtatgacaacgtggttgtgtgtgttcatggtcgtcttctggagacgagaaacacatgggtgttgtttggttcacataaattggtaactaataatattagattatgtttgtttaagttcaaccgtaatggataccacactacaaa

SEQ ID NO: 91157 - DNA, 1701 bp, Zea Mays
attaaacagttatactctcgtctcgccgtcgctatcgaggcgagctccgtggaagtttgctggctgctgaggctcgttcgaggcggtggaggacaggcaggcaggcagctctccgttcggcttggcttggcttggacggctgccgcgtcgcgcacctgcgggcgggcagtggccagtggctgggcggtccggggccggggcagccaggggcgtcgtcgcgctcgtagccactgaggtcggcggcggtggcaccgtggcagtgcggtgccgagaaaccgtcccaccaaggaggctggggcaccgaacagcgaacaacggaagaagagcagctgaacaggcaggggagaggttccagctatgctcaccgcgcagccgccacctgaggtagcgggtgaggatgacagcagtttccaccatgtcttcgtggagtttatgaccaaagccgctcagttcgaggagctcgctgaatctggggagcgattgcttgggagattccgtgaggagcttggttagttgttctgatatgctttccttcctcttttgttggcacagctgatatgccatggaggttcagtttatatattatcccggacaccgttgaattgttaacattgtgatggtattatgtactgttaattgtgatgactgaggcactgagcaatcttattgcagagtattttcgtaggccccagattcctaaggaatcagatgtcatgaatcagatacttaaatccaactgcactgtcagaatgaggtcctatgttgaagctggctgcaggcttcactaccaaaacatctcaaacataaatcagtgtgagctatatagctttggcagtgaacaaccttttttattcttacatgctaatggttgatatgactcgcttatctgaatttgtcccgtacttgtttcttgccctgtctataaaagtacagactattgtgatttttagctaattctatgtattcttttgttattacaggatttatagttgaagtatgagctctagacaacatacttgttcaattttaatgataaataattccatacccttaatcagttagctattgttttttttccttgtgccagtaagctcatccgaagctggacttaaagatcatataaagaaagctaagactttgctcgaagaacttgaatgtctagtcgagaatgtctatggcatcacattaacatccagtttaagtgctctggaagtttcagacagtcattgcctcgacaacatgccaagcaccgattgctatgccatggaggaggataaacgagcagatcatttggacatggacgtatcgctcgttacggtgatggccatggttcgcaacatgctgaagcttgactacacgatgcaggagaagattgtcactgcattgtccttgaaaacaccagcatcggagctcgagggatactgcctcatgtgggatctacgcccgtacatcgatgacgacgtgatgcgtcttgcgtggaacatgtgtccttgaagcattggggctttgagttgtttctgctgggatggatgtctggtctgttcattattttcttatgtatgacaacgtggttgtgtgtgttcatggtcgtcttctggagacgagaaacacatgggtgttgtttggttcacataaattggtaactaataatattagattatgtttgtttaagttcaaccgtaatggataccacactacaaa

SEQ ID NO: 91158 - DNA, 2197 bp, Zea Mays
gcgaggtcgaggcaaagaactcatcgcgtggatcctccatttgggtcaacacggctggacgtggaatccaacccggggtgccagcgcacacgacaccggtcaccgcccgcctccttgtaggcttgtctgccagatcgaaggcaagcgcgggcgccggcgtggccttgcgatggagagccccacgtcgacggcgtcgcgccccgacttctacgacttcctcgaccgcatgcgccgccccgccgccgccgacctattccgctccatcaagagcttccttgtctccttctccttccacgcgcccaacgccgaggaggacggcagcaaggtccaggccttcctcgcggagatggagagcgccatcagggaccacccgctctgggccaacgccaccgatcaggagatcgaccacgcgctcgagggcctggagaagtatgtcatcaccaaattgttcgaccgcacgtttgggacttccactgaggatgccgttaccgacatggacatctcggagaagattggtctcttgcagcagtttgttaagcctcatcacttggatatacccaaggtcctgcataacgaggcatcgtggctgcttgcagtgaaagagctgcagaagattaattcctttaaagcaccacgtgagaagcttctgtgcatcatgaactgctgtcaagtcatcaataacttgcttctgaacatatcaatgtcaaatgatcgaacattatctggggctgatgagttccttcctattcttatctatgttactatcaaggccaatcctcctcagctgcactcaaatctgaagttcattcagctctttagaagagaaacaaagctaatttcagaagtcgaatattacctgactaacctcatttcagcaaagatgtttataatagatgtcagtgctcactcgctctcaatggaggaaagcgagtttcagaaacatatggaatcggcaagactagctactcaagtatctgttgcaagcccaagtagctcacaggggcttcccacatctgcaagggcaaatcaggaggaaactgatatggcaggttccagattccctttcatggactcagaaactgaaagcttgactccaggggaagtcaagcagctgcatgatctgtataagcgagttgtcacaagatacacgctgttgtctgaagccttaagaaagtcatccatagacgaggatcagctccttaattcagtgcatgatccatgaggtgatgtgaagatgatgtctaggcatgatggtattaatcataagcaggcctcgtttccattagttgcaggccttataggggaaagaacgaggtcctagataacgaatgttccagcaagtcctacgcaatgcagggcacaacagctgtgagttgagcattacgcatgggaaggtgttatcttgttcttgatagccttggctcactagagttttgtagcattgtggtgccttggcatgacttgtacttaggttgggggtcctttattcaccaggatggatcttctgaaatcagtgctgaaggaactggaaattggcacacatgacatattgccttctaactcatacaatctgccaccagatgtctcacagttttggtgccgatcggcttcctgcaatggagaatgtgaaaatcgaacctggaatgtagggcagaaaaccactactgaggcaggcggggataaagatggagtaacataggctgggaaatgtctagatctcttgccatactacacatgggagtatgcgttggatcccaatgttctgtagttagtgttgagccttgaggttttagagctgtagtgttggggaaaatgtgagcgggtaacactgatttttaacagctgatgtgctgctccgggcaaattcagtcgggcgttatgctaatgaagattatgtcaaaggaaaatatgaccaagggtgaaaggagatttatgtagttcccttttagttacacatctgattttattttaagcaagtacggatgagggatatccgtggtcaagtttgatgcttcaggttgaggtgaaatttcgttatttggcgactcagtatgcccacctcactgtgtaatctttatatctcaagcgtgtaaaaggatgcccaaaatacaactgtatagatcatcgtggatcactcgatcagctcatatttattctatcaataaaggcaaatataagactaactacattctttata

SEQ ID NO: 91159 - DNA, 1327 bp, Zea Mays
cttgctctaaattctaaaataacgcaaacggtaccagcaagcagcaagcctctctccattttcttcgccggcggcaggtgcacacatcggggaatggcgacctacgaccatgccgccaccccgacaccgcagtctccgggcgtcggcggcgtacccttctcgtcctgcatcggcgacctcctccgcttcgtcctctcctcccacgccgccgcctaccccggtgacgacacggtcgctttccccctctcgccctcctactgcgcccgcctcctcaacgacggcgaactgttcgagaagctggaggcctgtattcagcagtgcctcgaggaggggcggctcccggggccgcccgcggtggttgggattccggctgaggaggaggggccggaggagagagggtggaagctgctgctgccggagaaaggcgctgagttgaagcggatgtacgatgctgttgagtttgagctgcatgttcaggaaccctacttcactcaactcagagccggagtcaagaaggttgaagggagattagcgactggtaactacaaccggattacacaaggttctttgctgctattcaataaatgcctcttgcttaacgttgaggcagttaggaagtacaattcattctctgagatgctgaaaggagagaaaatctcaaatgttcttcctggtatttcatcaattgtagaaggtgtgaaagtatataggaaattctatgcagaggaaaaggagaactcttatggagttttagcgatatcagtttcaaagccaacatctcaaccttacataaccatgaataatatccttgctggattggggtatgatggactgggtagactccttggtatggcgaaaacaactggaactgttccagatggactacctcctccaagatctgcactgctgtcatcttgtatgggactggttcaaccaaatgagtaggaaaggatggtggggcagctttaatgggagtggtaaagataaagtccaccttgatacgccggagtccagagttcgagacttctgtcgtgatctatttcattgttgtgttgcttgtcttcagattcaagcaagaaccaagctgcatctgaaaccattgagtctttgctgcgtgtgtgttgttggatgaatgttcatctgactcaaccctatggtcctgtttttgaaatccgcgtgcatgaaggttatggtgccagatggtctcaagatggttcaaaggtatgagtttcatatttcttagattactaggtcagtgcccgtgcgttgcaacggaatcatataataccacgataacttatgaacaaatgtgtattatactgtgatg

SEQ ID NO: 91160 - DNA, 1623 bp, Zea Mays
cttgctctaaattctaaaataacgcaaacggtaccagcaagcagcaagcctctctccattttcttcgccggcggcaggtgcacacatcggggaatggcgacctacgaccatgccgccaccccgacaccgcagtctccgggcgtcggcggcgtacccttctcgtcctgcatcggcgacctcctccgcttcgtcctctcctcccacgccgccgcctaccccggtgacgacacggtcgctttccccctctcgccctcctactgcgcccgcctcctcaacgacggcgaactgttcgagaagctggaggcctgtattcagcagtgcctcgaggaggggcggctcccggggccgcccgcggtggttgggattccggctgaggaggaggggccggaggagagagggtggaagctgctgctgccggagaaaggcgctgagttgaagcggatgtacgatgctgttgagtttgagctgcatgttcaggaaccctacttcactcaactcagagccggagtcaagaaggttgaagggagattagcgactggtaactacaaccggattacacaaggttctttgctgctattcaataaatgcctcttgcttaacgttgaggcagttaggaagtacaattcattctctgagatgctgaaaggagagaaaatctcaaatgttcttcctggtatttcatcaattgtagaaggtgtgaaagtatataggaaattctatgcagaggaaaaggagaactcttatggagttttagcgatatcagtttcaaagccaacatctcaaccttacataaccatgaataatatccttgctggattggggtatgatggactgggtagactccttggtatggcgaaaacaactggaactgttccagatggactacctcctccaagatctgcactgctgtcatcttgtatgggactggttcaaccaaatgagtaggaaaggatggtggggcagctttaatgggagtggtaaagataaagtccaccttgatacgccggagtccagagttcgagacttctgtcgtgatctatttcattgttgtgttgcttgtcttcagattcaagcaagaaccaagctgcatctgaaaccattgagtctttgctgcgtgtgtgttgttggatgaatgttcatctgactcaaccctatggtcctgtttttgaaatccgcgtgcatgaaggttatggtgccagatggtctcaagatggttcaaagttcattggattcttggagccctacaccccagaaggctatgctaagggatggaaacactagcaccagctgcctagtagatcttgatctgtattagcgactctatcagggttcatctgcatatcttctgaaggcctacatgttctgttgaatcgaaagagacgatcatgtgttacgtcagctgcctgcctaagatcatgtgttgcatgaccactgttttatttctgaatatgttctttttttttgcaaggcgtatatcgacaccaagtactgatatatgcgtctgaatatgttctacttttattcaaacacacccgccaagatcagttcatagttttgcacaaagacatgcaaatgcaattggacacaacccaaatagaaaggtattttttgtttcaatccaaa

SEQ ID NO: 91161 - DNA, 1477 bp, Zea Mays
gaccacaagttctaatcgcggcggcggactcgccccgtccggccgcccctctcagggatgatttggtgattagggatccctaggggatccacgggggaggaattcccttgcaattcaattttgaatagcaagaggatttcttcccctcgggatccccggtcaccaaattagccctcacgctctcgctgtctcgcttcctggccgcgaagctccagttcagtctccgccactcgtgctctcgtagcgtagagcgaggccagggcgggaccagcgtggccggcgagaggggatggcgggctcggccgcgtactctgcttccgctaccaccgtggtggcgatggccaagggcaacggcaacagcaagggcgtcagaggcggcggctccgcgggcaccaacaaggtgacacgacctcctaggattacatctaatgttaagcagaacttgaggattctaaaattttggaaggaatttgaaaggaggcaaacaagtggacctcagcctgctactaggtaccgcaaaaagaaagtaataaaagaagtgcttcctgatgacacagacttctacgaggatccttcttccactcttcacttgacaaatgagggtttggaaattgcttcaccagttattctcgtggatggctacaatgtatgtggttactggggaaagcttaagaaggatttcatgaatgggagacaagaaattgctagacaaacactcattgatgagctggtatctttcagtgcagtaagagaggtaaaagttgtagtggtatttgatgctgccaattcagggctttccacacataaggaaacatataaaggggtcgatgttgtatattctgccgacttatctgctgattcttggattgagaaggaggttgaagctttggtggcagatggctgcccaaaagtgtgggtagtaacatccgatgcactggagcaacaattagctcatggagaaggtgctcttatctggagctctaaaagattggtcaaagagctaaaggaatcggagaaggaactcgatctagaactgaaggaaaccaggtcgacatcgttgcaaggaaaactcctgcagcacaagctgaacccaaaggttgtgcgcgcactgaaaggtcttaggaacaagcttgaagaacaagagcggggaaagaagtgaacaggaaccactggttgacaggaaagagagcaggtgtacagaagtggcgtttgtgcggccgacggacatcaactaacactggaggctggatccactgaaagtttgatgcgaacatcatgtaaatggatctggcttccttttgggtgcagtcagtttggtgtaggcaccatcagagccctgtgaaaaatagaagcactcacgcatggtagcagcttgttattgttgttagctgctgacgctttgaggcatgtcaacaagtagagatggattgcaaatcctaatcaatgtatattactttgtgtgtgttgttattgcgat

SEQ ID NO: 91162 - DNA, 219 bp, Zea Mays
atgcgcgagctcctccttcaaccagggcggcgcatggaaaaggatgtggccacagtcgaggccgcagtcgcggtaccggggcggcaactggacgtgcgggtggccacgctcgtcaggatgctcatttccaagggcagggccgcgatgcttgccgaggccctggacgagttcgacgccatctgcatccgcctgctgccactgcgtgtgcccttatattag

SEQ ID NO: 91163 - DNA, 1618 bp, Zea Mays
caggcagcatctattccaaacagacccacaaaagaaccagggcgggttggaattttattcttcatccagttccaaccgcaaagtttgaaagaattcagatggacaacacaggaaacctcaaactgaacgtacactcaggaagtgagaggatgttcagacaatgcaaaacaacagagcaccataagctaaaggcaagagcttaaccagcgctaagggtgtgggtatcaggtcgacgacgatccccgcatcttctgcttcgctgcgtttcgtgaaaggtaacagcagcgccccccagcagtcctgcaacaatgttgtcatcgtcgtcgtcctcctcctcctccttcttgaggcgggtggttccaccctctttgcttatgggcagcttcatgttgccgaagggagtgtcgacatcgatctttcccttgatggtgtatcccgtgcccctccccctgatcatgtcccagacagcggatccgaagtccttgggcctgaagctgaagggcacctgcatcctggtgatcccctgcttctcgatcttggcggtctgtgtgagctcggcggaggcgatgctgtcgtcgccgagccacatctcgtactcgagcaggttgaggccgaggtcgaagtcgttcttgttctcgagcttgaggtggagcgtggcggtggtctcctcgaaggagaagtggtggaacttgatcttctccacgtcgacgtcgggcttgtaagggatggggatctcgccgtccttctggatcgggatcttgacgcggccgatgatggggacgtcgacgaggagcacgacgcggacgaggtaggggatgatgctgcccggctggatgtccttgtaggtgctcttgatgtcgtcgaagacgagcgacaccgggatcttgacggtctcctggccgtgcgcgtggatggtgccggcgtccgggatgaggcccgacaccagcttgcggccgtcgctgtcgatgaggtagtcgatgtccacgagcgggatcgggaccgggttcgggttcttgatgagcacgtccacgacgaggtcggcgcggtggaggctgatgtgcgggatgtggatgccgcacacgtcggccgtgggcttgccgaacccgacgacctcctcgatcttctcgccgatgtcgtggatgaagtccttcaccttgtcgatgaagccgccgccgccctgctccttgtcgccgccgtcctcgtgcttgtccttgcctccgcgctcggtcaccgtcaccgtggggtcgttctccgccgacgacgacatgcttgctctgctagactgttactctgctagagagaggtgggagcaaagccaagaacgcgagcaagcgtgcgtgagatacatacagatcgggagggaattccagttccagatcggtgggcgagatctgaagcgcgagatgctgagaggagcagaggggaggagtggtggttgacctgagggcgatccgaacgcggacgaagcgagtggaaaccgcgtgccgtgcacccgtgcctgcgggaaaggaggccggtggtcggtgggggactgggggaggtcgaggttgaggctggcactgcccacagccttgtaggctcgcagctcactggagagttgatggctgacagagacaac

SEQ ID NO: 91164 - DNA, 976 bp, Zea Mays
gtggcgtcctatccttatctatcgagtggacgcgacgccaacagcgtcagcgcctcctcccgctctccggctcctgtcctgctcgcgctcgtcgcccccctgccgctcggctccccttggcccctccaatgccgccacccatggcactgctgccgctctcctccgcatccgcgtccgccgcgctgccgcccttccgctcctgcccgcccgctgcgatgctgcttcgcctcccctcccccgccccctcccatttcgcccgcccccgcgcggtctccactgggtacgcggcgtccttctacggcggctcggcgatgtccgcggccggcggcgcggacgaggaggaggaggtcggctacgagtcggggttcggcccggggctagggctgggcggcggcggcctcgggatgtcggccgcggaagccgcgctggcgctggaggagcgcgagatgccgccctgcccacccggcctccgccagtacgagaccatggtcgtgctccgccccgacatgtccgaggaggagcgcctcgccttcatccagcgctacgaggagctgctcgtcgccggcggcgccatgtacgtggaggtcttcaaccgcggtgtcatcccgctggcatacagcatcaggaagaggaacagccgcaccgggctgccgtccacctactacgacggcatctacctcctcatcacctacttcaccaagccggagtccatggacgccctgcagcttaagctcaacgccgacgacgacgtcatccgctccaccagcttcaaggtccgccagcggaaggccgtctagttagacgggttgcctcctccgccttcaggccctgaacactgttttgttcacataccatactacaagaaatctgctgtacaagaatccacctttgccatgattgttgagttttttttttttgaatatgtttcttgtcttgtggttctcgaaaatggacgtccggccatcgttcgccagag

SEQ ID NO: 91165 - DNA, 289 bp, Zea Mays
atggatgcccttctcgaccttcaagctcgtgtcggtgcgggcggcatcgggttccccgcggccgatcgatcctacctcggcaggcagcacatccccaccaaaggggtcgtgggcatcgacgacgtggacagcgaggcctacgtctcgcagttcttcgtcgatggctcgttgttcatcgctggattttgggtaggtaagcgcgtcagagtctacgacgccgagaaaggatggaagacccattaggatataagctgcaaaagtgtgcactagatggttcctgacacgcccg

SEQ ID NO: 91166 - DNA, 103 bp, Zea Mays
ctctaaagttggctatagctcactagaaaccaagttccgttctctgaattttatagaatcagccaatgttgcctccttgcatacctccctatttagctgcctg

SEQ ID NO: 91167 - DNA, 207 bp, Zea Mays
atggccgtgcagccgcgcgccccaaccacagtctgccttcattgccgctgttgctcggccgctgtgggcgagcccggccaccggtgccgcagcccctacatgatctgcccctttgctggcaacctccctcgcctagatgtctggcgcgtccgtcgctccaggaagaagaaagcctatgcgaagaccatctttctagttggaaactaa

SEQ ID NO: 91168 - DNA, 660 bp, Zea Mays
atgggctgctttccccttgcagtggcttcagtggtaggcgatggagtctcaacattattctggagagagagttggctgcaagaccgaaacttggagcaacttgcaactagcctttttggtagggttccagcgaggattaagaacaagaggacactgtgggatgtgttggcagtattcaaccttcaaccatggactgcagatcgacacatttggaggttatccaacactggacagtactccacaaagttagccaatgaagctctgttcaggggggctatccactttggagacaaacatgctacataccctcataagaatatgaatattgaggaggaacccacaaacaaagaagatcatatattgaatgtgtcacatacagaaggtcatgaaaaccttttgatttcgccaggagacaaacatggtacatcccttcgtgaggatgtgaatattgaggaggaacccacaatcaaagaagatcatatattgaatgtgtcacatatagacggtcataaaaaccttttgatttcgccaggagacaaatatgctacattccctcatgaggatgtgaatattgtggaggaacccacaatcataaaacctttttacagtttatggctgaaaatgatatgtctactggtgttatcttatatgatgacgtaa

SEQ ID NO: 91169 - DNA, 2029 bp, Zea Mays
cggtgacgcgctccgcccaccgcccaccgccgcccgggaatggctcgagcgctgctcctgctgcgagtagctgtagctcgctaccctcctctcccggcctcacccgcgctcctccagccgcagccgctgctgcgctgccacgcgccctcccagtacaaatcccagctccgcttcctctcctccctctcctcgtccgtgcccaacagctcagatgctcccagcgacggcgggggcgaccgcgacggggaagaagatggcgcgaagagtggcagccacgtcgattacttggggatgagcgacgaggagctcatggagcagtgcgatatgggcacgttcaaggcgtccggccccggcggccagcactgcaacaagcgcgagtccgccgtccggctgaaacaccttcccatcggcatcatcgcccaggctgtggaggatcgatcacaacataagaaccgagcgtctgctttatctcggcttcgaaccctgattgctcttaaagttaggaggccgataaacctggaagactacactccacctgttgagcttcttcagatattacccctgaagtccagcgttagaggaaatgatgttggcccccaaatcggtccaaataactcaaaattttctccaggaatgcaagcattattagacctgctgtttgctgttgaagattctgtatcagatgcagcaaagattttaggcctaagcaccggtgctttgtcaagattgattctgtcagatgattctctccgaacggccgcgaatgaactgcgagcttcgaagtgtttctttgattgcagggcaccggtgctgtactacgtgctcctgacgttgcaggacagcgtgcacaaggtcttctacgccgtcgtcgaggccgctgcagttcgcgcagacaacagccatcttggagggttggcgaggtatccggtctctgcaactcttccacagattggatccagattattccttacatggggtgtcttctggagttttcctgagatggccccattcacctctaccaacaggtatctaattccaatattgtatgtctcggttgaacttgtgaaggcgttgcaagcacatatcattaactgggatattcatatgtttgatgaggagatcggcaataccactcaggtgcacacatcaaacttgaatgagccaatgaggaccttggccgggttcatacaattttgtctgataaaaccgggtggcaagtttgaccatgcagatcgtttgttccaaagcattgagaacgcttacataaatagcttatcaaatacaagtgacgtcaaagagcttattccagaattcttttacatgcccgagtttcttgaaaattcaaattcatatcatcttggtgtcaagcaggatggggaacctataggcgatgttgctctccctccatgggcaaaggatgataactcaagtgacgagtttgacaaagattctattgagagtgatgatagatctcttgaagagctaagctgggagacactagaacttcttgtggtacctcatatattcaggtatccaagctctgtgctaccgattaattgctgaaaactgaacttgggttcatgttaaatattcccaaggaaatataattgggcaacggtgtgtgtatatgttcagattcagaaagtgaggacaatatagcgtttgcagcagtggtcgtcgccctgtgcagggagggcctgctgatcagagatcaagagggaaagcagaagacacgttgtgccgggaggaaacacacgacgaagtagagacttagaagcaataagctaaatatttagacaactttaattcgagcactccaagaggtgtctcaaacaactggttaattcgttttatgaccaaaagaggaaaaatggccatctaatagttttgtaaaacaactccctaaagataagcacttgcttaatctccccctcaactcgccaacatgtgtgtgccttctgcgcttgctatttgcttgggtagttttgtaaaacaactccctaaagataagcacttgcataatctcccc

SEQ ID NO: 91170 - DNA, 2991 bp, Zea Mays
atgactgtatcctatcgtccccaagagtttgttcgcgtgattccgcctctgattgggtcgtggatcagcagggggccaagcatgatggaggtgggtttgaacccgggggaggagctggacttcggggacaaccaggaggacgacgacgacgcgggggacatctcacccgccagcaaggagctggccgccatggtggcggcggcggcggcggcggagacagtcgagcttgacgacggcggcgccggtgtcgaggcggccgcctccgctgccgccgccgcgtcgtcgtcgtcagcggcggcgcggtacggggacgaccgcacgccgcgggacgggatggtgttcaagtcctacgaggaggtgctcaacttctacaagcgctatgccctgcgcacgggcttcggcgtctgcgtcaagaagtcctccttcaccaaggccggcctctgccgccgcctcgtcctcgtctgcaacaagtggggcaacggcaaggaggacgcctgctaccaggccaggcccacggccaagaccaactgccaggccaccgtcgtcgccagactcctgggggacgacttgctgcacctcacggatgtgaacctggagcacaaccacgcgctcaacccatccgccgcacgcttcctcaggtgctacaagacgctgcctagcgggttgagcaaagatctcgtggtgagggctgccagaggggaatgctcggtggcgggtgacatcgatgtcccgatatttgatgaatgggggcggcttaagaccgggcaagctgatgtcctggccatcaacgctttcttcacccagatgcaggcaaagcttccaaactccttctatgtcatggacttctatgtggagggccatctgaggagtgttctctgggctgattccagatccagggcagcgtatcagtatttcagcgacgctgtttggattgatacggcatgcttaaggaacaagtatcatgtcccgcttgtttcgtttctgggtgtcaatcatcatggtcagcttgtattgctaggctgtggattgctgtcagatgagagcacagagagcttcttgtggctgttcaagtcatggttaacttgtatgaagggacagcctccaaatgccatagttaccgatgaatgtgtggcgataaaagccgcagttcgagaagtgtttccgaagacacgccatagaataagtgattggcatgtagtgagaagtatttcagaaaaaataggtgacttgccagaatatgaagcgatgagaaccaatttggttactgtaatatatgattctttaaacgacaatgagtttgaggcaaggtggaagaactggattgatagatttagccttcaggataatgaatggatcacctttctgtatgagaatcggcacttgtgggcccctgccttccttagggacactttctcagctgggctctgtactgttagccagcgtgaaagtccaagtacattttttgaggatgcagtcagttcagagaccacattggtgacgttccttgccagctacatgacacttttggataacaaatacaaaatggagcaacaagatgattttgattcattaaatagcagcaggctcctgatatcaaagtaccaaatggaagaacagctatccagattgtacaccttgaatatgtttatgaagttccaggatgagctaaaggcaaccatgcattgtcaagttcagctggatgggtcagcatcttcttttatagttattgatttgactgaagcagggagtgaaatgctgaataaaaagtacgaggttgttcactgcatggcgacaaacaggatggagtgtaactgtggcctatttcagtttcatggtatcgtttgtcggcatgcattatctgtgcttaaatggcagcaagtatacgacatccccccttgctatgtacttaacaggtggcgggctgacttcaagcagttgcactacctagataatccatcaaaggatttagcaacaagtaatcatgtcgagcgttatgattatatttctttgcagtttcttcgtctcgtcgagattgggatggtatccgacgagaagtataggcatgcagtaaggcttcttaaagacatgaaagagactcttcttgatgataatctgtgccgtgatttggagcagaagcttacaccagctgagcgtgcaattgtgaatggtgacaaccatacacaacctggttcatctgagggcggtgctgcaaaaaagcggcgaggccgtcctcctaaaaagaataaagagataaacatggattccatggtaaacccgtatggaaataaggaccctttactagtatcctcggatgtaactcagaaggacacttttcattctgcttcaactacctcaaaccttggcactcatgtccggacgcatggcattgttgatctcatggaagaagtcaatccaagcgagctgtcatttgatagccgttacggggtgcaatctggccactcgcaccattttggtaataaccaactaaatacaggaaacacactgcggtttggccaatctacatcagcagcagagcagtctagggttcagtgggtgtttcataatggcatgtatcaggatgaccaagtgacttacggcagacggacatcataacaattggacttgttaggctccagggtttgccgtttcaggaaatcgggtcaggggtcctcggtttttggactttggagcaccgatgacttaagtgatcctccattgtgcttcgaacgttgagccttgggagatgcatgctggaactggctgctggtgatggtggcggcggcggcatctgaaggcaggatacactgtagaaacagaagtttgccactaagccagccgaacgcttccataagccatcaatgttagccaactaactgacatgtgtatatacacacacatcatctcagaaagaagccgtcattccgtgggaagtgctgcgtaaactcctgataataggcgtggtcagcgtcggacaagaaattgagagcttca

SEQ ID NO: 91171 - DNA, 3145 bp, Zea Mays
atgactgtatcctatcgtccccaagagtttgttcgcgtgattccgcctctgattgggtcgtggatcagcagggggccaagcatgatggaggtgggtttgaacccgggggaggagctggacttcggggacaaccaggaggacgacgacgacgcgggggacatctcacccgccagcaaggagctggccgccatggtggcggcggcggcggcggcggagacagtcgagcttgacgacggcggcgccggtgtcgaggcggccgcctccgctgccgccgccgcgtcgtcgtcgtcagcggcggcgcggtacggggacgaccgcacgccgcgggacgggatggtgttcaagtcctacgaggaggtgctcaacttctacaagcgctatgccctgcgcacgggcttcggcgtctgcgtcaagaagtcctccttcaccaaggccggcctctgccgccgcctcgtcctcgtctgcaacaagtggggcaacggcaaggaggacgcctgctaccaggccaggcccacggccaagaccaactgccaggccaccgtcgtcgccagactcctgggggacgacttgctgcacctcacggatgtgaacctggagcacaaccacgcgctcaacccatccgccgcacgcttcctcaggtgctacaagacgctgcctagcgggttgagcaaagatctcgtggtgagggctgccagaggggaatgctcggtggcgggtgacatcgatgtcccgatatttgatgaatgggggcggcttaagaccgggcaagctgatgtcctggccatcaacgctttcttcacccagatgcaggcaaagcttccaaactccttctatgtcatggacttctatgtggagggccatctgaggagtgttctctgggctgattccagatccagggcagcgtatcagtatttcagcgacgctgtttggattgatacggcatgcttaaggaacaagtatcatgtcccgcttgtttcgtttctgggtgtcaatcatcatggtcagcttgtattgctaggctgtggattgctgtcagatgagagcacagagagcttcttgtggctgttcaagtcatggttaacttgtatgaagggacagcctccaaatgccatagttaccgatgaatgtgtggcgataaaagccgcagttcgagaagtgtttccgaagacacgccatagaataagtgattggcatgtagtgagaagtatttcagaaaaaataggtgacttgccagaatatgaagcgatgagaaccaatttggttactgtaatatatgattctttaaacgacaatgagtttgaggcaaggtggaagaactggattgatagatttagccttcaggataatgaatggatcacctttctgtatgagaatcggcacttgtgggcccctgccttccttagggacactttctcagctgggctctgtactgttagccagcgtgaaagtccaagtacattttttgaggatgcagtcagttcagagaccacattggtgacgttccttgccagctacatgacacttttggataacaaatacaaaatggagcaacaagatgattttgattcattaaatagcagcaggctcctgatatcaaagtaccaaatggaagaacagctatccagattgtacaccttgaatatgtttatgaagttccaggatgagctaaaggcaaccatgcattgtcaagttcagctggatgggtcagcatcttcttttatagttattgatttgactgaagcagggagtgaaatgctgaataaaaagtacgaggttgttcactgcatggcgacaaacaggatggagtgtaactgtggcctatttcagtttcatggtatcgtttgtcggcatgcattatctgtgcttaaatggcagcaagtatacgacatccccccttgctatgtacttaacaggtggcgggctgacttcaagcagttgcactacctagataatccatcaaaggatttagcaacaagtaatcatgtcgagcgttatgattatatttctttgcagtttcttcgtctcgtcgagattgggatggtatccgacgagaagtataggcatgcagtaaggcttcttaaagacatgaaagagactcttcttgatgataatctgtgccgtgatttggagcagaagcttacaccagctgagcgtgcaattgtgaatggtgacaaccatacacaacctggttcatctgagggcggtgctgcaaaaaagcggcgaggccgtcctcctaaaaagaataaagagataaacatggattccatggaccctttactagtatcctcggatgtaactcagaaggacacttttcattctgcttcaactacctcaaaccttggcactcatgtccggacgcatggcattgttgatctcatggaagaagtcaatccaagcgagctgtcatttgatagccgttacggggtgcaatctggccactcgcaccattttggtaataaccaactaaatacaggaaacacactgcggtttggccaatctacatcagcagcagagcagtctagggttcagtgggtgtttcataatggcatgtatcaggatgaccaagtgacttacggcagacggacatcataacaattggacttgttaggctccagggtttgccgtttcaggaaatcgggtcaggggtcctcggtttttggactttggagcaccgatgacttaagtgatcctccattgtgcttcgaacgttgagccttgggagatgcatgctggaactggctgctggtgatggtggcggcggcggcatctgaaggcaggatacactgtagaaacagaagtttgccactaagccagccgaacgcttccataagccatcaatgttagccaactaactgacatgtgtatatacacacacatcatctcagaaagaagccgtcattccgtgggaagtgctgcgtaaactcctgataataggcgtggtcagcgtcggacaagaaattgagagcttcattttctttctttcacgtgggaaagatacaattttgttgcctcctgacgatcagctaaaagggggaggaaatatccatgctcttcatctgggaaagatgcaaaaaccatccagctttatcatctttgctccttcagtaccgtgcctggaatcctgctttaccaatttttagcaccc

SEQ ID NO: 91172 - DNA, 1005 bp, Zea Mays
atggccgatatgcgacgagcacaacatcgaccacaccggaaagtacgccggcgactccgacctccagctcgagcgctccgggctggtggcgtcgccggcaagcgcaagaaggccgccacgagcggcaagcccaagcgaccgccctccgccttcttcgtcttcataagctggagcgggctgccactggcaactctacgagagaagctgcccaggttcctgcagaagtgcgcttcgagtctgaccccctccgcccatggttctgtcgcctccagatctcttgagatggcaggggaggaggagaggaagcaggtgctcctctcgtacgttgtccccacagtctcctcgtggaacactacaacctccagtactacgggttctggttccagaatgggacacaagcgaagtagaagcgtgtgggctagatcagcggaggaagaagattgccgccccaaccgcgtctatctttggtttgttgttgtttttacttcaagagtctacacaacaatactccaagatctaggtactgattttctaattaatggtcaaatggcaaagagggaggcaaccgtggtggaccggacacgatctccatggaggaatcatctttcgaacggtgagtggaagaggatggatccggtgtgtccacggaagcctgaaaaaggtccaggcacagtgaagaaaaaagttctggtgcgtccatgcccacctagaatcttgcaaacaaagaagccaggagtagagcagtcacctgaaaaattgctcataactaattgtcgggcggccaacagggttcggaagagggtgtccacgtgcgcagcaagttgggattcagagaaatcaccatacgagacacttggtaaggggtttcgatcggagatggtggcggcggcggccgcacatagagccagcttcccgttgcgtctgcagcagatccttgctggaagctgcaccgtctcacctgtggtcaaggtcgagtctgagccggctcttgggagcaaatattaa

SEQ ID NO: 91173 - DNA, 2918 bp, Zea Mays
gcggccgcgttcgctgcctgcgccaccacaccattggcgacggcacgcgccctccctcccttccagggaagcctcctcgctcgcttcgggggcgtctccgcggccatatcttcctctttctgctcggcttcctcgtcaccgcccccctcctcgccgtccactggtgccgagccggcgcgggtggagatccgttcgctttggatcgacttcttcgtgtttgggttgaagccgctcgatttgctcaccagaaattcagattttcgagtggaattcgcttaatatagcaatgcactagggtttactgtgcaccactaggctactgcctctgctattaggaagccgacatctgttgtttccgaagtctttcaagtctctgttgggtggcgttgctattgtgggtgtgataacatgataaagcaatttcttggacgtctccccaagaagccatccaaatctggagataaggatcctattggccggcccagcccctcggtgtcgcaccagccattgggtccgagagctggagacagggccaccaacttgagtagccatccaccggttatctccagctctgggctcagttatgggagtggcatgcatgtcggcaatgcatacacgaaggcacacgtgaacggtgattcggccgcttcagcatttcggtcgttgccgagcttcaaggacgtgcccaacacagagaaacagaacttgtttaatgagaagttgaacttgtgctgcgcccaatttgacttcaccgatccaacaaagaacataaaggagaaggagataaagaggcaaactttggtggagctcgttgactatattgcctcggccagtgggaaattttctgaggcaagcatgcaagagatcacaaaaatggtttctgcaaacctgttcaggacgctgagtactcctcctagagacaacaaagtggatggctttgatgtggatgaggaggagcctgtcatggaccctgcatggccacacttgcagattgtctatgagttgttcttgagattcattcagtctcaagagacagacgccaagttggctaaacggtacattgatcattcgtttgttctgaggctacttgacctctttgattcagaagaccctagggagagagagtacctcaagatgatacttcaccgtgtctatggaaagttcatggttcatcggccctatattcggaaagccattaacaacattttctatcagttcatctatgaaactgaaaaacacaatggaatcgcagagttattggagattttgggaagtatcatcaatgggtttgcattgccacttaaggaagagcataaattgttccttgttcgagctttaattccacttcacaagccaaagtgcatcgcgatgtatcatcagcaattatcttactgtatcacccagtttgtcgaaaaagattgcaaacttgcagatacagttatcagaggcctgctaaaatattggccaatcactaatagctccaaggaggtgctgtttctgggggagttggaagagatattggaagctacgcaacctgcagagtttcagaaatgcatggtccctctcttccgccagatcgcacgttgcctgaatagctcacactttcaggttgctgagcgggcgctatttttgtggaataacgaccacatcgagagtctgatcaaacaaaacagcagggttatattgcctatcatctttcctgcactggagagaaatgccagtgggcactggaaccaagctgtgcaaagcctcactctaaacgtccgaaaactgttctctgacaatgaccctggactattcacggagagtctgcggaaatacgaggaagagaaagcgagagagaaggaggttaagtcgaagcaagaggccacatggagacgccttgaagagatggcatcagcgaaagcgacaagcggcgcggcagttctcgtctctcgacccttatcccggcagtcttcggctgtgtagcgaattttcatgtggtggtcgtgagaacattgtacaggattgagttgtatatacgaggtatattaaggtgggcaaattgacaaatgatatcgtcggagaagccagccagatgggttacagggctaggcacacatcattttcttggtcccgaatctgggcttctgctaagatctacagctggtcgcggtatcatcattatgtttatccttgtcaggagttggctatgattcaattgttttcacctgctggtcctgcagtcttgccatgcatgggtatctgtttctggagacaaaaaatcggtggaagtcgatagaacttagagcctggaaacgagtcgtgctgttgttcttggagtctggaattgttgcgtttctttctagtacaattcatgtgttgtcatcattagaagttaaatcctttgtgctcatcatcatcatacgtatgtggatccaattataaatgcctgataaatggttaagggttcacgatgaagatgacatggattcgtcacgcatgcagctctacttattgtaattggaacgtgcattctgattgtctcaaaatcacggcttcccctggcgggctttcatggccagcaggtccttgaacgctgggcggcagtagccgtcgccactgaagaacatgccggcgacgaccttgtacatggcctccgtcatgtggacgccgtcccagttgacgtactcggcggggcgcgcgcaggccgtggtgacctgcggcgagccgcaggtggcgaagaggtcgaagttgtaggcgccgccgccggagccgcagcaggtgcggaagggctcggcgaagccgtggcgcgcggggctccgcatcacggcgaggtgcgcggcgtagtagtcggcgtacgcgaggacggcggccgggtggcggcggcgcagcgcgcggagggccgccaggaggcggcggttgtgcgcgtagctctg

SEQ ID NO: 91174 - DNA, 2463 bp, Zea Mays
ggccgcgttcgctgcctgcgccaccacaccattggcgacggcacgcgccctccctcccttccagggaagcctcctcgctcgcttcgggggcgtctccgcggccatatcttcctctttctgctcggcttcctcgtcaccgcccccctcctcgccgtccactggtgccgagccggcgcgggtggagatccgttcgctttggatcgacttcttcgtgtttgggttgaagccgctcgatttgctcaccagaaattcagattttcgagtggaattcgcttaatatagcaatgcactagggtttactgtgcaccactaggctactgcctctgctattaggaagccgacatctgttgtttccgaagtctttcaagtctctgttgggtggcgttgctattgtgggtgtgataacatgataaagcaatttcttggacgtctccccaagaagccatccaaatctggagataaggatcctattggccggcccagcccctcggtgtcgcaccagccattgggtccgagagctggagacagggccaccaacttgagtagccatccaccggttatctccagctctgggctcagttatgggagtggcatgcatgtcggcaatgcatacacgaaggcacacgtgaacggtgattcggccgcttcagcatttcggtcgttgccgagcttcaaggacgtgcccaacacagagaaacagaacttgtttaatgagaagttgaacttgtgctgcgcccaatttgacttcaccgatccaacaaagaacataaaggagaaggagataaagaggcaaactttggtggagctcgttgactatattgcctcggccagtgggaaattttctgaggcaagcatgcaagagatcacaaaaatggtttctgcaaacctgttcaggacgctgagtactcctcctagagacaacaaagtggatggctttgatgtggatgaggaggagcctgtcatggaccctgcatggccacacttgcagattgtctatgagttgttcttgagattcattcagtctcaagagacagacgccaagttggctaaacggtacattgatcattcgtttgttctgaggctacttgacctctttgattcagaagaccctagggagagagagtacctcaagatgatacttcaccgtgtctatggaaagttcatggttcatcggccctatattcggaaagccattaacaacattttctatcagttcatctatgaaactgaaaaacacaatggaatcgcagagttattggagattttgggaagtatcatcaatgggtttgcattgccacttaaggaagagcataaattgttccttgttcgagctttaattccacttcacaagccaaagtgcatcgcgatgtatcatcagcaattatcttactgtatcacccagtttgtcgaaaaagattgcaaacttgcagatacagttatcagaggcctgctaaaatattggccaatcactaatagctccaaggaggtgctgtttctgggggagttggaagagatattggaagctacgcaacctgcagagtttcagaaatgcatggtccctctcttccgccagatcgcacgttgcctgaatagctcacactttcaggttgctgagcgggcgctatttttgtggaataacgaccacatcgagagtctgatcaaacaaaacagcagggttatattgcctatcatctttcctgcactggagagaaatgccagtgggcactggaaccaagctgtgcaaagcctcactctaaacgtccgaaaactgttctctgacaatgaccctggactattcacggagagtctgcggaaatacgaggaagagaaagcgagagagaaggaggttaagtcgaagcaagaggccacatggagacgccttgaagagatggcatcagcgaaagcgacaagcggcgcggcagttctcgtctctcgacccttatcccggcagtcttcggctgtgtagcgaattttcatgtggtaatcagaccgatgcgcctctctttgttagattccaagtctgggcagagtgctttctaacagatgaatctctctcaaatttctaggtggtcgtgagaacattgtacaggattgagttgtatatacgaggtatattaaggtgggcaaattgacaaatgatatcgtcggagaagccagccagatgggttacagggctaggcacacatcattttcttggtcccgaatctgggcttctgctaagatctacagctggtcgcggtatcatcattatgtttatccttgtcaggagttggctatgattcaattgttttcacctgctggtcctgcagtcttgccatgcatgggtatctgtttctggagacaaaaaatcggtggaagtcgatagaacttagagcctggaaacgagtcgtgctgttgttcttggagtctggaattgttgcgtttctttctagtacaattcatgtgttgtcatcattagaagtt

SEQ ID NO: 91175 - DNA, 1141 bp, Zea Mays
cagtcgccggctgattttttttccttcagcagccgcaagctctagcttcattcttcctctgtgcgctgatcgatccttatcccgccgcccttccctgagatttttcaggcgccaccgcccttgggctcctacaaatctcctctgccggtgctccaattcacgaaatcgcgttcctgttcttcccagctgagttctagccatggtgccggtcgagttcctccccagcttcttcttctagctcgcccagccgaagttccatggcgctcctctctgccggcgttctccccagccgcgctctggcgtccacctccgctcggccgcgcgctccctccctgcccagattgcagacctccctctgctcgcgcgcatggccgtggagggccaaatccacactgcgctcgccgaatctcacctctctctgctcacctgtgccgttgcccagctcgcggcgctctctccctggcgcgctcgtccgcccctgctccactgcgccgagcagttcccagccgagctcctatccagccatgccgcgccctccctactccctcctgcaactcggtgcctctcccagctcgctggtcgtcgagtccttcttctccccagcgcatggatcaagttgttgcccccagccatgtcttcatctccctcaactgacactttctgctcggccacctgccatggagctcgccctgcccctgtttccatgaccggcgtccccaagctcctcccctgtgcgtcgcgattttccctggcgcagctcgctccctgttcgccgcgtgctctgggatcctccctgaaccgcgccatggcgacgttggaccggtcgttccctgcgcgccaacttccctgtgcgcgcctctgttcctcgtcgtggtggggtcgtggtgtggcaacgtcgtgtgcatcgcgacagccgtcctgaccgcaaagcagtccgcgcaataaagttcgtccggccgcgacctcgctttgctctactagatcaggaggcgcacttcgtgcgccttgcagtaatcatggctattatgaggcaagtggtttgtggatcaattctttttattataaccagaacctgcagactctgaatgatatattctttttttctctcagcacacattttattaatctaagaaattactaa

SEQ ID NO: 91176 - DNA, 249 bp, Zea Mays
ctttccctccgcctggtactcggcgcaagcgcctttctcctcctcgactccgtcgccgtgatctgctacgtagcagaagggcaggcacgcgcagatcctctggctgtcctgtcggcctcttctgcagctgttccagacagtggaagcaactattagacaagccaagtttaacagtacagtacacgtgaatacttcgccctcaagtcctaaacccacacagccaacaaatacgtgtagtactcatcagat

SEQ ID NO: 91177 - DNA, 381 bp, Zea Mays
atggcctcgcaccgggcgctgctgctgctgctcctcgccgccgcgctcgtcgctgcgctggcctctgtcgcatccgccgacgacgccaacgccatgcccaccatcctgacccccgtggcgcataccccgctggggtccttcgacggcgacaagccggcctctgacgaggacgccgtcgacgacgacgaggacgccgcccctgtcggcgcgcccaacggggccaccatgactgagcccagggacgacgtccccgccccgcccggcgccgaagcaaccgcgggcggcgccgccgccagcaacgcgcccgtcgcactcgccagcgccgcggcgcgcgtctgcgccgccgccgctgtcgccgcgggagccttcgcctccttctga

SEQ ID NO: 91178 - DNA, 608 bp, Zea Mays
ttggagtgccagacaagcatatctggaaattctccccgacaggccaatactcttcaaagtcggcttatgatatgttatttcttggttccacttctttgggcgcatatgagtgcatttgggaatcttgggcaccttcaaagtgcagtttcttcctttggcttgtcatgcacaacagatgctggaccgcagaccgtcttgctagaagggtgctaccccaccccagtgtgtgccccctttgcgaccaagaagaggaaacaatacaacatcttctcatctcttgcgtctttgaacgacagttatggtattccttgttaagcaggtctgggttgcctaacctttcaccagataatgctaattgcagccttgatgactggtggagcagggctgtggagaagattccccgtgatctccaatccggcttcaattctctagttattcttggcgcttggagcctttggcgtcatcgcaacgactgtgtgtttaatgggagatcgccgagcctggcgagtgctctcaccctcgctggcgatgagctcaggatgtggtgtagtgccggggcgaaagggttgaacctgctttcaactcttatgtttatgcttgacccaggg

SEQ ID NO: 91179 - DNA, 248 bp, Zea Mays
aaaattgtactgtactcctgcagttaagctcccttttctcccaaccaaccatgccctaaagggtaccttgttggatactgcaaagaaaagaattagcttgacatgcatgttagatatgaacagagccacataagaatattattaaggaacgatccaatacattaaatcgattcaaaactatggagatgcatctagttgttatatcatccttaatgaaattcaataaacaacaacaacacttaacctcg

SEQ ID NO: 91180 - DNA, 853 bp, Zea Mays
gagactgaacctcgggcgcccgccgttatttggtagcgtaaattcgaattccacggcccaccagaatccgttctatagctactcggagaaaaacctgacgaaatggaggaacaagcgcacgcattctggctggccacacccgcaggccgcagagcaggggggtcacaacaagctgaaggtctaaccgcggagccggcggactggggcggcggagacgcggcggcggcggggcggaggtcgcggcggagtagcgtggccgggcgacgaggaagcaatcggccgcggccgcggccgcgacgggcgaggagcggaggagtgggtgagcggcgcgggacgcagaggccggccatctgaccggacgaggcggaggcggcgagcatcgcgcctgtgccggcgatccagaggctcatctcgtttgcctcgctcgctcggctcgagtatatagggagccgggaccggtagagagcgacgacgcccggcattggtgagggacaggacaggtgagctgaggtggccgtgtcgcgtcgggcggcctcgtggccttcgccaggacgtggtggtcgcatcgaggcggagcggccgcgacgggcccaccagactctgcgtcatctctcatcttctgcgccgcatgcttctgttgacaatccgtgtgcgcggctgccatttctgaacagttcttggacggttaatctattttagttagcaatttagcatctgttagtcaagctcgaagtctagtctagtggtcgaagaaaggacaaaccaggcgaccatgttattgtttaattagattaaattattagatttgtgtatcttaggccacggagggtattttatggttttctttttctaa

SEQ ID NO: 91181 - DNA, 665 bp, Zea Mays
gtcttcttccccaatttctcgcggcgtcgttccgtcccaaatatcgccccgcgatcccccacctcgccgactggctcccccgctccacctcgtcgacgggcagaggagacccctcagggccgggatcggactcctctttcaccgatttttccatgcactttaggctaaaaatgctttggtctgaaacctatctgcccttttttctggccgccaacggtttcagccaacgcataccagtgatgaagatcttccgctgaagcttgctcaagctgcaataaagcatgacggttgtgcacataatgatgcttaatcattcatgttgcgaaaccctccagtggaacttccttcttctgatgcaaccatgtataggtggacctagttttgaggtggatgcgctgagttttgaaggtggcgagggatctttgctgcggggttctatttgttctcagtgatttttggcaaacactctttggttagattaagaatcatggaaaggtacaaattgatacggaagataggtgatggaacctgtgggaatgtttttatggcttctaatgtagaaactaatgaaattgtaagtgcaagaactcaccaattgaaacattttgttcttccaagaatgtgtgtacccaatcgtctatgcatgatgttacaggctcaatttc

SEQ ID NO: 91182 - DNA, 2155 bp, Zea Mays
gtcttcttccccaatttctcgcggcgtcgttccgtcccaaatatcgccccgcgatcccccacctcgccgactggctcccccgctccacctcgtcgacgggcagaggagacccctcagggccgggatcggactcctctttcaccgcaggcaattgaactcacgcagggtatacggttaataaggccaaagtataccaatttgattgccgtgtctgtcgactgcactcgcaaccgaatcgaatgtggaaagtgcctgtctccagaggtcctttatagcctgttttaggctttgttttgcacgatttttccatgcactttaggctaaaaatgctttggtctgaaacctatctgcccttttttctggccgccaacggtttcagccaacgcataccagtgatgaagatcttccgctgaagcttgctcaagctgcaataaagcatgacggttgtgcacataatgatgcttaatcattcatgttgcgaaaccctccagtggaacttccttcttctgatgcaaccatgtataggtggacctagttttgaggtggatgcgctgagttttgaaggtggcgagggatctttgctgcggggttctatttgttctcagtgatttttggcaaacactctttggttagattaagaatcatggaaaggtacaaattgatacggaagataggtgatggaacctgtgggaatgtttttatggcttctaatgtagaaactaatgaaattgttgctgttaaaaaaatgaagagaaaattttgtcattgggaagaatgtattagtctgcgagaagtgaaggcccttcagaaactatttcaccctaacattgtgaagctgaaggaagtgacgatggaaaaccatgagctgttcttcatctttgaacacatggagtgcaatttatatgatgtcataagggaaaggcaagttgctttccctgaaagggatataaggaactttatggtccagatactgcaaggtcttgcatatatgcataataatgggtattttcaccgtgatttaaaacctgagaatttgttggtgacaaatggtattattaaaattgctgactttgggttggcaagagaaatatcttccaatcctccttacactgattatgtttccaccagatggtatcgggctccagaggttctactgcaatcttcagtttatacacctgctattgacatgtgggcggttggtgctattttggctgagctttttacactgtccccactttttcctggtgaaagtgaaactgaccagctttacaaaatatgcactgtgcttgggacccctgattgcactatttggccagagggaatgaacctgcctcgttcatgcagctttaagttttttcagaatcctccaagaaacttatgggagcttattcctaatgcttcatctgaagcaatcgatttgatccagcaactttgttcctgggatcctcgaaggaggccaactgctgagcaagcattacaacatcctttcttcaatgtgtgcaattgggtaccaagacctgtacatgatgcttaccatacaaaaacaaacggacctaaagctgaaccaagattggaactgaacctgtgggatttcagcacagaacctgatgattgtgtccttgatttaactctcagtctgaagccaagtttttctggaacagaccttggtaagcatgttccacgacgtacagaagaggaaattctcctgtacccgggatttgagaatacccctgtgaagtccggtttttggcctctggtgccatctgatcgtcccgttggtgatgttccggccataccatcctggcagcaggcgtacatggttgacagccaaggcgcattttctggctctccgttcttgcagtcgaacctgttggagaaccgttcgttagcacctatccggcaggtgaatttcttctgacggagacaggattaacagattcatacgattcttgatacgtccagcttctcgctgtatacacactatcttgaataaagtgttgccagtagaggaaatgtatatacagttcgttcgtagctcttgagcttctttctttctagagtacctctttttttttaatcgtctgttcatattccacaccactcctatgtaaataacggcatgcatgataatctctctcccaaaaacaaacaattt

SEQ ID NO: 91183 - DNA, 1920 bp, Zea Mays
gtcttcttccccaatttctcgcggcgtcgttccgtcccaaatatcgccccgcgatcccccacctcgccgactggctcccccgctccacctcgtcgacgggcagaggagacccctcagggccgggatcggactcctctttcaccgccaacgcataccagtgatgaagatcttccgctgaagcttgctcaagctgcaataaagcatgacggttgtgcacataatgatgcttaatcattcatgttgcgaaaccctccagtggaacttccttcttctgatgcaaccatgtataggtggacctagttttgaggtggatgcgctgagttttgaaggtggcgagggatctttgctgcggggttctatttgttctcagtgatttttggcaaacactctttggttagattaagaatcatggaaaggtacaaattgatacggaagataggtgatggaacctgtgggaatgtttttatggcttctaatgtagaaactaatgaaattgttgctgttaaaaaaatgaagagaaaattttgtcattgggaagaatgtattagtctgcgagaagtgaaggcccttcagaaactatttcaccctaacattgtgaagctgaaggaagtgacgatggaaaaccatgagctgttcttcatctttgaacacatggagtgcaatttatatgatgtcataagggaaaggcaagttgctttccctgaaagggatataaggaactttatggtccagatactgcaaggtcttgcatatatgcataataatgggtattttcaccgtgatttaaaacctgagaatttgttggtgacaaatggtattattaaaattgctgactttgggttggcaagagaaatatcttccaatcctccttacactgattatgtttccaccagatggtatcgggctccagaggttctactgcaatcttcagtttatacacctgctattgacatgtgggcggttggtgctattttggctgagctttttacactgtccccactttttcctggtgaaagtgaaactgaccagctttacaaaatatgcactgtgcttgggacccctgattgcactatttggccagagggaatgaacctgcctcgttcatgcagctttaagttttttcagaatcctccaagaaacttatgggagcttattcctaatgcttcatctgaagcaatcgatttgatccagcaactttgttcctgggatcctcgaaggaggccaactgctgagcaagcattacaacatcctttcttcaatgtgtgcaattgggtaccaagacctgtacatgatgcttaccatacaaaaacaaacggacctaaagctgaaccaagattggaactgaacctgtgggatttcagcacagaacctgatgattgtgtccttgatttaactctcagtctgaagccaagtttttctggaacagaccttggtaagcatgttccacgacgtacagaagaggaaattctcctgtacccgggatttgagaatacccctgtgaagtccggtttttggcctctggtgccatctgatcgtcccgttggtgatgttccggccataccatcctggcagcaggcgtacatggttgacagccaaggcgcattttctggctctccgttcttgcagtcgaacctgttggagaaccgttcgttagcacctatccggcaggtgaatttcttctgacggagacaggattaacagattcatacgattcttgatacgtccagcttctcgctgtatacacactatcttgaataaagtgttgccagtagaggaaatgtatatacagttcgttcgtagctcttgagcttctttctttctagagtacctctttttttttaatcgtctgttcatattccacaccactcctatgtaaataacggcatgcatgataatctctctcccaaaaacaaacaattt

SEQ ID NO: 91184 - DNA, 1917 bp, Zea Mays
gtcttcttccccaatttctcgcggcgtcgttccgtcccaaatatcgccccgcgatcccccacctcgccgactggctcccccgctccacctcgtcgacgggcagaggagacccctcagggccgggatcggactcctctttcaccgatttttccatgcactttaggctaaaaatgctttggtctgaaacctatctgcccttttttctggccgccaacggtttcagccaacgcataccagtgatgaagatcttccgctgaagcttgctcaagctgcaataaagcatgacggtggacctagttttgaggtggatgcgctgagttttgaaggtggcgagggatctttgctgcggggttctatttgttctcagtgatttttggcaaacactctttggttagattaagaatcatggaaaggtacaaattgatacggaagataggtgatggaacctgtgggaatgtttttatggcttctaatgtagaaactaatgaaattgttgctgttaaaaaaatgaagagaaaattttgtcattgggaagaatgtattagtctgcgagaagtgaaggcccttcagaaactatttcaccctaacattgtgaagctgaaggaagtgacgatggaaaaccatgagctgttcttcatctttgaacacatggagtgcaatttatatgatgtcataagggaaaggcaagttgctttccctgaaagggatataaggaactttatggtccagatactgcaaggtcttgcatatatgcataataatgggtattttcaccgtgatttaaaacctgagaatttgttggtgacaaatggtattattaaaattgctgactttgggttggcaagagaaatatcttccaatcctccttacactgattatgtttccaccagatggtatcgggctccagaggttctactgcaatcttcagtttatacacctgctattgacatgtgggcggttggtgctattttggctgagctttttacactgtccccactttttcctggtgaaagtgaaactgaccagctttacaaaatatgcactgtgcttgggacccctgattgcactatttggccagagggaatgaacctgcctcgttcatgcagctttaagttttttcagaatcctccaagaaacttatgggagcttattcctaatgcttcatctgaagcaatcgatttgatccagcaactttgttcctgggatcctcgaaggaggccaactgctgagcaagcattacaacatcctttcttcaatgtgtgcaattgggtaccaagacctgtacatgatgcttaccatacaaaaacaaacggacctaaagctgaaccaagattggaactgaacctgtgggatttcagcacagaacctgatgattgtgtccttgatttaactctcagtctgaagccaagtttttctggaacagaccttggtaagcatgttccacgacgtacagaagaggaaattctcctgtacccgggatttgagaatacccctgtgaagtccggtttttggcctctggtgccatctgatcgtcccgttggtgatgttccggccataccatcctggcagcaggcgtacatggttgacagccaaggcgcattttctggctctccgttcttgcagtcgaacctgttggagaaccgttcgttagcacctatccggcaggtgaatttcttctgacggagacaggattaacagattcatacgattcttgatacgtccagcttctcgctgtatacacactatcttgaataaagtgttgccagtagaggaaatgtatatacagttcgttcgtagctcttgagcttctttctttctagagtacctctttttttttaatcgtctgttcatattccacaccactcctatgtaaataacggcatgcatgataatctctctcccaaaaacaaacaattt

SEQ ID NO: 91185 - DNA, 2041 bp, Zea Mays
gtcttcttccccaatttctcgcggcgtcgttccgtcccaaatatcgccccgcgatcccccacctcgccgactggctcccccgctccacctcgtcgacgggcagaggagacccctcagggccgggatcggactcctctttcaccgatttttccatgcactttaggctaaaaatgctttggtctgaaacctatctgcccttttttctggccgccaacggtttcagccaacgcataccagtgatgaagatcttccgctgaagcttgctcaagctgcaataaagcatgacggttgtgcacataatgatgcttaatcattcatgttgcgaaaccctccagtggaacttccttcttctgatgcaaccatgtataggtggacctagttttgaggtggatgcgctgagttttgaaggtggcgagggatctttgctgcggggttctatttgttctcagtgatttttggcaaacactctttggttagattaagaatcatggaaaggtacaaattgatacggaagataggtgatggaacctgtgggaatgtttttatggcttctaatgtagaaactaatgaaattgttgctgttaaaaaaatgaagagaaaattttgtcattgggaagaatgtattagtctgcgagaagtgaaggcccttcagaaactatttcaccctaacattgtgaagctgaaggaagtgacgatggaaaaccatgagctgttcttcatctttgaacacatggagtgcaatttatatgatgtcataagggaaaggcaagttgctttccctgaaagggatataaggaactttatggtccagatactgcaaggtcttgcatatatgcataataatgggtattttcaccgtgatttaaaacctgagaatttgttggtgacaaatggtattattaaaattgctgactttgggttggcaagagaaatatcttccaatcctccttacactgattatgtttccaccagatggtatcgggctccagaggttctactgcaatcttcagtttatacacctgctattgacatgtgggcggttggtgctattttggctgagctttttacactgtccccactttttcctggtgaaagtgaaactgaccagctttacaaaatatgcactgtgcttgggacccctgattgcactatttggccagagggaatgaacctgcctcgttcatgcagctttaagttttttcagaatcctccaagaaacttatgggagcttattcctaatgcttcatctgaagcaatcgatttgatccagcaactttgttcctgggatcctcgaaggaggccaactgctgagcaagcattacaacatcctttcttcaatgtgtgcaattgggtaccaagacctgtacatgatgcttaccatacaaaaacaaacggacctaaagctgaaccaagattggaactgaacctgtgggatttcagcacagaacctgatgattgtgtccttgatttaactctcagtctgaagccaagtttttctggaacagaccttggtaagcatgttccacgacgtacagaagaggaaattctcctgtacccgggatttgagaatacccctgtgaagtccggtttttggcctctggtgccatctgatcgtcccgttggtgatgttccggccataccatcctggcagcaggcgtacatggttgacagccaaggcgcattttctggctctccgttcttgcagtcgaacctgttggagaaccgttcgttagcacctatccggcaggtgaatttcttctgacggagacaggattaacagattcatacgattcttgatacgtccagcttctcgctgtatacacactatcttgaataaagtgttgccagtagaggaaatgtatatacagttcgttcgtagctcttgagcttctttctttctagagtacctctttttttttaatcgtctgttcatattccacaccactcctatgtaaataacggcatgcatgataatctctctcccaaaaacaaacaattttgtttgtacgccggctgctttgattttagaaaactttaaaac

SEQ ID NO: 91186 - DNA, 1990 bp, Zea Mays
gtcttcttccccaatttctcgcggcgtcgttccgtcccaaatatcgccccgcgatcccccacctcgccgactggctcccccgctccacctcgtcgacgggcagaggagacccctcagggccgggatcggactcctctttcaccgccaacgcataccagtgatgaagatcttccgctgaagcttgctcaagctgcaataaagcatgacggtggacctagttttgaggtggatgcgctgagttttgaaggtggcgagggatctttgctgcggggttctatttgttctcagtgatttttggcaaacactctttggttagattaagaatcatggaaaggtacaaattgatacggaagataggtgatggaacctgtgggaatgtttttatggcttctaatgtagaaactaatgaaattgttgctgttaaaaaaatgaagagaaaattttgtcattgggaagaatgtattagtctgcgagaagtgaaggcccttcagaaactatttcaccctaacattgtgaagctgaaggaagtgacgatggaaaaccatgagctgttcttcatctttgaacacatggagtgcaatttatatgatgtcataagggaaaggcaagttgctttccctgaaagggatataaggaactttatggtccagatactgcaaggtcttgcatatatgcataataatgggtattttcaccgtgatttaaaacctgagaatttgttggtgacaaatggtattattaaaattgctgactttgggttggcaagagaaatatcttccaatcctccttacactgattatgtttccaccagatggtatcgggctccagaggttctactgcaatcttcagtttatacacctgctattgacatgtgggcggttggtgctattttggctgagctttttacactgtccccactttttcctggtgaaagtgaaactgaccagctttacaaaatatgcactgtgcttgggacccctgattgcactatttggccagagggaatgaacctgcctcgttcatgcagctttaagttttttcagaatcctccaagaaacttatgggagcttattcctaatgcttcatctgaagcaatcgatttgatccagcaactttgttcctgggatcctcgaaggaggccaactgctgagcaagcattacaacatcctttcttcaatgtgtgcaattgggtaccaagacctgtacatgatgcttaccatacaaaaacaaacggacctaaagctgaaccaagattggaactgaacctgtgggatttcagcacagaacctgatgattgtgtccttgatttaactctcagtctgaagccaagtttttctggaacagaccttggtaagcatgttccacgacgtacagaagaggaaattctcctgtacccgggatttgagaatacccctgtgaagtccggtttttggcctctggtgccatctgatcgtcccgttggtgatgttccggccataccatcctggcagcaggcgtacatggttgacagccaaggcgcattttctggctctccgttcttgcagtcgaacctgttggagaaccgttcgttagcacctatccggcaggtgaatttcttctgacggagacaggattaacagattcatacgattcttgatacgtccagcttctcgctgtatacacactatcttgaataaagtgttgccagtagaggaaatgtatatacagttcgttcgtagctcttgagcttctttctttctagagtacctctttttttttaatcgtctgttcatattccacaccactcctatgtaaataacggcatgcatgataatctctctcccaaaaacaaacaattttgtttgtacgccggctgctttgattttagaaaactttaaaacagatacagtatttgcaatacttcagttttaaaaacaaagattttagagcagctccaaaagagcacaaaatttgttcctaaaatctttatcagcatagttggaaaataaaa

SEQ ID NO: 91187 - DNA, 1414 bp, Zea Mays
aatagatactatcctgcagcttgattttcttaacaaagaaagaactatttttctgcaggcccttcagaaactatttcaccctaacattgtgaagctgaaggaagtgacgatggaaaaccatgagctgttcttcatctttgaacacatggagtgcaatttatatgatgtcataagggaaaggcaagttgctttccctgaaagggatataaggaactttatggtccagatactgcaaggtcttgcatatatgcataataatgggtattttcaccgtgatttaaaacctgagaatttgttggtgacaaatggtattattaaaattgctgactttgggttggcaagagaaatatcttccaatcctccttacactgattatgtttccaccagatggtatcgggctccagaggttctactgcaatcttcagtttatacacctgctattgacatgtgggcggttggtgctattttggctgagctttttacactgtccccactttttcctggtgaaagtgaaactgaccagctttacaaaatatgcactgtgcttgggacccctgattgcactatttggccagagggaatgaacctgcctcgttcatgcagctttaagttttttcagaatcctccaagaaacttatgggagcttattcctaatgcttcatctgaagcaatcgatttgatccagcaactttgttcctgggatcctcgaaggaggccaactgctgagcaagcattacaacatcctttcttcaatgtgtgcaattgggtaccaagacctgtacatgatgcttaccatacaaaaacaaacggacctaaagctgaaccaagattggaactgaacctgtgggatttcagcacagaacctgatgattgtgtccttgatttaactctcagtctgaagccaagtttttctggaacagaccttggtaagcatgttccacgacgtacagaagaggaaattctcctgtacccgggatttgagaatacccctgtgaagtccggtttttggcctctggtgccatctgatcgtcccgttggtgatgttccggccataccatcctggcagcaggcgtacatggttgacagccaaggcgcattttctggctctccgttcttgcagtcgaacctgttggagaaccgttcgttagcacctatccggcaggtgaatttcttctgacggagacaggattaacagattcatacgattcttgatacgtccagcttctcgctgtatacacactatcttgaataaagtgttgccagtagaggaaatgtatatacagttcgttcgtagctcttgagcttctttctttctagagtacctctttttttttaatcgtctgttcatattccacaccactcctatgtaaataacggcatgcatgataatctctctcccaaaaacaaacaattt

SEQ ID NO: 91188 - DNA, 1187 bp, Zea Mays
ttcctcccccgttcccctctctctctctctctctctctccactcgcctccgctcgcggtggagtgccccaatcctccacctcttcttcgccccccccgcctcctctttctcctcaaccctactccgacgcggcgccacgagacaacagcgggcgcgcggagcaaacgagaactaaaacgagagggaggtcgcggcgcccgattcggtcgcgctcgcgcgggggcgccccggattggattggattggatccttggatccccccgcgcgcggaggggaattcggcgcccagatccccgcgattccggcgccggcgccgggcatgagaggccgtagggcatgcctgtggtggtggcccctggcgcgggacgagtgagccggcggcgggaggacgaggaacaggacctgtggctgaggctgaggcctgagaggagcagtcgtcaagtaggaggaggaggaggtcggggtgggtgatccgaggcccgaggcggccgtgccatgtctcgctgcttcccgtttccgccaccacgatatgagaagaccgtgcgccccgacgcccagctagcctcgcagcagcagcagcttgacaaggtggaacaacacccccaccccaccccgcaccctgccttactgatcgatcgcctcgtcgtccactcgtgctaggtgctactgactatctcatataggataggaataggatggactgacttggacgcattaggcctgtacttacatgctattatccccccaagtctcagcttagctggcattcaattgggagaaataaggagctagaccaggctggttagggttcctgtctgagaaattctagcagcgttttagctcccgtagctgagatcgcgggcgttacaggatccataaggcgttctatgtcgcatcctttccggtttgccggttggggggcaaactagaactaggaaagtgttaagtcttgctgaatcagtatttactcctttccagagttcgcggaagccggtcagggcctccgactttaatagcaataggcgttatagtaggacgcacaatgcgttactttggggatcctttgtgtggctggttcagtgattgagatagatttggaaagagtttgttttgctgaattgttattcaatacttcactaaggcgtgtccctgtttacatgaaatgcatatgtcacaaattccgaaca

SEQ ID NO: 91189 - DNA, 2379 bp, Zea Mays
ttgctcctggcctttattttttactcatttgctagttttttttttctgtaactggcgtttacttgacttgaaacaacgttgtcatctcaggagaaacacaaagagaagaaacataagaaggacaagaaggacaaagatagaaaggaaggtaaagaaaagaaggataaagacaggagtagggataagcacaaagataagaaagatcgtaaagaaaaacacaaagacgagaaaaaagacaagagcaaagataaaaacagggagtcaggcgaaggaattcaaagaaatgacgaggctctccatggtcagaaggttggagagagcagcagggggtctgaagaaattaaggatcttaaattcagggaggagttggtcagaggagtacaggatgagaaaggggcagcgagtcaaactattgaaaattatgctgtttcaaatgatcgaaatcgcaaaggcttcattgcttcacctgcaatggagactgaaaggtccgcgcataataaagtgcatattcagtctggtaatgcttcaaggaaaactgagggatttatacaacagagcatcaatgccaatcgacaaaagaatgggacatcagtacaacattctgaaagcttcaccacttctgctcgaagaactgctggtggctttccaccagcacctacaacggaggataaattcaaagctgcaaggctttcatccagtaatgaagctgcacccagaaaagagggggttggacagcgaatcagtaacattagcatatcgcttcaaaagagaactgagaacacaaacaaagatgtcgcgaagaaagaagttggcacctcctctccattgcctccaaatcctgctaatgctatgcataagggaaatggcaaggttggtaggccaatggacaacacacaaggatccatgcagagatttggcagcccatcaacatcaagtgcaacatgggggatggatagaggagcacctaggtcatccatcccaagcccgagcattacaatacggagaccgaatggcatggtacgaccagctgaaaatctttctgtctctgctaagaaacctgatgcaggaggcctttcacctgctatgggtaaggaaaaggaacaaggtggaaggttgctgcaagctaatatttcaactgatcagaaactggcagctgaaagtcgttctgcctctgctaagaaacctgatgcaggaggcctttcacctgctatgggtaaggaaaaggaacaaggtggaagattgctgcaagctaatatttcaactgatcagaaactggcagctgaaagtcgttctgtctctgctaagaaacctgatgcaggaggcctttcacctgctatgggtaaggaaaaggaacagggtggaaggttgctgcaaggtaatatttcaactgatcagaaactgggagctgaaaaccgttctgtctctgctaagaaacctgatgcaggaggcctttcacctgctatgggcaaggaaaaggaacaaggtggaaggttgctgcaggctaatatttcaactgatcagaaactggttatgtcaaagcctccagctgtggagaaagctgcagatgggagagctgaaaggatggagaaggtcagagatggggcaccagatattgccaagaaagaggacaaaaagagtgatcggcatgagaaaaagaaaaggaaagagaaagataaacacaaagagaagaaaaaggagaaagaggcaaagaaggagaaaagggaacataaccacaaagagcataataaaacaagagaaaacagtataagttatcccatagatagtcttaacttgaagcactcggtccctcctttagccccaccagttgatgatggaaaatctgttgtgcctgatgagaacctgaagaagcgaaagaaccatgaaacgaatggttacttacaaaacaaccttgatatgcggcctacaaagttgccgagaccagcactccccagcaatcgtgtggagaatggtacagcatctcatgtagccgcgccactctcttctgtgaagcaggaagccataaatattgaaaaggctgaaaggctccacaaggaagagaaggtcaatggcaaccaacagggtcagcagcgaggtccagtcgatccggtggctgcttatgagaatggcacaagctctaggaagccacctcaccccgactgcaagtatcttagccagatatacagcattcctgaagcacctcaaatgatggaattgcctgggcaggaaggtgaggactggctgttcgacaaaggcggcacccagccaaggaagccggccagttcagcgcctgaggctgatggagtcccccaagtgtgggctcaggctctgaaaattgaccatgctgatgtcattgctctgccatacgtgatacccttttag

SEQ ID NO: 91190 - DNA, 114 bp, Zea Mays
cgttgcccgaacaagtccagaccgcacatgcgtggcttcggaaccttcaacggtgtcatgtatttattccgctttgttcgattatttccgttatatatagatttaataagattt

SEQ ID NO: 91191 - DNA, 1391 bp, Zea Mays
gacagtgagtatcacttgttgtgtgtctctctctgtctgagtctctgccaccaaacgtttcttttttagctcaccatacaattgtgaccccgcttgctatataaacagtcaatcatgcattcttggcagcaaagccaaaaacacaaagcccggaccggacgggaagggaggcccaaccatccatctgtccagccgcacctcccagcagcagccatataagctactccctactagctacgaggggatacgagaggcgaggagagacgccgccggactgccgtgcccagcgcccgtgaccatcccatcccatccggtcggtcgtacatgaaggaccgccgtggcagctcctccgtcggcggcggcgagcgcttcgccgtcttccccttctccatgggctgcatgtcgcagtccgccgtgtccgtcgccgaccccggcgacaagaaggcgcagggggacccgtcctccactgccgccgccacggtggctcgggcaggagcaggttcatcggaagaaggcgccggcgaggccatgacgaaggagaaggccgtggcgtcgtcggcggcggcggcgacggctacggcgccgggtctcgtggcggccggggtgtcgaggctgatgaaggggatccggagcctgtcgcagatgttcgcgggggaggacggcggcgaagatgaggacgacgaggaggaggagcgggagatggtgatcgggtaccccacggacgtgcagcacgtggggcacatcggctgggacggccacaacagcaaggcgggcgccgccgccgcggccatggctggcatggtgaacgccttctccctgccctcctccctctccctccgccacctcgacatggccatggaccgcgccgtcgcgcacgcctccgcctgaacccggcctgatgaccgcgcgcagctccgacggccggtatcgtacgtagctactagattccgcggttccgccatttgattgcttcacacgttcgtacgcggagaaggaaggatatgatcgattcccatgcctccagtttgctgctgcttgttaatgccgccggccggtccctgttcttgccagtccagtgccatacgtgcgtgaaagtctctcgctttctgtgtcatatcatatccggtgtgagctactatagcgtagagcatgagacgacaagcgtatttgtgtacatacgtgcatgccaacttgtatagtttgtgaggcttcgccatcacacaccccacggtgcctgctggagctcatgtcagtatgtgtgtgtgtgtgcctgccactgccagtgacctatataactctgcgtgtgatttgtaattaactcccacgtttcaatttttgcaaaaaaaaaaatgatcatcttattactggccataataaacaaaaagaaaaaa

SEQ ID NO: 91192 - DNA, 198 bp, Zea Mays
atgtcatcggcttcgtatcccgataattgcagatctgaggcactgagtgtgatgcgcaacggatcaatggcagggaaatcagaagcaaagcatggtaagtctagaacagatatcccagggattctcgccagcaggtcttttgtttccgatgctatagctaatggctcatcaaatatatttgtgttctggctcagctga

SEQ ID NO: 91193 - DNA, 1956 bp, Zea Mays
ggcggtaggctgcgggctgtgcaatcgaaagttctgatagataaaaatgacacataccgaacgataaaccctaatgcaacatcttatcttatgtcttcgtttgaccggctcgccttattcatgggctccgcaagatttcagtggtgagctggtttcctagcagtggccagacactatgcctgggccgtcttgcgaaacgaaaccaacacttggttctgggcccaaagcctaaggccctaatccagttcttgttccttccaatttttccagcgccgggcgggcgggaagacgaaaacccaacgtcgccgcctgcgaaaggggaaaacccatccgatttcgattcgatttgccggcggtgcccgcggcggagaggatggcgagctccttctccttcccgctgatgaatccggcggacattgcggaggcgctgcacagctactgcatcgcgcccagccccggcctccgcgccgagcacatcgtcaccccgcagcccggcctcgtcgccgaggtcctcgccctcttcctcgccaacttcgtcggcgacgacgagcccgacgagcagctagagtttcaggcgctgcaggcgatcgacaacccggagcaccacatgcgcgccatagcgctctcgcgcctctaccggagggccaacgccttcctccactccatcctcttccgggacctcacgctccgcgaccttctccgcgccgacggccgccgtgtcgtctacatcctcagcgccataatcaacttcctccactacaggcaagataagctcagctttcttgagcccatcgtccaagagtacagcccccttcaggaacggcacacggagctcagggctaagatcgccgagcttcggaacgcaaaagaagaccatctacttaaggagcagatggaggcgcccgtggtccagcaactcgagaaggaggtcaatgccctcaaacagaggcttcgtgaatacaacaaagagcagctgtcgctgcgcgttgcaacaaaagccatagacgaaaagaaacaggagttactcggcaagatgaaccaagctgatttcgagttggtgaaagttatgcaagaaaaggaaaggctatcagccaaaattgttcattcccctgaaaagctcctgaggacccttgaggagaagaaagcagtccgtgatgagctaaggaactcagagaaggtggcaatgcaaaaagttcaagagaaaaccaatactcttgagacgtatactaaggtttctgagaaattagtgaagcatctctctaaaatttctgctgtacatgaaaaaggcactgttgctaaagcttctgagaaggatgttaaagcacacaaagagaagattggtgatcaaaatttggagataaaggcacttcgcaataaagctgctgagtggcaattgaaagtactcgagaacgagggcattctgaacgcaaaggagaaagaaagggatcaaagagttgcagagaacaatctgaagatgaacgcgttgaaatctgaagtcgaatcggagcacaagtgccttgaggagaaagaaataaaaataaaggaaaagcttgaaaaggttgctgaattatgctctcaagctgattcggttgctgaagctggaaataagaaaatacaggaaatctgtgggaagtataatcaagtttgcgaggctgcaaacatgtacatggatggcatcgatcgttcctttgaagagatcgatgaagctgcagtgagtttgaaagctataggccagagtggtgcttgatgcgtgaagtgaccatcgacgggcaatggatcgtggacagcatagtaaattgtgctagtgttaagctctgtatatatacctccaccgcgtctgtatatgccttcttcccactattttaatttaattagcactaattgccagtgaaaatggatatgtctaccgatcttgattaattctatttcaattcaaagcaacctacgccctgtcca

SEQ ID NO: 91194 - DNA, 1475 bp, Zea Mays
tttttgggcacgtttggatcgtaattgtagtcggccaggcccaatttggcctttgacccggcacaagctacttgtttggatcgaggctaagatttggcagccagggccctcattactgtagttacattttgtgcccaaatttggtcactgcattgtgcattggctattgatttgaccaccaaattttggctggcccatgcgttggcatggcaggaaacacacttaagcaaacaagtccttttgttctgaggggccaaagctacatagactgccacctgctgtatgttataggtatttcacacaaaaccagttttcaggcactcgaagtgtggttacttgtttaagaaagcaatctttcagcataattcgaagacatttggttatttaatcagccactgaccactgacatttttcttcctaagcaatagttggtattatttccatcggctttactagcagagttgttcttgttaagtcaaactgcactatttgtactctattcaaagcaacacttcataatgttacattcactgcttgtattttttttggcagatgaaccaagctgatttcgagttggtgaaagttatgcaagaaaaggaaaggctatcagccaaaattgttcattcccctgaaaagctcctgaggacccttgaggagaagaaagcagtccgtgatgagctaaggaactcagagaaggtggcaatgcaaaaagttcaagagaaaaccaatactcttgagacgtatactaaggtttctgagaaattagtgaagcatctctctaaaatttctgctgtacatgaaaaaggcactgttgctaaagcttctgagaaggatgttaaagcacacaaagagaagattggtgatcaaaatttggagataaaggcacttcgcaataaagctgctgagtggcaattgaaagtactcgagaacgagggcattctgaacgcaaaggagaaagaaagggatcaaagagttgcagagaacaatctgaagatgaacgcgttgaaatctgaagtcgaatcggagcacaagtgccttgaggagaaagaaataaaaataaaggaaaagcttgaaaaggttgctgaattatgctctcaagctgattcggttgctgaagctggaaataagaaaatacaggaaatctgtgggaagtataatcaagtttgcgaggctgcaaacatgtacatggatggcatcgatcgttcctttgaagagatcgatgaagctgcagtgagtttgaaagctataggccagagtggtgcttgatgcgtgaagtgaccatcgacgggcaatggatcgtggacagcatagtaaattgtgctagtgttaagctctgtatatatacctccaccgcgtctgtatatgccttcttcccactattttaatttaattagcactaattgccagtgaaaatggatatgtctaccgatcttgattaattctatttcaattcaaagcaacctacgccctgtcca

SEQ ID NO: 91195 - DNA, 1643 bp, Zea Mays
tttggcttctcgtacgtacgtgtgtgttctgttctgttctgttctgttcaccagaaagcaaactagttctttaagtgtgattccaacagcggaggccatgggcagccggcaggcggcggcgttcctgctcggctgcgtcgccgcgctcaccgtcgtcgtgctgctgctgcagcgccgccccgaggagctcaccagcagggcaccactgctgcaagtcttcggaggcggaggggcagggccgtcgccgtcgccgtctcagtccagctcctcctcaccaccagcagatagcaataataccactgccgcagccggcgatccacgccttccgccgccgcccaaccatggcgaggacgaagacgaagacgaagacgaagaggagttccgcgggctcgcggcggcggtgtcgcgcgcggcgacggcggacgaccggacggtgatcatcacgtgcgtcaaccaggcgtgggcggcgcccggctcgctgctggacctgttcctggagagcttccgcgtgggcgacggcacggcgcccctgctgcgccacctgctcatcgtggccatggacgccgccgccatggcccggtgccgcgcgctccacccgcactgctacctctactccccggcccgcggcgtcgacttcgcgcccgccaagcccttcctgtccagggactacctggagctcgtctggagcaagctcaggctgcagcgccgcgtgctccgcctcggctacagcctcctcttcaccgacgccgacgtgctgtggctccgcaacccgctcaagcacgtcacggcgtacgccgacatgaccgtctcctgcgacgtcttcttcggcgacccggacggcgtcgacaacttccccaacacgggattcttccacgtcaggcccaacagccgcaccatcgccatggccgccgcgtggcaccgggcccgggacaggttcccgggcaagaacgagcagcccgtcttcaacgccatcaagaagggcctcgtcgccgacctcggcctccgcctgcagtacatagacccggccttcgtcgcgggcttctgcagctacggcagggacctcggcaaggtctgcaccatgcacgccaactgctgcgtcggcctccgcgccaagatcaccgacctccggaccctgctccacgactggaagaactacaccgccatgccgcactgggccaagcaccaggccaagtggaccgtccccggagcgtgcatccattgacggccacgacccatgatgcatcttcctagctacacgtcgatcgcaggaaaaggacactaactagtacaataccatggatgagatgaattcacatatattactctagcttatatgcgtccgaatcgtgagagcttgcgtcttgcgttgcgcctcccgaaagacaaggaacacaattacatcttgtgttatccatgacggatgaggtcgggcaccggcctacacgaaaacgattatccgtcggttagaaatttacccgcttttattataatatggtaatttttagaaacgatattgtcttatggaatcgatacaaataggagtcgatctccagttcaagttcaagcttgttcgttttaaccctaatccatatatattggaggagatttcaaataaattggaggagatttagtcgatttcaatc

SEQ ID NO: 91196 - DNA, 786 bp, Zea Mays
ccgtgccaccgcccctcccgagacttccgccacgcctccccaccgtgcgagattgccgcccccggccgcgagtgtgctgtgtgcccgtcgagacaactgttgtctccttccccaacctgcagaatcgtgcccaccaccgccacctctcgcgcgaggcccgggtctgcggccaccggcacagccagcatccttccctgcctgctcgctatgcatcatgtccgcgttcagcgagacaaccgtcgtcctcccttgctgagttaagtctccttgtgtgcagatgaaggcaatggagtatggatctgtgccagtatagataagcttttccagctatgaatcaaggtaaaaacgaaaaagcactaatttgggcaatccatcagtttgatatgatttagttgaaatgttttttgtatccagagtgagtagaaaccgcatgactatgagaagcttgagtatgggccaaagtaggatttacatcagttaattgacggttatatatgttacgtacaagttataagcttttccatttatatgtacttgtaaccaggggggtcagaggtgtatggttgtcgcaatacaacaatgtctctatacatcatctcaacctatggagatttgtctctttctcaagcacttgatgactttgtaagtttgcaatctcaagggagaatagctatcctgtcacgggctgttcattgtgcacaatcaacatctcttaatagatcaaataatgttctgaacaacagcataggtcaaagttgcaatcggaaggctcaggaagctgattga

SEQ ID NO: 91197 - DNA, 679 bp, Zea Mays
ccgtgccaccgcccctcccgagacttccgccacgcctccccaccgtgcgagattgccgcccccggccgcgagtgtgctgtgtgcccgtcgagacaactgttgtctccttccccaacctgcagaatcgtgcccaccaccgccacctctcgcgcgaggcccgggtctgcggccaccggcacagccagcatccttccctgcctgctcgctatgcatcatgtccgcgttcagcgagacaaccgtcgtcctcccttgctgagttaagtctccttgtgtgcagatgaaggcaatggagtatggatctgtgccagtatagataagcttttccagctatgaatcaagaacaatgaccctttgcattgggatcgacagatcaagggtgggatggttaggggttcgttgcggccatagccttcattgcaaggcttattcctccataaggaagctgtgaactgggcatctgctagagaaccacatgacctacatgaggcaccaactcctgaaattaagggtacaagtatcttatttttaaaggagggagagcaaggatctgtagccttgagaccccatacagatagatgcacaatatgtgtgaacaaaaaaaaacaaacaagaattatttcctataaaaatatatgtacaaatctgtgttggatgattctaatctttgaacacagggctt

SEQ ID NO: 91198 - DNA, 1747 bp, Zea Mays
ccaacagccctcgccgttaaatcaacatctagtagcaatggcggcgcaggtcgtcgcagcaggcgacggcggcagctggcctcagcaatggcggctcacgctcgtgctggcggctctcgtccctctgctcagcctctgcctactcctagcgagaacaacaagaagagcaagagcaagtagctggagcagcagcagcaaaggccggcgcctcgacgtccaccgcctgccgccggggccaccgaggttgccgctcctgggcaatctgcaccagctgggctcgctgccgcaccggagcctgcgcgagctggcgcgccgccacgggcccgtcatgctgctgcgcctgggcagcgtgcccacgctggtggtgtcgtcggcggacgcggcgcgggaggtcatgaaggcgcgcgacgccgactgctgcagccgccccgacacgccgggggccaggcgcctctcgtacggccacaaggacgtcgccttcgcgccctacaccgactactggcgccagatgcgcaagctcttcgtcgtcgagctcctcagcgcgcgccgcgtccgggccgccgaccacgccagggaggccgaggtggacaagctcatcgccaggctgagcagcgccggcggcaagccggtgcagctggaggaccacatgttcgcgctcatggacggcgtcatcggcaccgtggcgttcgggaacatctacggcgcggagcagttcgcgcacaggaaccacttccacgacgtgctggacgaggccttgagcgccaaggccggattctccgcggaggactactaccccaacgccgccggccgcctcgtcgaccgcctcaccggcgccgccgcccgccgcgagagggtgttcagggaccttgacgccttcttcgacaccatcatcgaccagcacctggtcgacccgtcgtcatcgctgtccagcgccacgacgacgcccgacctcatcgacgtcttcgtcgacctcatggaggagagccggcgccagccacaggtccacggctccctccgattcactagggaccacatcaaagggctgctctcgaacgttttcaccgctggcgtggacacgagctcggtgaccatggtgtgggcgatggcggagctgatccggaggccggcgatgctgaggaaggcgcaggaggaggtccggtccgtggtgggcggcgacagggagagggtgcacccggacgacgtgcccaagctcaggtacctgaaggcggtggtgaaggagacgctgcggctgcacccggcggcgccgctgctgctgccgagggagacgatgcggcacgtgagcgtctgcgggtacgacgtgccggccaagacgcgggtgctggtgaacgcatgggccatcggcagggacccccgcagctgggggcccaggcccgaggagttcgaccccgccaggttcgaagacggcggcgacgtggggttcaacggcacgcacttcgagctcatccccttcggcgccggccgccggatgtgcccgggcatagccatgggcgtggccaccatggagttcacgctggctaacttgctctactgcttcgactgggagctcccggagggagtgggggtcgaggacgtgagcatggaagaggccggaagcctcaccgtccacaagaaaacgccgctcctccttgtccccacaagatacaaagccaactgtcagagtcgtcactctttccaattttgaaaacaacggtacaagactggtcaatcttgtggtggattttcgagg

SEQ ID NO: 91199 - DNA, 705 bp, Zea Mays
cacaagcagagcaccaagcggcaggcaggagagagaggcctcgcatggaggtaggaggcccatctctgatagccaagcatgatttgcccgtagtctgactctgagtgtgctcctgctacgggcaaatcatcttggccatctgagtacctccctacgctgtccccatgtcaggaggccctgctcttcttcggtcggttttaaggcctgtttggagaggagcctacggcgccgcagcccgccacacctgcggcggccgatttgggcgccacacccgcggcagccggagtgtggcgcggtgtggcgcccgagccagcccaccaaacaggcccttagatagccaaaacgcagtacacacagcgctgcttaccttgacgacgaccacttgtgttggagcagcagtcatctacagccaaaactcttcacttccttcgccattgccgtgttaccagcccagccagcgacgtgggcgtgccgcgacagggttttttccccctgggaaacgttgtgttctggcagatgccacaaaaggtaccttgggctcggcaaatcccttcaaccctgagcctctttcattcatccacgcaagtgacaaggccaagaaccactccagctcaatgatcctctagcatgcttatacttatggcaaaaaatgtaccggactatcgtgttcgacaaccatcacattttttttggagatgacatttc

SEQ ID NO: 91200 - DNA, 2233 bp, Zea Mays
ccgtccgtttccgcgccgcagcagccgcctatataaacaaggcgcctcccgtcccagcgccccgcttccctgtctcgccgccacctcctctgcgctccccgttccccaggtcgcgcgcacccgctcccgcaccggagaacccaccgcacgccggcctcgttccgagatggcggcggcgctgcgcttcccgggggtcgcgagggagtctctgtctctggacgcgcccgtcgccgcctccaagctcgggagggagcggcgcccggcccccgcgagcgcgaacccggggccgcaatgctggaggcggaggaggggcctggcggtgcgctgccagacggggtccaccgcaccgcccgtccttaggacggaggaggcccccgcggctgcggcgggggcaaggaatgcccaggcggggttcaccgtcgtcatgaagttcggcggctcgtcgctcgcgtcagccgagcggatgcgggaggtggccggcctcatccttagcttccccgacgagacgcccgtcgtcgtcctctccgccatggggaagaccaccaataacctcctcctggccggcgagaaggcggtgagctgcggcgcccccaaggcgtccgaaatccctgagctcgctgtcatcaaggacctgcatcttaggacggttgatgagctcggtttagataggtcgattgtttcaggtttattggatgaattggagcaacttcttaaaggagttgctatgatgaaagagctgacccttaggacaagagattaccttgtttcctttggtgaatgtatgtcgacaagaatatttgctgcatatttgaacaaacttgggaaaaaagcacgccagtatgatgcatttgatattggctttataaccaccgatgatttcacaaatgcggatattcttgaagccacttaccctgctgttgcgaagaggctacatgaagactggatggatgaccctgctattcctatagtcactggttttcttgggaagggatgtaaatcatgtgctgtcaccactttaggcaggggtggtagtgacttgacagctacaaccattggcaaagccttgggattaagagaaatccaggtttggaaggatgtagatggtgtgttgacatgtgatcctaatatatatgcaaatgctatacccgtgccctacttgacttttgatgaggctgctgagcttgcctactttggtgcacaggttttgcatccccagtcaatgcgaccggctagggatggtgatattccagtgagagtaaagaactcatacaatcgtcatgcacctggtactgtcatcactaaatccagagatatgagcaagagcatattgactagcattgtgttgaaatctaatgttaccatgctggatatagtgagcacaaggatgcttggccaatacgggtttttagcaaaggtattctcaatatttgaagatttgggcatctctgttgactgtgtggctactagtgaagtcagcatctcgttgactctagatccatcaaaactatggagtcgtgaattgatccagcaggaacttgatcatgtcgttgaagagcttaaaaaatttgcagttgttcatctgctgcaacgtagatcgatcatctcactgatagggaatgtacagcgatcgtcattgattcttgaaaaggcattcaacgttctgcgaagaaatggtgttaatgtccagatgatctcacaaggggcgtccaaggtgaacatttccttggtagtcaatgacagtgaggcaaaacagtgcgtacaagccctccattcagcgttctttgagaatggcttcttgtcggaggtagagggagctgacgttccccagaacggagcctctctgaactcaaatggcgctgtctatggaaactagtcgactctgcaactgatttcttcaaaatttgtgtaccattggtaggttgaatggtggtgattcatagctatttatttagggcatcagtcatgttggtgcaaattttcttgatgttttaagagcttattaccagaacagtctgcatggtataccttgcgattgggtgctaccaagtagtagccaatgtcttggggatctgccacatgtttaaggcattccaaggcttatatgtatctgagttgtattgtatgtgagaactattgagttgtattgtggtgattaagtttggtagttttagactgaactcggtggatggtccattatcatgcaagcgaatgtggtcttctgtttctgttacca

SEQ ID NO: 91201 - DNA, 2052 bp, Zea Mays
atggacgcacggtgcgatgagctccactgccgcttcacagcgcgcggctacaccatccagcaggaagtcgatgcggtcatctatgacgagtcaagcgaccacgacggctacggcgcggcgcccttcgatatcaacggctctggcgagaagtccatcttcgacgatggccccagcttcgacgaggaacattgtaccttcagcgccgacaacgcgcacttcaacgacgtgcttcgcgcccacttgtttgattcgttcctcccgacgacgacgacggtgaaggagacgctgcgtgcgtcgttcatgcgtgaggaggacaagcgccccaaggtgccacacgaccatggatgcagccaaggcggtgcagaggctggccgacctggaggcgctgcggcgccacaacaccgaggtgcgcgtgtgccgggaggccgacgtgaaggtgcgtgctctggacgccatttccagccacgactttcggtaccgcaagtaccacatcaacgagatcgagatggccacaaagcgcttctccgacgacctccagttcggcgagggcgaatacgaccccgtctactgcgcctccatgggccacacccctatcgccatcaaggggctccggcccgacgcgcgctcgccaagcgcatctggcgcaacaccacaacgtacgactactaccaccagatcttcgtcctagatcgtgagccgcccaacggcaagtccgacgagccactgcgagtgaacaacttattccagcacatcaagggcatgctatccggcaagagagccgccgtagccgagaagctcgggctcaccgacagccatgagattggtgttaacgagcatgtgacctggatcatcttcatcgctgtcagcttcacggcaagtgcggtctgggcacgggccgcgaggcgcctggacggtgttgtggtggcggacaacagaaaactacgacaagcatctgtggacggccggaagatgcactgctacgagctgctgaccgatgaggcattggagtcttggagaacgcgcagctcaggacaacatccaaggaaagagtacctggagagccctagggccgatctgcggtgcatggccgaaccaactatcgctagcatcagaaatgctcaggctccccttttcaccactatgtacgagcttgagtatgagagagaagaggatgtcatgttcagcttcaacacgatattctatgaaaatggccaacaatctgacgtctacaacttccatgtagtgcccattgtttcagataccatcaatggaataattgggactataattacttatggtcagtctggggcaagcaagacgtatagcatggatgaaccaagcattttgcatcacaatgaacagaaaactggactagttcaacgagttgtggatgagctttttgtatgtttgggatcatcagcgagcacgtggattatgaagttgccaatggtggagatatatttgcaaaaagtgaggaaccttcttgacttgtccaaagacaacccgcagatcaaggaaagtaaaatccaaggaatttacatctctggagcaatagagatatttatcttcaacagttcagatgtcttagagaacctttttccaggaattgacaacagcgctgttgggaaaacacatatgaacttggctagcagtagaaataactgcttatgcattttctcagtacaatatgaatccacttcagatgagagggtaccatcagggacgattatacttattgatttggatggttctgagaaagttgggacaactggggctgaaggacggggtcttgataaggcgaagacaatcaacattgtcattgactcactaagctttgtttcagtcacaatcttccagcttgaagggattgtattgggtctaatcgccagtgctgtcagattctctgatctgggtgctgtcagcagtggccaaggcaatttttctgtctttgtttgggatcctggtgatcgcgctgtcatgttgctcgcttcaggtgttgttctagtgttgcaagagctgccacatttcagatggagggctgcagaggcgtga

SEQ ID NO: 91202 - DNA, 970 bp, Zea Mays
cgcatcgaaaattgaaaaccctataatcctccccaaaggcccaaacctatcgcccgtacgagactgcgccgccgttgccgtctcctcctccgtcccatcactctctgctcgcgcactctcacctgcccgcgccgtcttcgaccgccaccaagatgaacaaggagaggctcatgaagatggccggcgccgtccgcaccggcggcaagggcaccatgcgcaggaagaagaaggctgtacacaagacggtcaccacggacgacaagaggctgcagggcactctcaagagagtaggggtcaacaccatccctgcaatcgaggaggtgaacatattcaaggacgatctcgtcatccagttcttgaaccccaaagtgcaagcttccatcgcagcaaacacatgggtggtcagtggatctccacagacgaaaaagctacaggatgttctccctgggatcattaaccagcttggccctgacaacatggagcacctgaagaggattgccgaggagatgcagaagcaggtggctgctgccggtgcggcagcacaggtcaaggaagacaacgatgacgatgttccagagcttgttcctggagagacttttgaagaagtagctcaggagacaaaagcctgatcataggctctaaatagtgaaatgttactgcaccaatgctgtgaggtcatggttttcgtgtgatggcactcttcttcctcccctcctaggccagccccagccactctttgtgttcgctgttggaaacttttagtttctccatctcaagcttttacctaaggttgtgcatgttgagatgccatggaaatccattttgctgattatttggtttgtggtcggttcacaatattacatgtgcaccaggttttgctgggttatcactatataatgtttgtgtagtctacacaccgtgactaactcttttgcaggggtattgtaactgtgctttgctgtttccagat

SEQ ID NO: 91203 - DNA, 878 bp, Zea Mays
atcgaaaattgaaaaccctataatcctccccaaaggcccaaacctatcgcccgtacgagactgcgccgccgttgccgtctcctcctccgtcccatcactctctgctcgcgcactctcacctgcccgcgccgtcttcgaccgccaccaagatgaacaaggagaggctcatgaagatggccggcgccgtccgcaccggcggcaagggcaccatgcgcaggaagaagaaggctgtacacaagacggtcaccacggacgacaagaggctgcagggcactctcaagagagtaggggtcaacaccatccctgcaatcgaggaggtgaacatattcaaggacgatctcgtcatccagttcttgaaccccaaagtgcaagcttccatcgcagcaaacacatgggtggtcagtggatctccacagacgaaaaagctacaggatgttctccctgggatcattaaccagcttggtatgttacaatctgtaccttaacgtttaggatattatccaaaaaatggttatcttgtactacctccgtccgtttcgaatatttgtcttccgttaattcacttttaactaaaacatggcaaataaaaaagaacagagggagtaacatatttgatgctttgtttgattaggcaagttctgctcatttaatttgtttgttattatctatagtcctggtcttttctaattttattagaaatgtgttgctgcattccaccatttcttgttttgtcatttgtggtgttctctcgacagttaccacttctagacgcacgacaatggatgtatacttctaggcatattttatctgttgccttgaagtttggcagtttctgttctgcctccctgttgctgtatgtgtttcaatcaatcaaatac

SEQ ID NO: 91204 - DNA, 965 bp, Zea Mays
atcgaaaattgaaaaccctataatcctccccaaaggcccaaacctatcgcccgtacgagactgcgccgccgttgccgtctcctcctccgtcccatcactctctgctcgcgcactctcacctgcccgcgccgtcttcgaccgccaccaagatgaacaaggagaggctcatgaagatggccggcgccgtccgcaccggcggcaagggcaccatgcgcaggaagaagaaggctgtacacaagacggtcaccacggacgacaagaggctgcagggcactctcaagagagtaggggtcaacaccatccctgcaatcgaggaggtgaacatattcaaggacgatctcgtcatccagttcttgaaccccaaagtgcaagcttccatcgcagcaaacacatgggtggtcagtggatctccacagacgaaaactacaggatgttctccctgggatcattaaccagcttggccctgacaacatggagcacctgaagaggattgccgaggagatgcagaagcaggtggctgctgccggtgcggcagcacaggtcaaggaagacaacgatgacgatgttccagagcttgttcctggagagacttttgaagaagtagctcaggagacaaaagcctgatcataggctctaaatagtgaaatgttactgcaccaatgctgtgaggtcatggttttcgtgtgatggcactcttcttcctcccctcctaggccagccccagccactctttgtgttcgctgttggaaacttttagtttctccatctcaagcttttacctaaggttgtgcatgttgagatgccatggaaatccattttgctgattatttggtttgtggtcggttcacaatattacatgtgcaccaggttttgctgggttatcactatataatgtttgtgtagtctacacaccgtgactaactcttttgcaggggtattgtaactgtgctttgctgtttccagat

SEQ ID NO: 91205 - DNA, 820 bp, Zea Mays
ccaatctgacgtcaccgtaccaaatcggagcgcgccgccccggttgctgggtgcgctagaatcgattcgttctgacgatagatctgtgctccatgtgccgtttgaccgactggttggttccgttccgttctgttccgcagatgaacaaggagaggctcatgaagatggccggcgccgtccgcaccggcggcaagggcaccatgcgcaggaagaagaaggctgtacacaagacggtcaccacggacgacaagaggctgcagggcactctcaagagagtaggggtcaacaccatccctgcaatcgaggaggtgaacatattcaaggacgatctcgtcatccagttcttgaaccccaaagtgcaagcttccatcgcagcaaacacatgggtggtcagtggatctccacagacgaaaaagctacaggatgttctccctgggatcattaaccagcttggccctgacaacatggagcacctgaagaggattgccgaggagatgcagaagcaggtggctgctgccggtgcggcagcacaggtcaaggaagacaacgatgacgatgttccagagcttgttcctggagagacttttgaagaagtagctcaggagacaaaagcctgatcataggctctaaatagtgaaatgttactgcaccaatgctgtgaggtcatggttttcgtgtgatggcactcttcttcctcccctcctaggccagccccagccactctttgtgttcgctgttggaaacttttagtttctccatctcaagcttttacctaaggttgtgcatgttgagatgccatggaaatccattttgctgatta

SEQ ID NO: 91206 - DNA, 845 bp, Zea Mays
atcggagcgcgccgccccggttgctggatgaacaaggagaggctcatgaagatggccggcgccgtccgcaccggcggcaagggcaccatgcgcaggaagaagaaggctgtacacaagacggtcaccacggacgacaagaggctgcagggcactctcaagagagtaggggtcaacaccatccctgcaatcgaggaggtgaacatattcaaggacgatctcgtcatccagttcttgaaccccaaagtgcaagcttccatcgcagcaaacacatgggtggtcagtggatctccacagacgaaaaagctacaggatgttctccctgggatcattaaccagcttggccctgacaacatggagcacctgaagaggattgccgaggagatgcagaagcaggtggctgctgccggtgcggcagcacaggtcaaggaagacaacgatgacgatgttccagagcttgttcctggagagacttttgaagaagtagctcaggagacaaaagcctgatcataggctctaaatagtgaaatgttactgcaccaatgctgtgaggtcatggttttcgtgtgatggcactcttcttcctcccctcctaggccagccccagccactctttgtgttcgctgttggaaacttttagtttctccatctcaagcttttacctaaggttgtgcatgttgagatgccatggaaatccattttgctgattatttggtttgtggtcggttcacaatattacatgtgcaccaggttttgctgggttatcactatataatgtttgtgtagtctacacaccgtgactaactcttttgcaggggtattgtaactgtgctttgctgtttccagat

SEQ ID NO: 91207 - DNA, 977 bp, Zea Mays
aaccaaacgctaatttattagctctactagaggagcccacagccgtttttcccgtccacagccctcagcccaccacaaacgcgcctccgtaccatccgtcgccgccggcgcaccgcgatggctgcctccgccacggccgcgaggcctctcgccgggaccgccgtcccgctcccgctctcgacgcggacgcggcctgccagggtcgccttgctctccctgattcctcctgctccggcccagcgccttgctctcaggcgtggcgcgtggctctcacccccggagcgcagccggtcggtgcggtgcctggcggctatgagcccggagatgcgggcaacgctggacaaggtcgtaggatccagcaaggtggtgctgttcatgaagggcaccaaggacttcccgcagtgcggcttctcccacaccgtcgtgcagatcctgcgctcgctcgacgtgcccttcgagacgctcgacgtgctcgccaacgaggcgctccggcaggggctcaaggagtactccagctggcccaccttcccgcagctctacatcgacggcgagttcttcggtggatgtgacatcaccgttgaggcatacaagagtggagaactgcaggaaactctagagaaagcaatgtgctcatagagaaaagaaattagaaccaggagtgcacgacatacagttaatcaaaatgttatagtatttgctgtacaattcaggcaatgttaagctggagataccaaagttgtaggcaatccatgtccaaatgctcagtgcacttggtttggaacacatttgttttctgcaatttgtgattaatcatccagctttaacccagatggtatgctaccagattgcagcagatgcagcaaacagcctagcaccctgctactgctttaataaatcctgcctggagtcattaaatcagttttgcaaacatacaaatgtacatgaaacttggggtttctgaaaggtttttatcctcc

SEQ ID NO: 91208 - DNA, 1465 bp, Zea Mays
acaacagaaaaaaaacatttgggtcgtcgagtttgggtccgaacaaaaaatgagcccaacggcaccaccgggaccgggaccgactggagacactgcttgcaattgcgccacgcccgccacgccgccaggccgccactagggtttttcggagcctcgtcatcgtctccgaccccgtgtctccgaacaacatcgcgcggccgccgcctcctcccagtcgccatggtcaggctcaccgctgacctgatatggaagagcccgcacttcttcaacgccgtcaaggagcgcgagctcgacctccgaggcaacaagatcgccgtcatcgagaatgtcggagccaccgaggaccagtttgacacaattgacttgtcggataatgagattgtcaagcttgaaaacttcccatacttgaatcgtcttggcactctactagttaataataacagaatcacacgtatcaatcccaatcttggcgagtttttgccaaagctgcatacgctggtgctcacgaataatcgtctgacaaatcttgcagagattgatcccctggcatctcttccaaagctacaattccttagcttactggataatactgtaactaagcagccagattacaggctgtatgtgatccataaattgaagcatttgcgtttgctggatttcaagaaagtgaaacaacaggagagagttgcggcagcgaaaaagttccactcaaaggaagcagaggaagaggcaaagaaggtgcctgccaaaacgtttactcctggtctgcctgatgctcaggacatcacaatggagccacaaggtcctaaagtagttgctccaactcctgaacaaatcacagctatcaaggctgctattgcaaatgcccacactctcgaggaagctgcaaggctagaacaggtactaagcactggccaagttcctgctgaatttgcagtgcccaggcccgatgcaaacatggccgaagcttcagatggagccgagaagatggacacagatggtgagaaccaagagggcggtgaggctgatgggcagaaacaaggcgaaggaagcaccccaattcaggaggattgaagtcatggtgacatgggctgggtcatccattgtctgagttaggtttgccagttttcgtgggggtgcaggaaagagctagagccttgttgccgcagaactccccctctatggatcgcatgtggatgctaacaagattcttgcttatttttgcagtagatggtactgagaacagaatcagatgttgtaaactatacatacagtcgtgcatgttgccgaatggaccattgtttcggtcgtagcgcttgtgtcggtgcctgactgcagtctgcagagcgagatgtcgccctgccgcctatccttttctcggagtgctttattacaagtttgagtgatggatcctgttgagttgaggcggatgatcgtcatctattgctggatgtttcgttttttt

SEQ ID NO: 91209 - DNA, 1678 bp, Zea Mays
atttgggtcgtcgagtttgggtccgaacaaaaaatgagcccaacggcaccaccgggaccgggaccgactggagacactgcttgcaattgcgccacgcccgccacgccgccaggccgccactagggtttttcggagcctcgtcatcgtctccgaccccgtgtctccgaacaacatcgcgcggccgccgcctcctcccagtcgccatggtcaggctcaccgctgacctgatatggaagagcccgcacttcttcaacgccgtcaaggagcgcgagctcgacctccgaggcaacaagatcgccgtcatcgagaatgtcggagccaccgaggaccagtttgacacaattgacttgtcggataatgagattgtcaagcttgaaaacttcccatacttgaatcgtcttggcactctactagttaataataacagaatcacacgtatcaatcccaatcttggcgagtttttgccaaagctgcatacgctggtgctcacgaataatcgtctgacaaatcttgcagagattgatcccctggcatctcttccaaagctacaattccttagcttactggataatactgtaactaagcagccagattacaggctgtatgtgatccataaattgaagcatttgcgtttgctggatttcaagaaagtgaaacaacaggtttgttcatttcctttggaatggctccaaaatatgttttgggatggaccccagaagtgctgggctgctggcagcaaaagagacaaacaagcaactcttttgactttggattttcacgaattagatgcattaacaccatggaatgctttgtctggcatgttttccattatccagtctgcaaatgttgcttttatttctgattttcttgggagattttttttttgctttgtaggagagagttgcggcagcgaaaaagttccactcaaaggaagcagaggaagaggcaaagaaggtgcctgccaaaacgtttactcctggtctgcctgatgctcaggacatcacaatggagccacaaggtcctaaagtagttgctccaactcctgaacaaatcacagctatcaaggctgctattgcaaatgcccacactctcgaggaagctgcaaggctagaacaggtactaagcactggccaagttcctgctgaatttgcagtgcccaggcccgatgcaaacatggccgaagcttcagatggagccgagaagatggacacagatggtgagaaccaagagggcggtgaggctgatgggcagaaacaaggcgaaggaagcaccccaattcaggaggattgaagtcatggtgacatgggctgggtcatccattgtctgagttaggtttgccagttttcgtgggggtgcaggaaagagctagagccttgttgccgcagaactccccctctatggatcgcatgtggatgctaacaagattcttgcttatttttgcagtagatggtactgagaacagaatcagatgttgtaaactatacatacagtcgtgcatgttgccgaatggaccattgtttcggtcgtagcgcttgtgtcggtgcctgactgcagtctgcagagcgagatgtcgccctgccgcctatccttttctcggagtgctttattacaagtttgagtgatggatcctgttgagttgaggcggatgatcgtcatctattgctggatgtttcgtttt

SEQ ID NO: 91210 - DNA, 1873 bp, Zea Mays
ccaattccaaaaccccgccccctccgtcgccttttccccttccgcaccgcgcgctacgcctcgcgacgccattttcccccggcgatgcctcctcctcctcctcctcctccgcctccttccaccgactcgcacgcggcgctgctgcactcgatcagcaccctcgcttcatacagcgataccctcgccgacttcctagatcagtggaactccgtcatcctcgacgtcgcctccatcggcgccacgttcgctgccctattcccgggccccggttccgaccctaaaccctaccatcccgcgccggagccggacagggagcccgagccccctctcgcgccacagcctgaacccggacccaatgccgcgccggcgcccgagccgcggtgggagcgggagcccagtccctccccgggccccggttccgaccctaaaccctacctccccgcccccgcgccggagccggacagggaacccgagcccactctcgcaccgccacagtctgaacccggactcaatgccgcggcggcgccagagccgcggtgggagcgggagcccagtccctccccggagcccgcacccgcgcccaaccccgaccgcgagcgcaaggacggcggaggcgcaggcgccgcatccgcggcggacctcgagcacaggtgcaagcagatgaactgcgggggcgtccgccgcttcgtcatcgtccacttgcgggacggcggcggcgagtggctgcgccaggtggtgccgggcgcgctgcggcgcgccccggaccccgccgcgctcgttttccacgccgtcggccgctactacatccgcgccgagagccccgacgcggaggccgcgtgcgcgctcctcctcgagctgtacgtgcgcgccgggtgcccgcgcctccgccggggccgggggagcgaggcggcggagctgctgctgcggcaggaggcccgcgaggccgcgctcacgtggcgcagccgcctcctgcgcgtcagcggcgcggtcggcgacgcgcccggcgccgcgggcgcccgcggcctcgctctcttcatggctgccttcggcgtgcccgccgagttcccggcgcaggagctctgcgaccttgtcgacgctgcccaagcctcggcctgcgtccaggtgctcaaggcctccaaactcttcgccaagaagatgcggggtgagcaaaaccaagttggaccttcccccctcttcttcttctcaacagtcgaccctgatcctttttttctctctctctcgggattgcagatgtcgttatcgaaatgataaacaaggccatgtaccttcaggcgatgcgcatcatcctcgtattcgaattccaggaagctttccctcttgcaccaacactcgctctcatcatcgagaaacttgagcacgacacgaaagacgagaacgaggggcaggcatcggagcgcgatgaggacgacttggctcttttgagttcaatatccaaatgcatggaggatcacaagctatctccctcagaattcactacctttgctgccaagattgcgctgctggaagagcgtgttgggaaggcaagacgacaagcctgtagtacaggagctaagcggaagagaccagaggagtgtgtcgagtagaatgctccctgaagcgaagttcagtttcactgtcacgtagaattttcctcacaaaatagttgtaactctccagattgtatgcagactaaccttcacatgttccagtcttacagacatgtactacctctctcgaatatttgtcacccgctagtttatttttaaataaactaaaccgtgacaaataaaaaagaacggatagagtaggaagtatttctgatatatatatcctgaactcaaacaacaaggatacatcatgtggatttctgaac

SEQ ID NO: 91211 - DNA, 1784 bp, Zea Mays
ccaattccaaaaccccgccccctccgtcgccttttccccttccgcaccgcgcgctacgcctcgcgacgccattttcccccggcgatgcctcctcctcctcctcctcctccgcctccttccaccgactcgcacgcggcgctgctgcactcgatcagcaccctcgcttcatacagcgataccctcgccgacttcctagatcagtggaactccgtcatcctcgacgtcgcctccatcggcgccacgttcgctgccctattcccgggccccggttccgaccctaaaccctaccatcccgcgccggagccggacagggagcccgagccccctctcgcgccacagcctgaacccggacccaatgccgcgccggcgcccgagccgcggtgggagcgggagcccagtccctccccgggccccggttccgaccctaaaccctacctccccgcccccgcgccggagccggacagggaacccgagcccactctcgcaccgccacagtctgaacccggactcaatgccgcggcggcgccagagccgcggtgggagcgggagcccagtccctccccggagcccgcacccgcgcccaaccccgaccgcgagcgcaaggacggcggaggcgcaggcgccgcatccgcggcggacctcgagcacaggtgcaagcagatgaactgcgggggcgtccgccgcttcgtcatcgtccacttgcgggacggcggcggcgagtggctgcgccaggtggtgccgggcgcgctgcggcgcgccccggaccccgccgcgctcgttttccacgccgtcggccgctactacatccgcgccgagagccccgacgcggaggccgcgtgcgcgctcctcctcgagctgtacgtgcgcgccgggtgcccgcgcctccgccggggccgggggagcgaggcggcggagctgctgctgcggcaggaggcccgcgaggccgcgctcacgtggcgcagccgcctcctgcgcgtcagcggcgcggtcggcgacgcgcccggcgccgcgggcgcccgcggcctcgctctcttcatggctgccttcggcgtgcccgccgagttcccggcgcaggagctctgcgaccttgtcgacgctgcccaagcctcggcctgcgtccaggtgctcaaggcctccaaactcttcgccaagaagatgcgggatgtcgttatcgaaatgataaacaaggccatgtaccttcaggcgatgcgcatcatcctcgtattcgaattccaggaagctttccctcttgcaccaacactcgctctcatcatcgagaaacttgagcacgacacgaaagacgagaacgaggggcaggcatcggagcgcgatgaggacgacttggctcttttgagttcaatatccaaatgcatggaggatcacaagctatctccctcagaattcactacctttgctgccaagattgcgctgctggaagagcgtgttgggaaggcaagacgacaagcctgtagtacaggagctaagcggaagagaccagaggagtgtgtcgagtagaatgctccctgaagcgaagttcagtttcactgtcacgtagaattttcctcacaaaatagttgtaactctccagattgtatgcagactaaccttcacatgttccagtcttacagacatgtactacctctctcgaatatttgtcacccgctagtttatttttaaataaactaaaccgtgacaaataaaaaagaacggatagagtaggaagtatttctgatatatatatcctgaactcaaacaacaaggatacatcatgtggatttctgaac

SEQ ID NO: 91212 - DNA, 424 bp, Zea Mays
ccccccgccggccgctgcggcaggaccaagggaacaacgagtcgccttcttgcgcgcgcgctcaccattccgcttcccggcacccgccgccttcccgagccgccgcccggctcgcgtgcccgtcgccgccgcggcgccggagcgcaggccgccgggcgcggtggcgtccaccaccaactacgtcgtgccgctcgacgcggcgccgtccgggatcacgcgcccgctcgtcgagatcctccgcgacctcaacaagcgcgtcccggacgccatcgtgcggccctcctcccggcgcgcctccgcctccgaccccgtcatcccctggtaccatgccaataggatgctcagcttttatgctccaggtgaggctacactccgaactcatgctactgataatgcccactcactcactcactatcatgtcatg

SEQ ID NO: 91213 - DNA, 330 bp, Zea Mays
atggcgcgctcgtggcccaagatcgccgacgggtacgagagcaatggaccgagaatcctgagatcgcgcatgggaagcactgtttgtgccatcaccacttgcttctccgatggcgtccttggcaccgtgcttggggcgtgcctcctgtcccctagcctagaattgtcgctgcttcacgagaaggttcacagggaggctgctggaacagcatcgctgagcgatgaacggttcgacgaccccgtgtctgcggcagaagaggcagcgttctgcaaagcctgcgcgaggttcggtttcggcctttacctgtaccatgaagacgagacaccatag

SEQ ID NO: 91214 - DNA, 2267 bp, Zea Mays
aggaccgccctcttcgctgcacccaatcccttgtcctgtcctcgaaccgtccgccgccgcgttcaacatgggcgacccgccgacgctcaagaggcccaagctcgagaaggccgacgacgactccacctactgcccccgcccgtcctccaatggcgccgcgcccgtacgcacaccaggcgccaccgccgccataggggcggcgccgggtgacgacgtggaggaggaggatgacatcgcggaggaggcggtcatcgccctgatcgcgcaccgcgagcgcgacgtcgagcgctgcaagctcaagttgctccactaccagtctctcctggacaccgcggagatgaagctggaggaggcgcactcgaggctcgccaggttccgagatcgcaagccgccgccaactcggtcggaacccaagccaccgacgccgccaatccagagggaacacaagccatccccgccgccgatccagagggatctcaagccatcgccgcagccgctaatccagaaggctccttcgcccgcgccgcagccgtcggcgaggccgcagcttgtcatccctgggaccagcaaccgaccgaccccgcgccctgagcccatgcctgggttgaagagggccgccgccccgtcatcgtcttcatcaccggcgccaccagagcggtcaaggaaagaggagaagaagcccaagataaagatggaacagaaggagcatcagaacttgattccgagtgttgggaaatcatctgcgactgtgcttagatttcaaggcggaaatttggtctcgagccaacacaggaggaagcttaggtgtcttgagctatgccctgctaatgatcagcttgttgttaccagtgcgctggacggattggttactttatggcaagtggagactagaggaccttctctctcatttcgtggcaaaacggatttcttttccccaaagcatagatggcctgaagatatagcttggcatccagatggtgagacaatttttgctgtatacactgctgataatggtgattctcaggtttcaatgacaaaccttatatcaggacaaaggaaagttactttcctacccgagaagcctcacacaaaaggcatcataaacgacataagtttcatgccctggtctgatgtatgctttgtaactggaggaagcgaccatggcgttatactttgggaagacaaagatgatttatggaaacccaagagagtgcataaggatttccattcatccgctgtcatgggtgttgctggaatgcaacagaaaaaaacaatattatcagtaggctgtgacaagaggataataggatttgatctctctgctggaaggacagagttcaagaacctaattgatagcaaatgcatgagtgtgttagcaaacccatgcgattgcaacttatacatggtgcagacaggggctccaggtagacagctgcgcttgtttgatgtcaggcttaggcaatctgaggttcatgcatttggttggaaacaagagagcagtgagtctcagtcggctctaattaaccagtcatggtctccagatggatggtacatgtcgtctggttcagcagatcctgtgatccacatcttcgacatcaggcatcatggccagaatccttgccagtctgttcaggcacaccagaagcgggtgttcaaagctgtttggcaccgaacgttgccatatctgacctccatatcatcggacctcaacattgggatccacaaatattcatgaaacgttttgggctgattttggcgcttggcaaattttttgttgtggattaggaaccatgaagacctgtgaaattttcaggactttgcatcaatcgaagatacagcaaattcagcatgctttcgctggacctgcttcaccattgactttctctgtgggagaaccatgcagctcagcagctgaagagccccacggttggatgtttgcgcgagctgacccaaacttttccaccttttgagctgctgctggagtggtatggtaggccattcatccgaacactgtttggctcgatgtgttgccctggttatttctgggaaggaaacagtcaactatacacattatatccaacatattcagcaatgtattccccctgtctttttgcagtgaatttgcccttgttggttggttggttgacagggcattcagaattttttatcagcatgattttagagcagctagtataacagtataccaactatatattttctctgtcctacaaaaattaatatgaattttagctttgaatcagaacaaa

SEQ ID NO: 91215 - DNA, 921 bp, Zea Mays
gggcgtctctggtcggtcgctttccctcctcagcttcagccttcagctcctctcctttcctctcctctcctctcctctcctctccacagctgcagccagagccacccaccttatcgtcatcctcgctcgctcctcatcgccagcgcctcctcctcctcctccttcttccccaccgctgccgacatggctgcgcaagaagagaagaccgctgttgttgttgctgctgctgccgatgtcgcgacagaggagcctacgccggcggcggagcagcaacctcagccggctggggcggcgcgcagggcaggaccatcggcgcccggcggggctccgcccaaccccttcgacttctccaccatgatgaaccttctcaatgaccctagcatcaaggagatggcagagcagatcgccaaggacccggcgttcacggagatggcggagcagctgcagaagacggtggtgtccccgcggcagcaacagcagcagcaggcgcggcagcagcagcagcagctggacccgcagaagtacgtggcgacgatgcagcagctgatgcagaacccgcagttcgtggccatggcggagcggctaggcagcgcgctgatgcaggaccctgccatgtccgccatgctggggggcctcaccaacccggcgcacaaggagcagctggaggcccgcgtcgcgcgcatgaaggaggaccccacgctcaagcccatcctcgacgagatcgagtccggcggccccgccgccatgatgaagtgagtgagctgctggctggatttggattcctttcttccttgtacaagcggtagatgctccagcaagggaaggaagaagtcccataccatgaacaaatgatgggatgcgtgttcaatttggttcaggtactggaacgaccctgaggctctgcagaagttcggccgcgcg

SEQ ID NO: 91216 - DNA, 1583 bp, Zea Mays
gggcgtctctggtcggtcgctttccctcctcagcttcagccttcagctcctctcctttcctctcctctcctctcctctcctctccacagctgcagccagagccacccaccttatcgtcatcctcgctcgctcctcatcgccagcgcctcctcctcctcctccttcttccccaccgctgccgacatggctgcgcaagaagagaagaccgctgttgttgttgctgctgctgccgatgtcgcgacagaggagcctacgccggcggcggagcagcaacctcagccggctggggcggcgcgcagggcaggaccatcggcgcccggcggggctccgcccaaccccttcgacttctccaccatgatgaaccttctcaatgaccctagcatcaaggagatggcagagcagatcgccaaggacccggcgttcacggagatggcggagcagctgcagaagacggtggtgtccccgcggcagcaacagcagcagcaggcgcggcagcagcagcagcagctggacccgcagaagtacgtggcgacgatgcagcagctgatgcagaacccgcagttcgtggccatggcggagcggctaggcagcgcgctgatgcaggaccctgccatgtccgccatgctggggggcctcaccaacccggcgcacaaggagcagctggaggcccgcgtcgcgcgcatgaaggaggaccccacgctcaagcccatcctcgacgagatcgagtccggcggccccgccgccatgatgaagtactggaacgaccctgaggctctgcagaagttcggccgcgcgatgggcgtcggcgtcggcccgtccggcgaggccggcggcgcagagcacgccgaggcggaggacgacgccggggaggaaggcgagtacgaggacgagtccatcgtccaccacaccgccagcgttggcgacgtcgagggcctcaagaaagcgctggaggacggcgcggacaaggacgaggaggactcggaagggcggcgtggcctccacttcgcgtgcggctacggcgagctccagtgcgcgcaggcgctcctggaggccggcgccgcggtggacgccgtcgacaagaacaagaacaccgcgctgcactacgccgccggatacggccgcaaggactgcgtcgcgctcctgctcgagagcggcgccgccgtgacgctgcagaacctggacgggaagacgcccatcgacgtggccaagctcaacaaccaggatgacgtcctcaagctgctggagaagcacgccttcgtatagacgtcccacgccgccggccggcccgtcttgctcgtctgctcttgtcgccgctgcggccacgtcgcttgcctctgctactgctgctgccgtcgccgccattaatgctttgttgatttctctcctggtcgagacaacgcaggttccttcatcacttcactgttgagtatttgcattgggtgtgtatgtatcggattttgctttgcgtgatcacggtaccatatttatttatcggactcctcgttcatcaggtggaggttttcgtaatgaataaggatgaaatttccatttcaccgtccaatccaatctgtgtttcgagttgc

SEQ ID NO: 91217 - DNA, 2671 bp, Zea Mays
cctggacgggaagacgcccatcgacgtggccaagctcaacaaccaggatgacgtcctcaagctgctggagaagcacgccttcgtatagacgtcccacgccgccggccggcccgtcttgctcgtctgctcttgtcgccgctgcggccacgtcgcttgcctctgctactgctgctgccgtcgccgccattaatgctttgttgatttctctcctggtcgagacaacgcaggtggaggttttcgtaatgaataaggatgaaatttccatttcaccgtccaatccaatctgtgtttcgagttgcagttcaggaaaaaaattcaaaattttgcgacgttaccaccagcagtccaccaccagaacgaatccaatccaattgggagagggcgtgtatgaagggaatactaatttctaggtgcttatccgtaaaatgcttcacgccattgtgtgcctcacataatcaatcggacggctcagaatcgtccaagattggaccctgtacccggccgcagaactccgcgcccgtcggcgacatcctcctccctcccaatgcttcgccggcgccggcgtgtcatccctctcctcgtccggtgctcgcagctccgccgccaaagcaccgtctccaggtaccgtccgcttccgcggcgacgagcccgtggagacacccgctacaccagcaacgacgacaccctcaccctcggcctcgcgcggcggaggcgcgacgccaccggcaacgctgctctccgctgccacggtaccgtcgcggagccctctaccccgccgtggcagcgcgacgcccaagacgacgtgtgctcgacgaccggccacgaccccaggccgcagcacggcgccgcggccgctcgtgccgtgctcgatgacgacgagacgcctggcgctgacgcctacgccgccatggtcgccagccgactcagggagcgcgacctgacgcgcgcggaggcgctcttcggcgcggcgcccgcggctgcccgggggctgtatctggataccgccatgctcgacgggtacgccaaggccggccgcgtcgatcgcgcgcgcgagctgttcgacgcgatgccggtgaagaacgtcgtcacttggacctctatggtttccgggtacttccgcgccggccgcgttcaggaggcgcgggagctgtttgacgtcatgcctgaacggaatgactattcgtggacgacggtggtgcaggggtacgcgcgcaatgggatgctcagggaggcgagggagatgtttgatcggatgcctcagaggaatgtggtcgcttggacggccatggttaaggcctacgttgactgtgggcagattcagcaggcgtgggaattgtttgatatgatgcctgagaggaactcgtattcctggaatgccatgatttctggttttctcagcattgggaaagtggctgaagcagttcagttgtttgagaggatgccacacagacacaagaatgtggtttcttggactacaatggtcgctggcttggcaaataatggacttgcttgcagggcaagagagttctttgatcggatgccagcgaaggacactgcggcatggaatgccattatcaccgtttatgccaacaatggccagctgaatgaggcgcagagattatttgattcaatgcttgcaaaagacctggtgacctggagtaccatcattgaggcatattcgaagaatgagcgtaagcatgaagccttaaacatgtttctacttatgcgccattcagcagtgtctcctaacattagaacattaattagtatcctggttatatctgagagcacagtcgaagttaagcaaattcacgggttggtcattgcacttggattcctgtcagaaacttccttaggaaatgctctgctcacaatgtattcaagaagtggagatctgatgtctgcctggtttgccttcaaaaggttggaacagaaggatgccataacatggacgtcgatagtgcaagcttttgcagaccatggctgtggttaccatgccttactggggtttgctcagatgctgagacatgggtataaaccaagttcgactaccttcactgctgtgctgtctgcttgtaggcatgtggggttggttgggaaaggtcgcaagatgtttaaatccatctaccatgtttatggattggaaccaaccattgagcactattcttgtcttgtggaccttctaggtcgagcagggtatgtaagggaagccaaggaacttgtcgatggtatgcagcagggtatgcgcgatgaggccattcttgcgacgctcctgggagcctgtgtggtgcataatgaggtagaggtagcaagagaagtgggtgaggatcttgtcagatttgacccctctggtaccggaggctacaggctcctggccaatgtatttgcatcgcatggaatgtgggatgaaacagcaaatgtgtggaaggtcatgaggggcagtaaggcaaagaggactcctggttttagtcagattgaggtgaacatgaggaatcatgtgttctactcaagggatcaagagcatccacaatgtgctgaaatatatgagatgctgattgacacaattgctcctcagatgaagggttcatcatgcgtgggactctgggaactgaccctcttgtccgatccacgcgaatcgactgcctggtgaccttggttgcctcattgcctg

SEQ ID NO: 91218 - DNA, 143 bp, Zea Mays
gacttatgatttcaaaactcctgggatctgctctagtagcatattggccttgttctgtgtttcagggaagcaagagaaggtcacttttttgttctgttggtctactgtaactacaatctgttcagttcagctttctgaaagta

SEQ ID NO: 91219 - DNA, 1428 bp, Zea Mays
ctcggttttctggattctagctaacctggatgctaccgactgtgtgtattgtttttgaaagactcgaggaaaattccttgatttccctctttatcttctgcatcccactcccatttactgttctttgttccgttttctaatgagccaccgccgtcttccttatctgctgcatcccaatcccatttaaattttgtcgtcaacaatttcgtcttctcggtttctgacttattccggggcatttttttttcttgtttcgagcctgtgagcctgattccattttgacccatggcggcggcggcggttcatgagccggaggtgatccgcgacaaggcggcgatgcgcgcgtggtcgcgccgccgccgcgcggagggaaaggccgtcgctttagtccccacgatgggcttcctccacgagggacacctctcgctcgtctccgcggccgtggcggcctccgccggccccgtcgccgtcgtcgtctccatctacgtcaaccccagccagttcgcccccaccgaggacctcgccacctacccctccgacttcgccggcgacctcggcaagctggccgccaccggggtcgtcgccgcagtattttgccccccggacctctacgtccgcggcagcgctgaccgcccctccgccgccagcgcgtccgggggcgcggtgtcttgcctggaggatgcaggtgggcatgcgcacgagacgtggattcgggtggagcggctggagaaggggctgtgcgggagcagcaggcctgtcttcttccgcggcgtggccaccgtggtcgccaagctgttcaatatcgtggagccggacgtcgccgtgttcgggaagaaggattatcagcagtggcgcgtcatttgtcggatggttcgtgatcttgattttgccatacagatagttggttcggaggtagtgcgagaagctgatggtcttgcaatgagctctcgcaatgtaaatctgtcagaggaggatagaaagaaggcgttatcgatcagtagatcactggtggatgctagaaccgccaccctcagtggaagcaaccgtagccaagagataaaagatcaaatagtgcggacaattacagaagctggcggtcaggttgactatgttgagattgtggagcaggaaagcttggtgcctgtggagaggatggaccgcccttgtgtaatttgtgtcgcggcatggtttggaaaggtcaggctaattgacaacatcgagatccatgtagatagctctactgttttgtctatctgatgaacgaagatgtttagacacggcaaaatggcataccactttctacgtagcagtagcagaccaagaataaatagcatgatgggctgaatctggatagaagaccatgagctcagtgctagccattcttgaactgctagaatgcagagaataagtactttcacagtttcagtc

SEQ ID NO: 91220 - DNA, 1400 bp, Zea Mays
gtctggaagcgcccgcgcggccccgcgaatattttgaactgagccatccacgcaccgccgccttttgagctcgcggcgagggtttgggcggcgggcgcgacatggccgggaagaagaccaccccagcaaagcccgccccttcttccactcagcgcaacggcagcgccgtccccggttccaagagccggcctaagcaggcttcggaggaggccgcggccgccagcgccaaggcgcagtcgccctccaaaccgcgcaaaataaccaaggagaagccggcggccgcgaagaagaagcgcgagaaaacggagccccaagagggtggcaagcgtaggaagcagcaggtgttagccgacgcggcgacgccatcgaagaagaggaagaagggcggcgaaggcccggaacccaaggaagccacgcccgcgaagaagcacaagccagccgggacgcccccgaagaagcagaaggcgcccagcaaacccgcgacgcctgctaagaagcagcagtcacccggcaaagcggagaagctcacgccgaagaagaagcagcagtcacccggcaaagcggagaagcccacgccgaagaagaagcagcagtcacccggcaaagcggagaagcccacgccgaagaagaagcagcagtcacccggcaaagcggagaaagccgcgccgaagaagcagcagcagcagccagccggcaaagcgcggaagcccgcggcggcggcgacctcgcccacgaagaagaagcaagccaagcgcgagaagcccactcccaccaagaggaagcgcggcgacgacgagcaagcaaaggaggccaagagccccaagagagcgcccgcggatggggcggcgcgcgcatctacgcccgtgaagaagaagctgaaggaccagaaggcggctgcggcaaacatgggtgtgtgcagcttctccatggcgcgggtgcggcagctgatgcgggccgaggaccccaccatccgcccttccagtgaggctgtcttcctcatcaataaggcttcagagttcttcttggggaagtttgcagaggatgcttatcacaatgccgcgaaggatcgtaagaaatccattatttacgataatctttcaacagctgtttccagccagaagactttaaagttcctttcagattttgtaccgcagagagttgcagccgaagatgctttgaaggcaatgacgagcaacaactcgtaaccgattatgctagactagattgttagtcctctactcctctatttaggcacggcagtgttttttctccagcatgtacaaggaaacctgtagtactgactcattactgaattctatatttgatctgcatttcaggcagaacagctgatgcaccgtaccctgtggtttctgtccaatttatgatttattaccccgaga

SEQ ID NO: 91221 - DNA, 1348 bp, Zea Mays
gtctggaagcgcccgcgcggccccgcgaatattttgaactgagccatccacgcaccgccgccttttgagctcgcggcgagggtttgggcggcgggcgcgacatggccgggaagaagaccaccccagcaaagcccgccccttcttccactcagcgcaacggcagcgccgtccccggttccaagagccggcctaagcaggcttcggaggaggccgcggccgccagcgccaaggcgcagtcgccctccaaaccgcgcaaaataaccaaggagaagccggcggccgcgaagaagaagcgcgagaaaacggagccccaagagggtggcaagcgtaggaagcagcaggtgttagccgacgcggcgacgccatcgaagaagaggaagaagggcggcgaaggcccggaacccaaggaagccacgcccgcgaagaagcacaagccagccgggacgcccccgaagaagcagaaggcgcccagcaaacccgcgacgcctgctaagaagcagcagtcacccggcaaagcggagaagctcacgccgaagaagaagcagcagtcacccggcaaagcggagaagcccacgccgaagaagaagcagcagtcacccggcaaagcggagaagcccacgccgaagaagaagcagcagtcacccggcaaagcggagaaagccgcgccgaagaagcagcagcagcagccagccggcaaagcgcggaagcccgcggcggcggcgacctcgcccacgaagaagaagcaagccaagcgcgagaagcccactcccaccaagaggaagcgcggcgacgacgagcaagcaaaggaggccaagagccccaagagagcgcccgcggatggggcggcgcgcgcatctacgcccgtgaagaagaagctgaaggaccagaaggcggctgcggcaaacatgggtgtgtgcagcttctccatggcgcgggtgcggcagctgatgcgggccgaggaccccaccatccgcccttccagtgaggctgtcttcctcatcaataaggcttcagagttcttcttggggaagtttgcagaggatgcttatcacaatgccgcgaaggatcgtaagaaatccattatttacgataatctttcaacagctgtttccagccagaagactttaaagttcctttcagattttgtaccgcagagagttgcagccgaagatgctttgaaggcaatgacgagcaacaactcgtaaccgattatgctagactagattgcagaacagctgatgcaccgtaccctgtggtttctgtccaatttatgatttattaccccgagacctgtattagtccatagataagagtggattcaaatgtttcgtgaaaggatttatttaga

SEQ ID NO: 91222 - DNA, 1626 bp, Zea Mays
atggcggcggcggaaccggtaccagtaccagtaccggcggcagctgccgggaccaacaataagatcaagacggtggtggtgctggtgcaggagaaccgctccttcgaccacatgctggggtggatgaagtcgctgaacccggacatcgacggcgtgacgggggccgagaccaaccacgtggacgcctccgacccggcctcccacgccgtccgcttcagcgacggcgccgagtacgtggacccggacccgggccactccatgcaggccatctacgagcaggtctacgggacgcccttcgtcgacgccgccacgacgcccgccaccccgccgggcgtcgccccctccatgtccggcttcgcgcagcaggccgagaaggagaggcccggcatgtccgccaccgtcatgagcggcttccgccccgacgccgtgcccgtgtaccgggacctggtgcgggagttcgccgtgtgcgaccgctggttcgcgtccaacccggcgtccacgcagcccaaccggctgttcgtgcactccgccacctcccacggcctcgtcagcaacgacagcagggcgctggtggctggcctcccgcagcggaccatcttcgacgcgctccacgacgagggcctctccttcggcgtctactaccagtacccgccgtccacgctcttctaccggagcctccgccagctcaagtacgccgccagcttccacgccttcgacctccacttcgcgcgccactgccgggagggcaggctgcccagctacgtcgtcgtggagcagcgctacttcgacctccgcttcctcccggggaatgacgaccatccgtcccacgacgtggccgagggccagcgcttcgtcaaggaggtgtacgaggcgctgcgctcgggcccgcagtggccccagacgctcctcgtcgtcacctacgacgagcacggcggcttctacgaccacgtgcccacgcccgcgggggccggcgtcgtgcccagccccgacggcatcgtcagcgccaagcccttctccttcgccttcgaccgcctcggcgtccgcgtcccggcgctgctcgtgtcgccctggatcgagcccgggaccgtgctgcacgggccaccgtcggggccctgcccgacgtccgagttcgagcactcctccatcccggcaaccgtcaagaagctcttcaacctcaggagcttcctcaccaggcgcgacgcctgggccggcaccttcgactgcgtcctcacgcgcgacataccgcgcaccgactgcccactcaccctgcccgagccagtgaagctgcggcggacggcggcggcggagcatgccccgctgtccgagttccaggaggagctggtgcagctcgccgcggtgctcaacggcgaccacaccaaggagtcgtacccgcaagggctcgtcgagggcatgacggtggcggaggcggccaggtactgcgtcgacgccttcaaggccttcttggacgagtgcgagaaatgcaaggaccgcggcggcgaggacggctcccacatccccacggtgaagccgacgacgacggggaaggagaaggacaagagcaagagcagcttcgcttccaagtcgctgtcctgccttccctgctgtgtccgtccctcttcctcgtga

SEQ ID NO: 91223 - DNA, 1487 bp, Zea Mays
gcccgagctcggccggtcgccgccgtaccgtaccagttgcagctcgctaggatccagcgcatgtttccattgtcccacttccatatatatataaataacactactgtggctagtcgtcgtcttccccggacgacccccggccggccggagagcgcgccgccgtgctttcttcctgcggtggtggcgcgcgtatacatcgtcgactcttgacgagctgagggcgtacacacagctagcatacatacacacaaagcccagcagcaggtagtctagccaatcaaacaagcgtcgtttcgtaccgggaggccggccggccgcgcgcggagaagatgctgtcctgcatcgcgtgcgtcaataaggaagaagacggcggccgggaccgcgaggagcatggcggcgacaccccgagctgcagagaccccgtgaagtcactcacctcccagctcaaggacatggtgctgaagctgtcgggcacccaccaccgccagcacggcgcgcagcacaggcgcggcgggtcgccgccgccgccacggggccgggccacctccctgtaccgcagcggctactaccgccccggcgtcgtgcaggacgacatggccgtgcccccggccacgtacctgggaggtggaggcgccggcgcgtcgagcgcgagctccaccccggcgtgggacctgcccgccgccgcccgcgcggacggcgaggcctgcagggagtgggtggcgcaggtggagcccggcgtgcagatcaccttcgtgtcactccccggcggcgccggcaacgacctcaagcgcatccggttcagccgcgagatgtacgacaagtggcaggcgcagaagtggtggggcgacaacaacgagcgcatcatggagctctacaacgtccgccgcttcagccgccaggtgctccccacgccgccgcgctccgacgacgccgagagggagtcgttctactcgcagtctcaggtagggagcccctcggccaccccgtcgccggcgccgctcacgccggagaggatcagctggggcgcgttcgcgcggcaggtggcagcgccgccagcatcatcaggtgccaccggcgccgcgcggcagcacagcttccggccgatgtcgccgccgccgccgtcgtcctccaacccttcggagcgggcctggcagcagcagcagcagcgacacatcggtggtggtggtggcggtggagcggccggcggcaagagccccgccgcctccgaggccgccgccgccgccacggaagcggcgcggaccaccacgtcgtccagggacgacgtgtccgtcagcaacgccagcgagctggaggtgtcggagtggatcatccaggaccagcccggcgtctacatcaccgtcagggagctcgccgacggcagccgggagctgcgccgcgtcaggttcagccgcgagaggttcgcggagctcaatgccaagctgtggtgggaggagaacaaggagaggatacaggctcagtacctttga

SEQ ID NO: 91224 - DNA, 935 bp, Zea Mays
aaagatcacagctttattagtagtagtactaacagcaacaaaaaaaaaacatttttgtttgtgttccgtagagggagtcgttctactcgcagtctcaggtagggagcccctcggccaccccgtcgccggcgccgctcacgccggagaggatcagctggggcgcgttcgcgcggcaggtggcagcgccgccagcatcatcaggtgccaccggcgccgcgcggcagcacagcttccggccgatgtcgccgccgccgccgtcgtcctccaacccttcggagcgggcctggcagcagcagcagcagcgacacatcggtggtggtggtggcggtggagcggccggcggcaagagccccgccgcctccgaggccgccgccgccgccacggaagcggcgcggaccaccacgtcgtccagggacgacgtgtccgtcagcaacgccagcgagctggaggtgtcggagtggatcatccaggaccagcccggcgtctacatcaccgtcagggagctcgccgacggcagccgggagctgcgccgcgtcaggttcagccgcgagaggttcgcggagctcaatgccaagctgtggtgggaggagaacaaggagaggatacaggctcagtacctttgaaaactgagctggaatgaggctgaatcttactagttcagttgagcagaagctggtgataattatggtgttgtgcaaggggctgacatataattaatctggtataagtatacggggagagtttatgtttcgagttaatttggagatgggggggggggggaggagataggagggggttcatttggagctgggaaagataggaggggatgagataggggttcatgcatgtttagggcacctgacctggctgcccaggtaacttgtgattggtgtaccgtactaaagtttttaccaatccaccactattgcgtctaa

SEQ ID NO: 91225 - DNA, 1356 bp, Zea Mays
gtcttcatgggtggtctgcaccggtaccgcacaacccccacacccgcagcatccccatttctccgtcccaaaaccctagtctagtccccccacacctggatccatcgggtcggaggccatgacgacggcgaggctccgatcctcggcctccctccgcggggctctcctccgccacttctccgtgggtcccgcctcgactccgcgcgccgtctcccgggtcccagatttccaggttcctcagtctattatgtggaggcatttcgcaacgtccaggcctaattctcttgcaagacgcgacaactttggtctgatggcctgtttgcacgctcagatacgatgcgcttcgcaggctgctgctgtgaaagaaaccgaatccagtagcagcaagataagcatcgggcccaaaccaaaacagatcaaggaggatgacgaggatgctaacctggtataccaagggccaatatcatcgaccataaagaaagtgaagcttctctccctgtccacctgctgcctctccgtgtcgctggggccagtggtaacattcatgacttcgcctgacatgaatgtgatcctcaagggagcggttgcatccaccgtcattttcctcagcgccactacgactgcagcgttgcattggttcgtgagcccgtacattcacaagctccggtggcgtcctggttcggatagctttgaggccgaggtgatgacatggctagctactcccctcaaaaggactgtcaagtttgccgatgtcaggcctcctgaaacaaacaggccctttgtcacctttaaggctgaggggaacttctactttgttgatgctgaccacttctcgaacaaggcattgttggctaggctaacgccgcagaagcttcctcatgagtctgcgttcaagaacttgtgattgaaagttgttccgcttgcccatgcctgcacccttttaggccgttttgagaacatttctgtgacaactcttcctgctaatactttcctgaagatgtgttactatatatttgtactgttgcgtaacattctctatgtggagaattgctagctgcttgtgtcgagcagttttagtttaggaaacactatgaggtctggtaaacagttgagtctgcattttgaataagtagatggccagatatctgcctgggatccttaaatgtcttcttctattctatctgaaattgccttcgccttgctgtcgtctatgattgctcaaatgtaagctggtgcacctgtgttgccttggggtgtgaaagcattattgggtaatcgtatgtaccttttccatttgcttgctggttgattcgtccacccaagattcattttaggaaaaaaaaaatcaaatcaagc

SEQ ID NO: 91226 - DNA, 1850 bp, Zea Mays
atgggtggtctgcaccggtaccgcacaacccccacacccgcagcatccccatttctccgtcccaaaaccctagtctagtccccccacacctggatccatcgggtcggaggccatgacgacggcgaggctccgatcctcggcctccctccgcggggctctcctccgccacttctccgtgggtcccgcctcgactccgcgcgccgtctcccgggtcccaggtatctctccgcctcttgatcgctcccttctctccggtctccgccgtgtttgtactcccgcctctgtgttagcttcgatcccaaaaatggtggcgtctaaggtacgagtgcatgcctgaaatgtttgaggaacagtgatctgtatgttttcttgttcgattattatatacctgggacggtggggacaggcgtgagctcttcttctctgggatatggggcggttatgtcttttgttactgcgaattgcttttcagacgaaaattgatgtgttctagatgctggaatgtcacactactagctatccttttttgatacaattgtaatttgcaaggttcagtgatgttatcttcagcatcggtaaatctccgctcttggattcaaaactaggtataatctgctaatggcctaatgccttttggttggtctatgagatcttctggcactatatagttgcattttgccagcttatttatagtggtgcatagggtgcagtttcttgtctactctgtcaaatctagtgcaacatttccatatctttccaccgaatgataatatataccttcactgaaactgtctgatctactagtacgtctcggtattcaattattggataactgaagtgaatgttaatgttctgcatatttgttgtagcttagcttgtgtgcatcactgtaaagcactataccatgccgaattatgctcattgttttttttttcgttctcctccagatttccaggttcctcagtctattatgtggaggcatttcgcaacgtccaggcctaattctcttgcaagacgcgacaactttggtctgatggcctgtttgcacgctcagatacgatgcgcttcgcaggctgctgctgtgaaagaaaccgaatccagtagcagcaagataagcatcgggcccaaaccaaaacagatcaaggaggatgacgaggatgctaacctggtataccaagggccaatatcatcgaccataaagaaagtgaagcttctctccctgtccacctgctgcctctccgtgtcgctggggccagtggtaacattcatgacttcgcctgacatgaatgtgatcctcaagggagcggttgcatccaccgtcattttcctcagcgccactacgactgcagcgttgcattggttcgtgagcccgtacattcacaagctccggtggcgtcctggttcggatagctttgaggccgaggtgatgacatggctagctactcccctcaaaaggactgtcaagtttgccgatgtcaggcctcctgaaacaaacaggccctttgtcacctttaaggctgaggggaacttctactttgttgatgctgaccacttctcgaacaaggcattgttggctaggctaacgccgcagaagcttcctcatgagtctgcgttcaagaacttgtgattgaaagttgttccgcttgcccatgcctgcacccttttaggccgttttgagaacatttctgtgacaactcttcctgctaatactttcctgaagatgtgttactatatatttgtactgttgcgtaacattctctatgtggagaattgctagctgcttgtgtcgagcagttttagtttaggaaacactatgaggtctggtaaacagttgagtctgcattttgaat

SEQ ID NO: 91227 - DNA, 115 bp, Zea Mays
ctgtgcggggtctggggaagagtatctttaagcgccaagccttacccgcataatatgcagaggctggggctcgaacccgggaccttccggttacagacggtaggctctaccgctg

SEQ ID NO: 91228 - DNA, 1749 bp, Zea Mays
cctcgttcgactaacgtctacttctgtgatttcccccggcggcgttgggcgctggtttaggagacgaaaaggcggcgcgcggcggaaaaccctagcttagctcctctccggcgtcaagtgctctccggtttgagggcgcgatgagggtgaaggtgatttcgcgttccaccgacgactacacgcgcgagcgcagccaggacctgcagaaagtattccgcaactatgatccagcgcttcgtagtcaagagaaagctgttgagtatactcgggcactcaatgctgccaagttagagaagatatttgctaagccatttatcggagctatggatgggcatattgacgcggtatcgtgcatggccaaaaaccccaatcatttgaaagcaatattttctggttcaatggatggagatgttcgcctttgggatattgctgcgaggaagacagtttgtcagttccccgggcaccagggtgctgtaagaggtttaacaacatccacagatggtgatcttcttgtatcatgtggcgttgactgcactgttcgactctggaaagttccgatgcttaaaatggtggatactagtgagcgtgctggagataattcccagccatcagcagtttacacctggaagcatgcattctggggtgctgatcaccagtgggacggcaatcttttcgcaactgttggtgctcaagttgatatatgggatcctgacaggtcagagccaataaatagcttcgaatggggtaaagatacggttctttctgtgcgatttgatcctggagactctaatattttgattacgtcgggcagtgatcggagtctgacactctatgacttgcgtatgtcatctccagctagaaagctgataatgaagacaaggtgcaattcagtatgctggaaccctagagagcctatgaacttcactgctgcaaatgaagacacaaactgttactcctttgatgctagaaaattagatgaagcaaaaattgttcacaaaggccatgtttcagcagtgatggatattgactactcaccaacagggcgtgaatttgtcactggttcatatgatagaacagtaaggatttttaattatcttggagaccacagcagagagatttaccacaccaagaggatgcaaagggtgttttgtgtgaagtacacctatgatgggacctatttagtctctggcagtgatgatacaaatcttcgtctgtggaagtccaaagcttcagaacaacttggagttcttcttccacgggagcgcaaaaagcaagagtaccaggatgctttgaaggagcggtacaagcatctcccagaagtcaagcggattgtaaggcatagacatctaccgaagccaatctacaaggcagccaacctacggcgtacgatgatcgaagctgaaagccgtaaagaggaaaggaggcgaaagcacagtgctcccgggagcatgcctgtgcagcccttcaggaagcggagaatcatcagagaagttgagtagacatgcggtttgcattgcatggtcgtggtacacgtttgtgtttctgaggcgatggagttgagagaatacatgatgtttcctttgggagttgagctccagttttgcctttcgtactacatatatgtgctccatcaatcagtttgtttgactagttattattgtgtatttgaaataccacacaaaatattcatatcgtgccattgcattgcaagaccgtgagcaatccgaattgaaggtaggacgttttctc

SEQ ID NO: 91229 - DNA, 980 bp, Zea Mays
gcggcaggcagacgcagcaccaacaacaacctcctcctcctcctaagaatctctcatctgagatacagacagattaatcaacgcccgcacctcctatgggcacgaccggcgacgctccggctccggcgggggatccgcaggaccgccaccgtacccaccccccggcgacgaagcagcggacgacgctggtgttcacgtacgggacgctgaagcgcggcttctccaaccaccgcctcctggaggagctcttcgcgagcggggacgcgtcgctggtgggccccgcggtgacgtcggcgcggctgccgctggtgtgcgggccgtaccgggtgccgttccttctgaacctccccggcgccggcgccggggcgcaccgcgtgcgcggggaggcgtacgcggtgacggcccgcgggcttgcgcggctggacgagctggagggcgtggagacggggcactacgagcggctggccgtggccgtggacctcgagggcggcggcgcggtggatgcgatcgcctacttcgcgcaccggagctacgccaacgacatgtggcggcgcagcggggagaagggcgtccccgagtacacccacggcgtggcggccgggtatgtccggcgcaaggaccggccgcaggggcagacgttcctggagcagatccggatcttcaattcgtctcctcccaatccgcttaataatccctcctagctcgcgcgctgcctcaactccttcaattcaagtttctccgatccgtgtcatacatgattatgggatgtatgtggtcagatcgagaaggtgtgttatatttaatctagacatggtctatattttatttaattatgtcaaataaattttgttgtattgggtaatttggaaagtggacggcattgggtccttcggaacttgttcgagagctttgggggccgttgagctcttccgtcgactgtgctatagccgaaattatgtttgattggtgtataaaactgg

SEQ ID NO: 91230 - DNA, 2458 bp, Zea Mays
caattccattttccaattcccctttcctctcaatcgcatacaccagcggcggcgccgggaccccgaaaaccctctccccgcacaccacggccaacaggaaccactccgctcctccgagccctagccgtcccgggccgggtcgggctcccctacatgacgccggcgtgaggcaagtgcttagtggatcgcgctggtgggaggatgcagggcggtgtcatggcccatgccgccgccgccgcggcggccgcgtcgacggtgaccacggcggtggcgcccccagtcacggcgcacgcggtggcggtggcgcccccggtcacggcgcacgctgcggcggcggcgggcaacggcagcgccaccgccgcgccgccgccaccgttcctcatgaagacctacgaggtggtggacgacccggccacggacgacgtcatatcctggggccccgggaacaacagcttcatcgtctggaacacgcccgagttcgcccgggacctcctgcccaagtacttcaagcacagcaacttctcctccttcgtcaggcagctcaacacctacgggtttagaaaggttgatccagacagatgggaatttgcaaatgagggttttctgagaggacagaagcatctgctgaagactatcaacagaaggaaaccatccttgcaggggaacagccaaccacagcaacctcagtcgcagaacgctcctgtgccttcctgtgtagaggttggtaagtttgggttggaggaagagattgaacggctgaagagggataagaatgttcttatgcaagagcttgtcaggctgagacagcaacagcaaacaactgaccatcagctgcagactttgggcaagcgtcttcaagggatggagtcacggcagcaacagatgatgtctttcctggctaaagcaatgcaaagtcctggtttcctagcgcagtttgtacagcaaaatgagaagagcagaagaagaatagtagcggcgaacaagaaaaggcggctgcccaggcaagatggtggcctagactccgaaagtgctgctgcttcgttggacggtcaaatcatcaagtatcagcctctgatcaacgaagcagccaaagcaatgctaaggaagatactaaagctagattcttcgcataggttggaatctatgggcaattcagagaatggcaattttctgctggagaattatatgccaggcgctcaagcctttgagagctcttcgtcaacaagaaactctggggtcaccctttcagaggtttcagctaacccaggtttgccgtatggcggcggcggcggcacgagctctgggctgtcagccatctgccctcctgaaatccagtgcccagttgtgatggacaacatgtcgtctaaccaagtgcccagcatgagtgctgtgcctcctgtttcgaaggctacaattgacatgggtattcctgaattctcagctctggcagacttggtgaatgaaggctccgtcgatatccctggaggggcctttgagatgcctggtcctgagtttcctctgccagaaggcgatgacagtgtccccatcgagaccgatgagaccatgtacaacaacaacgacgagactcagagccttccaggcatcatcgactccttctgggagcagttcctggtaggcagccctctctctgccgataacgatgaagttgattcggggtcgccacaggagaacggatggagcaaagtggggaacatcggtgatcttacagaacagatgggccttctgtcatcaacaaatcaccgcgactcagggaatgggctgtagtgtatcttaattaatatacggtagactgggattatcggtaataagcgtcgcctgcagtttttgttatttttccttttggccaaaaaatgatatgccggtatatcaaccactcgctcgacctatatgcgcgggaggggcagtcttccagctgagctctgaatgccacagccacctgcttgtatcaatctatgatgttggcagtcttgagaacaccactgtgacttgttaaatctgtatgcttattcccactctagttgctgatattgtttagtttgttatattggtgcggaaacacgggggttgtttagcaacaaagtacaacacgttgcttcattacaattcgattctgtacaattccatactccaaccaatatattttccagcaagggaatcaagttgccagatttaaagctttacagccacgcttacaaggttgtcaaattggtctaatttgtaggatccaattgaaagattttgttactgtcaaacaggttaccccaaagaaagttcaaaattgttgtttcaagaacacatggcttcatgcaagtaatccacgtaataaattgctgataggcgctatccaaagcgtgctgagattgcgctgcaacgcggccaaggagaattacttctgcagtaacccaactagatcatacacgctgtttgtgtagagatc

SEQ ID NO: 91231 - DNA, 1586 bp, Zea Mays
aaactgttgcttggatgatgatttgtgtatgactatgtgtatgtccatcggcatcgacggcttgcttgcttgctccaacgccaactacaggggggcgggggtgttgggtagctagctagccagatagtgatagagcgagctgctagtggaaagtagaaagagcgagcgcaccacaatggacagcatggaggacgccgtctccggcactgcagcccagggcgacctcgccgaggttgtggcccgcgcaggtgcaatggccgccgcggcgagtcaccaccaccaccggcggccaccctctcccgcagcagcagatcacggccacatcgtgtctgctgcaagggccaccgccagatcacagatcatgctcgtccctgctgctgcttgctacgacgacgagacacggcctgctgctgcttgcggcgacgcggtgatgttcgacgcgccgtcgtcgtcgatggccgccgccgtcggtccataccaccacctgtcgtcttcgtctgcggcgctggcaccggcgcacggcgggtactggctgccgccgcaacagatctcccaggagcacgcccgcgacggcggcctcgacgagccgcccgtggtgacgaggatctcgccagtgacgactccaccgccgccttctcatcatcatcaaatcatgaacagaaagaatgaggtgaagaaggtggtgtgcatcccggcgctaccacctccggcgagcagccgcccaggaggaggagaggtgattccgtctgatctttgggcgtggaggaaatacggccagaagcctatcaagggttcgccttacccaagaggttactacagatgcagcagctcaaagggatgtatggcaaggaagcaagtagagcgcagtcgcagcgaccccaacatgctcgtgatcacctacacggcagaacacaaccacccttggccaatgcaacgcaatgtgctcgctggctactcccggcctcacactgctactcacatgtcgtccaactgcaagaagaagaagaacagctgcagcgttgaaccgacgagttcatggccaacaacaacaacatcatcaccatcatcaaagaacggcaactacgagtgtcagcaaatgacaaacatgacgatggaagaaaatgcagcagcagggtatgttgcctacgccatcgatgacgaggagtgtgccgcgatgcatcagccgatcaattgcggtagcgtgcaaccttcagcagatgaggttttcgcagagctagaggaattggagcctacgactagtcctgtgaatgcaaacatcttctctaggggggtgacttatgagtggcacaagttctaatctatcaagcccaaggtcgtataaggaaaggctagctaccccatatatatacatggttctgatgaaaaataggttacaattaataacgcacagattttacttaattaattgctgtgacgacagatctttatataccttttgtgtgcttatgattaattcaaagataagatatacttaaaaataagaaaaataaaatatatgtgtataatatttcgtcgtacataaaaatttccacaaatctgcatggatcgtatttgttactagcata

SEQ ID NO: 91232 - DNA, 894 bp, Zea Mays
acaagctagctagctagcagcgcaacaccaccgatcagctatacaagcaaggtagctacctagtagagtacgtagaggccgggtctccagaagacgaacatgtcgtggagctccgacgagaaccacaggttcgagcaggcgctggcagattacgacgaggatactccaggacgctggcagctcgtggcccaggcggtcggcggcggcaggacggcggacgacgtctggcgccactacctgcacctggagggggacatcgacgacatgggcgccagggagcgggcgaaccgccgccgccaacagtaccgccgcaacgcccagcagcaccaacaccagcacggcgctagcgccaacgccaacgcctacgccagccgcaaccatattagtcggcggagcaacggcggcggcgccagcagcagtaacactaacaacattagtagtcatcgcgctactaacagcaacgacagagccaaacgcccgcaggaatgagacgccggccggcaggagagacgatgaaccacacaaactactactacacacaacgtacgtactatcctactaccataatatggtggatatcgccacctttccgcgtacgaacgtgtatgctctaattaaggaataatcctagctatagcctatagcccccagctaagggcttgttcggttagctcttaatccatatggattgaatgggattggatgggtttgaacccaaacaagtcaaacttcttctcaattttttccaatctcatccaatccatgtgtattgggaataaccaaacaagctctaatgtgtattgctctaatgtgtattgcatgcatgccgcgtacgacggacgtacgcaagtgtaaaaccttgggcactatttatatgtataaagttatatcgta

SEQ ID NO: 91233 - DNA, 2567 bp, Zea Mays
ggacactttgcacggagggagcaccagtacccaatcctcctatccattcatctcgccccgcctcggccatggcgccactgccagcaccaccgaccgcggcctccgcctccgcattcctcttctccccgccgcgaagtccgagccgctacctgcaccccaagcccaagcccaccgccaccatcctctgctcttccacctctgccgccaccgccgccggctcagcatcgccctccctctcccagcagttggagccgctctcccgcacgctcctccacgacaagcccactccgatcgcggaccgccccaccccggagcccacctgggtgaaccccaccaagcctaagcccagcgtgctctcgctccgtcgccaccgccgccgttcccctcccgcgaacacttcctccacgccgctgcagccgctgctgcgcgccctccgcgcactacccgaggatgccgacctcgcgggcaccctggacgccttcttcctgcagcagcaggggcagggtgcggcgccgtccccctccgacgcgctcctcctcctcaactacctccacccgtcgtggcgcaagtcgctgtccctcctcgcctggctgcgcgcgctcccagccggcgccttcccgctggacaccatcttcttcaacgtcgccctcaagtcgctccgcgctgcgcgccagtggccgcacgccgagcgcctcgcgctggacatgctcgacgcgggcgtgcccctcgacaacatcacctactccacgctcatcaccgccgcccgccgctgccgccagttcgccaaggccgtcgagtggttcgagcgcatgtacgccgccgacggcgtcctgccagacgaggtcacctactccgccgtgctcgacgtctacgcgcagctcggcatgaaggaggaggtgctcgcgctcttcgaccgcgccaggggcagcggctggaagcccgaccacgtcgccttcgccgtcctcgccaagatgttcggggaggcaggcgactacgatggcatccagttcgtcttcaaggagatgcgggaggtcggcatcaagcccaacatcttcgtctacaacgcgctgctcgaggcgctgggcaagaccggcaagcccggcctcgcgcgcaacctgttcgaggaaatgatcgaccagggcgtcgagcccaacgcgcgcacgctcaccgcgctcgccaagatctacggcagggcgcgctggggccgcgacgcgctccagctctgggataagatgagggagctgaagctacccgccgatagcatcctctgcaacacgctgctgagcatgtgcgcggacgtggggctcgtggccgaggccgagcagctcttcaacgagatgaaggatccggagtgccgcgacgtcccaaagccggacaagtggagctacacggccatgatcaacatctatgggagcaacggggacacagacagtgcgctccagctgttcgcggaaatgctgaagggcgggatagagcccaacataatgagctacaccattgtcatccaatgcctcgggaaggcacgtaggatacagcaagcggtggaggtgcttgagtccgggctggagaagggtctcaagcccgacgatcggctctgtgggtgcttgctctctgtcatcgctctgagcagcggggaggagatggaaatggtgctctcctcgctggaaaaggtcaaccagaacctggtcaagctgatcagagtgctcggcgacgcccaggtcggtggtgacgatatcacagaggagctgaagagcgtgctgaacagcgctgcccctgaagtacgccgtccttactgcaactgtctgatcgatgtatgccgcaaccacggcttccctccacagagggcaagggaagtcttccaccttgcccagacctatggtttgtactccaagcttcagagcaggaaggacgaggagtggtcgctggacctgcggtcgctctcggttggtgcagccaagacagcgtttgatgactggatgcagactgtctcggagcgctgggcgcagcagaaggacttgccagagtccttcagcgtgtacaccggatccagcacccacaagtttgcgcaggggctggcaagtgctttcgccgctcatctggaccaaatggcggtgccattccatgcgagcgaatctcaagccggcagcttcatcagttcaagagatgatctggtctcttggttgcagatgagcaggtcgtccgcagtcgttgccggatgaggcgcagtggttgtggctgcataatgctccaaattccaaaggaaagaagggctcagtgagcaaactgggtgatcatgcatttgttggcctgcagtttgtatgaagagaattggaagtctgaaacgcgtagattagacggtagcaccaagccgctcttcaaacattggctgattgtcagacttacactgctggttctgtttctgaaattcaaatgccacttcttaaattccattatatcctggtggaagaattgtatagtttttcctccctgcacacaatgtgccgatttggctactactagtataatactaccgccttggaagttggaattgactacagagtttcatc

SEQ ID NO: 91234 - DNA, 2670 bp, Zea Mays
cagtcgtcttgtccccctcgccgcctccgtgctcgtcttgctccttctcggctccccaccccgccacctcgtcccaccccgccccttgggttgagttgagctactcaaccgtcagtcaattcctgcacctggcgttgggcgggttttcatgggggcagcataaaagcctcttcggttcttcccctagctctgcctcgcggcaagtccccctccgctacgttcgccatggctcgcaacagggaagtggtgattttgctgttggatgttgggccttcgatgcatggagtgctgctagaggtgaagaacgtatgcttgactcttgtgcataagaagctagtttataacaggagcgatgaagttggtattgtcctctttggtactaaaggaacatgcaatgagcttgcaaaggacattgggggctataagcatgtgacggtcatacatgatattaaagttgtagatgaaggaacggcacaggctctgcaaaaccttccattaggatctgcccctggtgattttctggattctattgttgttggcttggatatggtgattaggaaatttggtattaccaaagggaagcggcggctctgtctaatcactggtgcacaagaactgttaagagatccgcctgaggggaccaaagaagatcaggtggacaccattgcaaacatgttgaaaaaacacaatatcaagatggagtgcattattttcagagaaccgggagtgcatcataatgatgtaatggaagaaaatgaccgactattgcatcagttcagaaatagatcagtagcaaaggtagttcaggttgacaacccaacatcactgttgggtgctctcaagacaagaaatgtgctcccagttaccgttttcaggggagatctggaagtgaactccaattttaaaataaaggtgtgggtttataagaaaacagctgaggaaaaattccccactttgaagaagtattcggacaaagctcctccaaatgataaatttgcttctcatgaagtcaaagttgattatgagtacaagagtgttgttgagccagacaaagttgttccaccagaccaaaggattaaggggtatctctatggtcctcaagttattcctgtatcaaatgctgaatgggaggcagtcaagttcaagccagagaaaggtgtgaagcttctaggatttacagatagatccagcgtaccacggcaccaatttatgaaagatgtatgcctgtttatacctgagccaggtaacatgaaagcaagtcttgcagtttctgcgatagcaagagcaatgcatcaaatgaacaaggttgctatagtgcgatgtgtgtggaggcaaggtcaagggaatgttgctattggtgtattgacgccaaacatttcatcagtgaacaatatccaagattcattttacttcaatgtgctcccatttgctgaggacatcagagagtttcagtttcggtccttcagcagcctgccatcatcatctcagcccactgaagaacaacaagaagctgcagataacctagtgaagatgttagacctagcaccacctggaagagaggtcctcaagcctgagtttacgccaaatcccatcttggagagattttacagttaccttgatctcaagtcaaagcagccagatgcaaatgtcccaccgcttgaaagatctctaaggaggataaccgaacctgatcctgatgtggttggccaacaaacacaattaatccagaatttaagcaaagcttttgtgctgaaggataaccccaagaaaaagaaagcacgaacacaggacatgttggcatatactggtgcaggtgatcaagctaaatctgtagaggacagagttctggaaaatacacatccttcaacagagaatgttgtggcaatcagagattcaaatccagttcaagattttgaggccatgctggctaagagatctagctcaacatggactcagaaggctattggagatatgcagaattacatagcagctttgttacagaactccagtgatgggggcaactatcaaaaagcacttgaatgttttgcttctctgcggaaggcctgtattattgaacaggaaccacaggaattcaaccagttcctaacgaagatttacgagagattgaaggaaggtgatgctgccaagttctttcaacttctctcctcaaaaaacatttcacttatcaacaaagaggaagcgcctgacagtgatgtgactgaagagatggcaagaagtttctacctgaaacgagaaaaggcgtctcagtaggagctggaagaagccggtaactcgaagcgccttgggtttggagggtatctgcatgttttgaaactgggtatctgggtggaactggaactaatactcaaactctctgggttgagtcactgttttgctgcacaatctgctgcctactacgtttcgactagattcagctttgggtactactgtatgttgtttgactggagtagcatgtccatagatcacatacttctgcagtgttcattggagtgaatgcatgcatgcggtgaaatgcagcatggataggtctaggaagaaacattaccatcatttcctaatgttggagcgctgcctagaaaaggatctttttctgtaagtggtctggtgcgtcaaaccctccaaagtccaaaataatcctttctacataac

SEQ ID NO: 91235 - DNA, 2634 bp, Zea Mays
cagtcgtcttgtccccctcgccgcctccgtgctcgtcttgctccttctcggctccccaccccgccacctcgtcccaccccgccccttgggttgagttgagctactcaaccgtcagtcaattcctgcacctggcgttgggcgggttttcatgggggcagcataaaagcctcttcggttcttcccctagctctgcctcgcggcaagtccccctccgctacgttcgccatggctcgcaacagggaagtggtgattttgctgttggatgttgggccttcgatgcatggagtgctgctagagctagtttataacaggagcgatgaagttggtattgtcctctttggtactaaaggaacatgcaatgagcttgcaaaggacattgggggctataagcatgtgacggtcatacatgatattaaagttgtagatgaaggaacggcacaggctctgcaaaaccttccattaggatctgcccctggtgattttctggattctattgttgttggcttggatatggtgattaggaaatttggtattaccaaagggaagcggcggctctgtctaatcactggtgcacaagaactgttaagagatccgcctgaggggaccaaagaagatcaggtggacaccattgcaaacatgttgaaaaaacacaatatcaagatggagtgcattattttcagagaaccgggagtgcatcataatgatgtaatggaagaaaatgaccgactattgcatcagttcagaaatagatcagtagcaaaggtagttcaggttgacaacccaacatcactgttgggtgctctcaagacaagaaatgtgctcccagttaccgttttcaggggagatctggaagtgaactccaattttaaaataaaggtgtgggtttataagaaaacagctgaggaaaaattccccactttgaagaagtattcggacaaagctcctccaaatgataaatttgcttctcatgaagtcaaagttgattatgagtacaagagtgttgttgagccagacaaagttgttccaccagaccaaaggattaaggggtatctctatggtcctcaagttattcctgtatcaaatgctgaatgggaggcagtcaagttcaagccagagaaaggtgtgaagcttctaggatttacagatagatccagcgtaccacggcaccaatttatgaaagatgtatgcctgtttatacctgagccaggtaacatgaaagcaagtcttgcagtttctgcgatagcaagagcaatgcatcaaatgaacaaggttgctatagtgcgatgtgtgtggaggcaaggtcaagggaatgttgctattggtgtattgacgccaaacatttcatcagtgaacaatatccaagattcattttacttcaatgtgctcccatttgctgaggacatcagagagtttcagtttcggtccttcagcagcctgccatcatcatctcagcccactgaagaacaacaagaagctgcagataacctagtgaagatgttagacctagcaccacctggaagagaggtcctcaagcctgagtttacgccaaatcccatcttggagagattttacagttaccttgatctcaagtcaaagcagccagatgcaaatgtcccaccgcttgaaagatctctaaggaggataaccgaacctgatcctgatgtggttggccaacaaacacaattaatccagaatttaagcaaagcttttgtgctgaaggataaccccaagaaaaagaaagcacgaacacaggacatgttggcatatactggtgcaggtgatcaagctaaatctgtagaggacagagttctggaaaatacacatccttcaacagagaatgttgtggcaatcagagattcaaatccagttcaagattttgaggccatgctggctaagagatctagctcaacatggactcagaaggctattggagatatgcagaattacatagcagctttgttacagaactccagtgatgggggcaactatcaaaaagcacttgaatgttttgcttctctgcggaaggcctgtattattgaacaggaaccacaggaattcaaccagttcctaacgaagatttacgagagattgaaggaaggtgatgctgccaagttctttcaacttctctcctcaaaaaacatttcacttatcaacaaagaggaagcgcctgacagtgatgtgactgaagagatggcaagaagtttctacctgaaacgagaaaaggcgtctcagtaggagctggaagaagccggtaactcgaagcgccttgggtttggagggtatctgcatgttttgaaactgggtatctgggtggaactggaactaatactcaaactctctgggttgagtcactgttttgctgcacaatctgctgcctactacgtttcgactagattcagctttgggtactactgtatgttgtttgactggagtagcatgtccatagatcacatacttctgcagtgttcattggagtgaatgcatgcatgcggtgaaatgcagcatggataggtctaggaagaaacattaccatcatttcctaatgttggagcgctgcctagaaaaggatctttttctgtaagtggtctggtgcgtcaaaccctccaaagtccaaaataatcctttctacataac

SEQ ID NO: 91236 - DNA, 2143 bp, Zea Mays
cagtcgtcttgtccccctcgccgcctccgtgctcgtcttgctccttctcggctccccaccccgccacctcgtcccaccccgccccttgggttgagttgagctactcaaccgtcagtcaattcctgcacctggcgttgggcgggttttcatgggggcagcataaaagcctcttcggttcttcccctagctctgcctcgcggcaagtccccctccgctacgttcgccatggctcgcaacagggaagtggtgattttgctgttggatgttgggccttcgatgcatggagtgctgctagaggtgaagaacgtatgcttgactcttgtgcataagaagctagtttataacaggagcgatgaagttggtattgtcctctttggtactaaaggtgtgggtttataagaaaacagctgaggaaaaattccccactttgaagaagtattcggacaaagctcctccaaatgataaatttgcttctcatgaagtcaaagttgattatgagtacaagagtgttgttgagccagacaaagttgttccaccagaccaaaggattaaggggtatctctatggtcctcaagttattcctgtatcaaatgctgaatgggaggcagtcaagttcaagccagagaaaggtgtgaagcttctaggatttacagatagatccagcgtaccacggcaccaatttatgaaagatgtatgcctgtttatacctgagccaggtaacatgaaagcaagtcttgcagtttctgcgatagcaagagcaatgcatcaaatgaacaaggttgctatagtgcgatgtgtgtggaggcaaggtcaagggaatgttgctattggtgtattgacgccaaacatttcatcagtgaacaatatccaagattcattttacttcaatgtgctcccatttgctgaggacatcagagagtttcagtttcggtccttcagcagcctgccatcatcatctcagcccactgaagaacaacaagaagctgcagataacctagtgaagatgttagacctagcaccacctggaagagaggtcctcaagcctgagtttacgccaaatcccatcttggagagattttacagttaccttgatctcaagtcaaagcagccagatgcaaatgtcccaccgcttgaaagatctctaaggaggataaccgaacctgatcctgatgtggttggccaacaaacacaattaatccagaatttaagcaaagcttttgtgctgaaggataaccccaagaaaaagaaagcacgaacacaggacatgttggcatatactggtgcaggtgatcaagctaaatctgtagaggacagagttctggaaaatacacatccttcaacagagaatgttgtggcaatcagagattcaaatccagttcaagattttgaggccatgctggctaagagatctagctcaacatggactcagaaggctattggagatatgcagaattacatagcagctttgttacagaactccagtgatgggggcaactatcaaaaagcacttgaatgttttgcttctctgcggaaggcctgtattattgaacaggaaccacaggaattcaaccagttcctaacgaagatttacgagagattgaaggaaggtgatgctgccaagttctttcaacttctctcctcaaaaaacatttcacttatcaacaaagaggaagcgcctgacagtgatgtgactgaagagatggcaagaagtttctacctgaaacgagaaaaggcgtctcagtaggagctggaagaagccggtaactcgaagcgccttgggtttggagggtatctgcatgttttgaaactgggtatctgggtggaactggaactaatactcaaactctctgggttgagtcactgttttgctgcacaatctgctgcctactacgtttcgactagattcagctttgggtactactgtatgttgtttgactggagtagcatgtccatagatcacatacttctgcagtgttcattggagtgaatgcatgcatgcggtgaaatgcagcatggataggtctaggaagaaacattaccatcatttcctaatgttggagcgctgcctagaaaaggatctttttctgtaagtggtctggtgcgtcaaaccctccaaagtccaaaataatcctttctacataac

SEQ ID NO: 91237 - DNA, 2491 bp, Zea Mays
aaatctgatgatccaggctggaagtatgcctactatgtagagcctggcaagcgagagttgatccaatgcgccctttgcccgaggaaaattaaaggaggaattctgagggtgaagaaacatcttgtgggcggatacaaagatatcctcaagtgtcccaataccacaactgcaatttctagagagttaaaggcggctttggatgaaggaaaaagggatagaccaaagggacaatactttgatgaagttgaatcacatgacaatgaagatgatgatgttgtggaagtaattgggtcatcatcaagaggaggcagcagcactggaacaaccggcaaaagaaaggaattatcaagcaaggcatcaaccattggggcaacaaaaaagcccattacaagtttgctccgacgtacaccccaagaggttgtcgcggaaaggtatgccaaggggacaactcagagaaccatcaatgctgcaatgaagcccaaagaagaaagagaagctgtttgtatggagatagccaagtttttctatgattgtggcatacccttcaatgctgccaactcaagacaatttgaggtagctgtagaggccattgcacagtatggtacggggttcaaaccccctagtttccatgagctacgagaacctttgctcgcgaaggctgtcaaagagatatacagtgagaagaagaagcatgaggatgcatggagtcaatatggttgcaccctcatgtcagatggatggacagacaggaggggtcgacatttgatcaacttcctagttaacagccctgcaggtacattctttttagaatcagtggatgcatcgagtgagtctcatgatgcgttgatgcttgcagagctactagataagagaattgagcagattggcagggataaggtcatacaggttgtaactgacaatggtgccaactacaaggctgcagggcgcattttggttcagaacacccctaccttgttttggaccccttgtgctgctcactgcttagaccttatgctggaggacataggaaaactaaaggattttaagaagcctattgcacgtgctcgtcatgtcacaacattcatatatagacatgggaggattcttagtgagatgagggtgcatacaaaaggtatggatcttgtgaggcctgctgctactagatttgctactgcattcctcaccttgaggagtatacataagcacaaggatccattgagagcattattttctggtgatgttttcactcgctccaaagtatctaaaacagaagcagggaaaaaagtatatagcattgttttctcaacagagttttggcattcagttgaggactgccttagagcttctttaccactacttgttgtgctcagattggttgacggtgatgagaagccagccatgcctgaggtggcagcagctatgaagatagcaaagcaaaagattacttcatcattctctattcaaagcaagaaagcttgtctaaaccgcatcatgaaaattgttgacaaccgttgggtgaaacaaatggacactccgttgtatggagcagcactctacttgaaccctgggaaattctatagcatgaagcaaagtgatgatgaaggctatgttggagagctaaggggttgcttcaatgatgtacttgttaaaatggtgctagatgaggaccttagagacaaaattgatgctcaggcagtcctttatgagaaccaaagagaagcatttgcaaacccaatggctattaaaaatgctcaaacaagaaacccacttgattggtggcttgcatatggtggtcgaaccattgagctatataagtttgcaagacgaattgttagtctttgtgcttcatcatccggttgtgagaggaattggagcaagtttgaatttatgcataccaagaaaaggaacaggctagagcacaaaagactgaatgatttagtgtatgtttcatacaatagaaagatggccgctaggttccaaaaattgcgtgaagaagggaagaactttgatcctttggttcttgaagattttgattgggacaatgagtgggttgatccattagctaattcatctgttgttggggatgaccctcttttcacatgggagcatgttgatcatgccatcggtgcatctacacaactgcatggccgctactttcctaggagagctcatggtactcaagtgccaattcttgaggatgatgaagatgatgttgatgagggtgatgagaatgaagacgatgacaattttgtgcttgacgaccttgacatggatgatgaagaagaaacaaacaatagtggtggccgtggtgatgagcaagacaaggatgatgttggtttagatgatttggatgatgtttattgagtgtttgactgagtaactcttgtgtgcttgtggttgtggacatggcattctactttagttgctttagttgaacttgtgttattgtggtgatgtggttgtggacatgtcattttgcacaatattatta

SEQ ID NO: 91238 - DNA, 2313 bp, Zea Mays
gttgagtttcctgcctttggcttcccccatctcctttcctcttccgtctcggcgtttccgtctccacctccgcctccgccttccctcctcgcctcgccacgccgcatttgcatttccggatcccctcctctcgcactacccattcccctccgccgccgtctcacgcgcccgcaacccacccggactccctcttcgatctcgccccgattcccccgctcgcgcccccaacccgattcgtccctctcacgcgcgcgcgggtgggaagacagcgatggcttggggcgggggcctctctccccgccgcgggtgacctctcctcgcgcggggagccctcccgcgtgcccacgcggaggatcccgtcgcggctggtgcactaccacctcctctccattcgccactcccccgtgctctctcgcgcgtcccctcgaccatagggtttgctcccttccttcctcgccgcccgatttgatctcgtcccttccgggctccggctaggctgctccgtctctcctcctccgccatgttctcgcacggcgctgattccgcccacgacgccgggaccgttggcgtcagcagcggcgtcggggccaccgtccccgcccgcttcgtctggccctacggtgggaagagggtcttcgtctcaggctccttcaccaggtggtcggaacatttgccgatgtctcctgtcgaaggctgccccactgtatttcaggctatttgcagcctgtctccagggattcatgagtacaagttctatgtggacggggagtggcgtcatgatgagcgccaacctactatatctggggagttcggcatagttaacacactatacttgacaagggaatttaatcaaataaacgccttattaaatccaagcacacctggaagcaggatgaacatggatgtggataatgaaaattttcaacatacggttacattgtcggatggtaccattccagaaggtactgtgagagtttcagaggctgcaatacaaatctcaaggtgccgcgtttctgagtatctcaatttgcatacatgctatgatttactcccggattcgggcaaggttattgctctggacattaatttacctgtgaagcaatcttttcatattctgcatgaacaggggattcctgtagctcctctctgggactcattcagaggtcaatttgtcggccttctgagcccattggatttcatacttatattgcgggagctagaaactcatggctcgaacttgacagaagatcagcttgaaacacacactatatctgcatggaaagaggctaagcggcaaacttgtggaagaaatgatggtcagtggcgagcacatcagcatctagtgcatgccaccccttatgagtccttgagggacattgcagtaaagcttttgcaaaatgacatttctacagtgccagttatttattcatcatcatcagatggatcattccctcagttattgcaccttgcatccctttctggaattttgaaatgtatttttaggtattttaaaaactcaactggtaatttgcctattctgaaccaaccggtgtgctccattccgctgggttcctgggttccgaaaatcggtgatccaaacagtcgtccattggctatgttgcgacctaatgcatcacttagctctgcccttaacatgttggttcaagctggagtgagctcaataccaattgtggatgaaaacgactccctgcttgacacttactctagaagtgacatcacagccctagctaaagacaaggtctacacacatgttcgcctggatgagatgaccattcatcaggctttacagcttggacaagatgccaatacgccttttggtttttttaacggtcagagatgccagatgtgcctccggtctgatcctttgctgaaggtgatggagcgactggctaatccgggggtgcggcgggtgttcatagtagaagctgggagcaaacgtgtggagggtattatatcactgagtgatattttcaagttcttgctgagcttgtgataagagaagaggagcatgacggacatttgtttgtgatcaatagtaagaaaacagcagggtatgtgaagcaagctgccatggatctcgcattccccctccccctccggcctttggtcaagtaaggcaggattgaaggtggcgggctttgtctttgctgataatggctgttggaattcatagtctgtaaagttcttttttttcctttgtttttcgttttaaccattttgtgcctcccgttgttaccaaaaatatctggtgatttttattattatttttggattgtttccgccctacataca

SEQ ID NO: 91239 - DNA, 1601 bp, Zea Mays
ggctagaagttttgtaccattttcatcgctggtacggtagcaagcattcttctagtcttggtggtaaggaaacaaacgaagaaatgaatctagtggtgctgttgaatgtggacgcggtcccaactgcccatcttgttcgtcctgtccggtagtaaagaaaaatctagagggttggggatgggagtggataggacctatccacatgtcagtcctttcccgaatacccatcattttcctctcttgccttgccttccccattgccattgtgtaatcctcatcctccgtcgagatcaaggaagaaagaaagaaagaaagcaaccatggcggcaaccgcaatgtgcccctccccctcggccgcaataactcgccacatccatgctcgtcgctcctgtgctgctgcttccttgtccctccgccgctcgggcttcctggggcgcgtcgtgctggccgcggtgccggtggccgtggacgccacccggcgccgccgcgtctccgtgtcggtgcggatggcctgggacggtccgctctcgtcggtgcgcctcatcatgcagagcaggaacgcgaagctgagcgagaagctcaaggagcacatcgaggacaaggtgggtcgggcggtgtccaagcactgccacctggtccgggaggtagacgtgcgcctctccgcgcgcggcggcgagctcggccggggccccaagacgtcgcgctgcgagatcaccctcttcaccaagcgccatggcgtcctgcgcgccgaggaggacgccgagtccacctacgccagcatcgacctcgccgccgccatcgtcaagcgcaagctccgcaagatcaaggagaaggagacggaggtgcgccgcggcggagacgctgacggcgtctgggacgagatcccgccggccgacctgctgccccccgccgaggccgacgacctggaggcggccgtgggcgctgaggacgagcagacggtgctcgccaaggtggtgcgcaccaaggtgttcgagatgccgccgctcacggtggaggaggcgctggagcagctggagaacgtggaccacgacttctactgcttcagggacgaggccacggggcaggtgaacatcctctaccgcaggaaggaaggcggatacggcctcatcatccccaagaacgacggcaaagtggataccgttggcgttgtgccaccacccgccgtcgctgcggagccggagccgtcctacgcagtgcacgccgctgacaacaacaactcctgaactgagcactcgtcgacgtctcatccaaccaaaaccaaaacgagagagaatgcttgcttggtactgtaaaaataaaacaaacgcactcgtcgtcgacgtctcatctgcatcagttgcatgcattgctgtgatgaatgtgtctgtgtttgtgtcacccacacaaactgctcatattagctctccatttcatactctccctcctgctattagcaccaattgacacactgccttttggtataatctgtacgagctgtcagtcattagggtatccattaatcggctctgtaccgagattgagttttgtatagcacacaacagctcgcatccttttgatattccagtccaaatgtccaatcc

SEQ ID NO: 91240 - DNA, 636 bp, Zea Mays
atggccggcttcggctgtgtgcgcgagggagggttgcgcggcgctagggccgacggcgcagccgccgaagaagcgacggagggtgaagtgcaccaggagagccggcggtggctgctcgcgtgggatggaggagggcctacgcctaggtgctgccgacgcgaagagggtgcccaaaggcaaaggaggggggttggcagccttgggatggccggcgactggggcttgcggaagagagggccgcagcgtggctccgtggtcagcgctgtcatgggaagagggcccgcgccagagtgcgtcagtgcggagggggcacaccaggggcggcgacgcggaggagggggcgcgctagggactcgtacctatgtttatgcatttgatgcttctggaagtgtgatcacccgagattttgagtcatattccagctcggtactgcaactggaaatagaacattgcaatcgtgtgcttcttagaaataagcacatgaagaatgtagacacgaatctagataacacgatctatgataaaggggcatactttgcacatttcactttgtttgttgtaccgccactggagactgacagtatagtcccaaagaaggaaaggttttcagtaccacaattaggacatggcccctga

SEQ ID NO: 91241 - DNA, 825 bp, Zea Mays
atggcgcagatgctcctcctcctcctcctgccgccgcctttcctcctccttgccgcacccacagtgccagcggaggcagcagccaccgcctccactccgacgctcgtgttcctcctggccgggcagtccaacatgggcggccgcggcggcgccaccaacggcacctgggacggcgtggtgccgcccgcgtgcgcgccttccccgcgcatcctccgcctctccccgtccctgcgctgggaggaggcccgggagccgctgcacgccggcattgacctgcacaacgtgctcggcgtgggccccgggatgcccttcgcgcacgcgctcctccgctcctggcgccgctccggccgccgccccgccgtcgtggggctgatcccctgcgcgcagggcgccacgcccatcgccagctggtcccgcggcacgccgctgtacgaccgcatgctcgcgcgcgcaagggccgccgtcgcccgcgggcccgccaccaggctggccgcgctgctctggtaccagggcgaggccgacaccatcaggcgccaggacgccgacgcctacacgccccgcatggaggccttggtccgcgacgtccgccgggacctgggcatgccggacctgctggtcatccaggtggggctggccacggggcagggcaggtttgtggacatcgtcagggaggcgcagaggagggtcagcctccgcaacgtcaggtacgtggacgccaagggcctgcccgtcgccaacgactacacgcatctgaccacgccggcgcaggtcaagctcggcaacatgctcgccgccgcctacatggcagcgacacacacgcactga

SEQ ID NO: 91242 - DNA, 1693 bp, Zea Mays
atgaggttgccaagaaatgccactcctgcgttgttgattttagccctttcaatcgcaggagaaactgctttgaacccgcgacctggtgactcagtgaaacaactttcaccacagcaccagcatcattgtcggaactgtggtgaaatcttttgtgacaaatgcagccagggaaggattgctctgacggctgaggataatgctccacttgtccgagtttgtgatagatgcatggctgaggtcactcaaaggcttagcattgctaaggatgttgccaacagatctgcaactgttcaaagtcatgaagatcttgcaagaaaactgaagggaatcgggttggtggatggctcagttgctatgccatgtgttcatagtagttcttatgccgtacaggctgaggtcactcaaaggcttagcattgctaaggatgttgccaacagatctgcaactgttcaaagtcatgaagatcttgcaagaaaactgaaggtaatatactgtttttttcctgtcatatattcatttaagtggctgtgcacttgaattaattgtgcatgcttggtttgaaaccgagttatgaaagtttggtcgcattcattatatttagcatgcactctatttcaaaaatgttaggtgtattgaaattaaaaaaaaacaaacatagtaaagtttgacttgaccatcattcaaaatatatgtatggttagtgcaaaaaaatatgcatcactagatttgtacttccacacataattgataatatattataaaaggaactaatggccaaatacgccttcaaatattttctgaaatgctaatacgccttataaaaaaagatgtgaggagtatttggttcggtgcctggaatgtggcaggatttcatttcttattgatgtgtgctatataatcttttggcaaagcatgaacaaattgtggatgaccaatttcagaacagaattaagttttctacattttgtgagttcttatacagggtaaaagtaggctctaaagcaccaaagaggtcggtacaagcagttactgcggggatgtctgtactgcaccacgatggccggaccggcgctaggtcgccggagtttcgcgtggcagcgtcggtgccgagaaattgtaaaagggagatagacgtggggtgtctgcgcgattgtcagtggcacaaacaaatagtggcaggagctcgggttggtggatggctcaggtaacacaccaaagagggaatcaggttggtggatggctcaggtaacacaccaaagaggtcggtacaagcagttactgtggggatgtctatactgcaccacgatggccggaccggcgctaggtcgccggagtttcgcgtggcagcgtcggtgccgagaaattgtaaaagggagatagacgtggggtgtctgcgcgattgtcagtggcacaaacaaatagtggcaggagctcgggttggttaagttggagcacgagggctttagcgcaaaatggccagtgcggacgcgggctccccagtcgtgggccgactgtgcctggaaatgggccgactaggtcagtttcagccgagattaaggatttttctttattcttttgtctgagagattataagagttaccaaaaatcatagaaacaaccaaaaatcgtgggacaaattttattggatgtataaaatcaagatctctcggataaagttggttctaggattttt

SEQ ID NO: 91243 - DNA, 253 bp, Zea Mays
cccgaacccgtacgctcgggagcacaacgcgtccattcctctcccaggtcatccggttgcaagtatacttttatgatggttgtatgtatgtgtcatgtgtaagattatggagtaattattatacattttatgatctatatttatatttgtcattttaagatatgattaatggttgtatgaatgtgtcatatcttaaaatacagattgactaatggagaaaattatctatttgcactcatcaaccaaacataga

SEQ ID NO: 91244 - DNA, 1876 bp, Zea Mays
gcacccttcctctccatctagacactgaaacggccgttgaaaaaaaaggaaatacttgggaaaagccctccccttctcttctctcgccttcaccacgcgccgcccgatccgccaccgcccgccgcagccagcaagccaaggccagatggcggcctcactcgtgtcctcgtttactgtgcccctcgtctccgccgtcctcggtgccgccatcgccctcgtcttcctcgccggctacctccgccgcaagcgcgccgccatcgcccacatccctcccaccgaaaccgccgccgccccggaccagcctaagcatgtccgcccctccaaccaggcccagtacaagaagggccatctccgcccgcatcaccacgcggccgacaaggacgcggccaagaagcaccaccatcttgatgtcaacaccttgagggggcatactgactccgtcactgcacttgccttctccaatgacgcctgcaacctagttaccgtatgtgctgatggagccatcagggtattcaggatcgatgatacctctagcaagagcttcaagattcttaggataaacttgccagctggagcgcaccctacggctgttactttctcagaggggtcatcatctgttgttgtggcggcgcaggcgcttctgggatcatctctttatatgtatgcggatgttagcgctcctccaaccgcggaaaacaaactgcagggaaagctttctccacctgaaatcaagtggagtcaccccaagatacatggcaaggagtctgtgctcaaccttgcagcggcccgtgcaactcatgggtctggtgatgggagcactattatcatttcatgctcagaagcaactgatatcaaagtttggcatgggaagagtgggaaggagtttggtacagttgacaccaatcagttaaaaaataatatggctgacatatccccaaatggtcgcttcatagctgctgcggcttttactgctgatgtcaaggtgtgggagatagtttactcgaaggatggttcagtgaaggaggttaataaagttatgcaactcaagggtcataagagtgctgttacttgcttgtgctttgctcccaattctgagcaaattattactgcatccaaagatggttccattcgagtatggaacattaatgtaagataccaccttgatgaggatccaaaaaccttgagagttatgccaattccacttcatgactctaaaggttctgtttgccagtatgatcacatgacagtctctcctgatggtaaaattctggctgtaacaagtggatcaacgttgcaatggttacttgtggaaactggtgcagttttggatacagctgacaaagcacatgaaggtgatataactggcattgcttgggctccacggacaattcccaatggtggcgtgcatgtttttattttggcgactgctggtgtggacaaaaaggtgaaactttggacagctccagatgttggttcaacatgagtggtcgaggattgaatctgcataagacagctttgccaagggcacagaattgaaggtgagacaatagatggatgcaggcttgatgtagcccagaacagtaggtgctccactgataatattgcactgaaccgaggcagacattgttagttttgttgcgtagagtttgagaggaggaagggaagggaggcctggctgttactgatgagaccccaatgcatcacgcaggcggcagccttggggctgtagtttcgctaccttttatacaataaactgaatgttgtctgcatttgtatttttttttctttccttcctttttactgttggaatgatctggctgtgtgatcaacataatttaagctgctgctgcttggaatagacgtcattttatttgtc

SEQ ID NO: 91245 - DNA, 1185 bp, Zea Mays
gaaacggccgttgaaaaaaaaggaaatacttgggaaaagccctccccttctcttctctcgccttcaccacgcgccgcccgatccgccaccgcccgccgcagccagcaagccaaggccagatggcggcctcactcgtgtcctcgtttactgtgcccctcgtctccgccgtcctcggtgccgccatcgccctcgtcttcctcgccggcccgtgcaactcatgggtctggtgatgggagcactattatcatttcatgctcagaagcaactgatatcaaagtttggcatgggaagagtgggaaggagtttggtacagttgacaccaatcagttaaaaaataatatggctgacatatccccaaatggtcgcttcatagctgctgcggcttttactgctgatgtcaaggtgtgggagatagtttactcgaaggatggttcagtgaaggaggttaataaagttatgcaactcaagggtcataagagtgctgttacttgcttgtgctttgctcccaattctgagcaaattattactgcatccaaagatggttccattcgagtatggaacattaatgtaagataccaccttgatgaggatccaaaaaccttgagagttatgccaattccacttcatgactctaaaggttctgtttgccagtatgatcacatgacagtctctcctgatggtaaaattctggctgtaacaagtggatcaacgttgcaatggttacttgtggaaactggtgcagttttggatacagctgacaaagcacatgaaggtgatataactggcattgcttgggctccacggacaattcccaatggtggcgtgcatgtttttattttggcgactgctggtgtggacaaaaaggtgaaactttggacagctccagatgttggttcaacatgagtggtcgaggattgaatctgcataagacagctttgccaagggcacagaattgaagttttgttgcgtagagtttgagaggaggaagggaagggaggcctggctgttactgatgagaccccaatgcatcacgcaggcggcagccttggggctgtagtttcgctaccttttatacaataaactgaatgttgtctgcatttgtatttttttttctttccttcctttttactgttggaatgatctggctgtgtgatcaacataatttaagctgctgctgcttggaat

SEQ ID NO: 91246 - DNA, 1506 bp, Zea Mays
gatgagctagctagcaagcctccgatggcgccgcctcgttggccttggccggcaccggctcaacattgccggcagaggccgcccctgcccgggtccgcgccttctctgcctcggccgcccagtccatgcgcacgatgaccgtcaccagcaccgccaagctgacggcggcgcccaccaggaagccggccaggaggccctccagcccgaggccggccttgaagccgagcgcgacgcccaccggcagcgccaccacgtagaagccgcccacgacggcgtacatgcccagcagcggccgcgccgtgccccgcacgatgccgccgcacacgttgagcgggaagttgaccacctccagcagcgccatcaccttcatggcccgccccacgccgtcccgcacctccgggctgcgcgtgtatatgcgcgcccacggccggcgcgccgccagcatgagcaggcctccggcgaggcccgccgccgcgccgcccgccaccgacaccctggcggcgcggcgcgccgtggcggcgtccccggcgcccagctcgttggacacgcgcaccgacgcgctgacggacagcgacagcatggccgcgaacagcaggtagtcgaagttgagcgtgacggcgaccacgcccaccgtgcggcgcgcgtcggggaggcgccccgtgaggagcaccaggatctcgtaggaccaccactcgaggcaggtgttgaggcagcaggggacggccaggcggaggagcagcagccacgccccggacgcccatcctggcggagagcgagacggtgagcaggatgtggagcgccagcgccagggcagcggcgaacagagtgggcagcgtggcctcctgcgcgctgaggtacgccttgagcgggttgagcacggaggtgacggcgaggtccgggaggaggcagagcacgtaggtcctggccgtggccgcgatgtcgggctgctggccgaagcgcagcagcacggcgtcgacgcgcgtccagaggagcgcgatggggacggaggcggccaggagcatgagggtggccctgagcagcgtcccgcgcaggagggcgacgtttccggcgccgtgcgcctggccgcagatgggctccatggcgccgcagaggccgctgaggacggcgaagccggtgacgttggcgaagctgtagccgagcgtgccggcggccagctccaggtcgccgaggcggccgaggaaggccgtggtcacggcctgcttggcgaaccaggtgaggttcatgccgatgagagggagcgcgatgccgcgctgcgcgcgcacctcggacgcaacagcggccaggccatgctgctgccttggcggtggtgtcgtcatggtcatggctgctgcgtgagcgagcgagcagatggagatggagtttggtttgctttggtttgttggggttacaggcagcacatatccacatactagtatacatactttacttaggctgcctgctttatttctgctttcttccatgaatggatcgtaacggttctgcaca

SEQ ID NO: 91247 - DNA, 285 bp, Zea Mays
atgacaaaaatagttttttctcctcgtcactctaacgtgcctgttccatgcctagtaaaattgtttttcactagaaagtattattacatggtgaaagaaccctatggtgccgctgcagcagctgctgctggagccttcttgggcttctccacaacgattgcttgggtagtcagcaccattccagccacggaggcagcgttctgcagggcgcacctagtcactttggcagggtcgatcacaccagcctccaccaggttctcgtgcttgtccgccatggcgttgtaa

SEQ ID NO: 91248 - DNA, 261 bp, Zea Mays
atggctgctcacctgaagctgctgtacggtcttgcggtgtcgttgtttcacggctccaggcctacaatatcttgtttcccatttggcgacagaaaactttccaagcatctgttgataccacgtcctctatgtaacccccacggctatggttcagctccagagaactctagaaggttgggtcggctatgggttcagctcatgggagcccaaccaatgccaccataccaagctatggcatcaataactcatgtccctggatag

SEQ ID NO: 91249 - DNA, 2762 bp, Zea Mays
tataaaatatagagcacattgttatcgcactgaatcctcctacgaaaacaccccccagcgcggcaatgccgtcacgtgcccgcatctcctccgccgtctccaccgcagctgcatcctcctcctcgccgccgccgcatcctcctcctcgccgccgccgtcgccgccgcatcgccgccgccacggcgcgcgtgcgggaggggacgctccgccctgaggacgcacacgacctgctcgacgagttgcagcgtcgaggcacacccgttctcgggcgcgatctgaacgggttcctcgcggcgctcgcgcgtgcgccgtcctccgccgcctgcgggagtggccctgccctcgccgtcgcgctcttcaaccgcgcggcgtctcgggctcaaggaccgcgggtgctgtcccccacatcccacacctacgccatcctcatggactgctgcacccgcgcgcaccgcccagagctagcgctggccttcttcggccagctcctcaggacaggcttgcgcgtcgatatcatcatcgctaaccaccttctcaagggcttttgtgaagcgaagcggacagacgaggctttggacatccttctccacagaacgcctgagttgggctgtgtgcccgatgttttctcgtacagcatacttctgaagagcctctgtgaccaaggaaagagtggccaggcagatgatttgttacggatgatggctgaagggggagctgtctgctcgcccgacgtggttgcctacactacagtaatcgactgcttctttaaggagggtgatgttaataaagcatgtgatctattcaaagaaatggtacagcggggcattccacctgatttagtgacttatagctctgtggtccatgccctgtgtaaggcaagagcaatgggcaaggcagaggctttccttcgacaaatggtcaataaaggtgttctgccagataactggacatataataacttgatatatggatactcctccacaggacagtggaaagaggcagttagggtatttaaagaaatgagaagacacagcatcttaccagatgttgttactttgaacatgttgatgggttccctttgcaagtatggaaaaatcaaggaagctagagatgtttttgacacaatggcaatgaagggccaaaatcctgatgttttctcctacaaaattatgctcaacgggtacgccactaaaggatgtctagttgatatgacagatctcttcgatttgatgctaggtgacggtattgcacctgacatttatacttttagtgtgctgatcaaggcatatgcaaactgtggaatgctagataaggctatgatcatcttcaatgaaatgagagaccatggagtgaaacctgatgtggtgacctatacgacagtgattgctgccctctgcagaatcggtaagatggatgatgctatggaaaaatttaatcagatgattgatcaaggagtagcacctgataaatatgcataccattgcctgattcaaggtttttgtactcatggtagtttactgaaagccaaggaattgattttggaaataatgaataatggcatgcgtcttgatattgttttcttcagttcgataattaacaacctttgcaaactgggaaggataatggacgcacaaaatatatttgacttaactgtaaatgttggtcagcatcctgatgctgtggtgtatagtatgctgatggatgggtactgtcttgttggcaagatggagaaagcattaagagtatttgatgctatggtgtcagctggcattgaaccaaacgttgtagtgtatggtacacttgttaatggctattgtaaaattggaaggattgatgaaggattgagtcttttcagagaaatgctgcaaaagggaataaagccttcaactattttatacaacatcataattgatgggttatttgttgccgggagaacagttcctgcaaaggtgaaattccatgaaatgacagaaagtggtatcgctatcaacaaatgtacatacaacatagttcttcgtggattttttaaaaatagatgctttgatgaagcaatctttcttttcaaagaattacgtgcaatgaatgtaaagatcgatatcataactctcaataccatgatagctgggatgtttcaaaccaggagagttgaagaagctaaggatctgtttgcttctatctcgagaagtgggctggtgccttgtgttgtgactgtataatgatcacaaatcttataaaagaaggattggtggaagaggcagaagatatgttttcatccatgcagaatgctggctgtgagcccaattctcgattgctgaatcatgtagtcagggaattactaaagaaaaatgaaatagtcagggctggagcttacctgtccaagattgacgagaggaatttctcacttgaacatttaaccgcaatgttgctggtcgatctcttctcaagcaaaggaacttgtagggaacacataagatttctccctgcaaagtatcattttcttgcagaggccagtccgtgattgatattttgatttatttttttttggaatcagtccttgcacgcacctgtcacagttaagctagtatatgatcttaaactaaaaccattgggttcatgttttctcggaagattttcttctcatttgacctccttgatatgcagatgttcatttacttttgatccaataattctatacctggtaaagggcctgatgaaggagaagcgtttgatgttttcgaagcatattcgttcggcggatggtg

SEQ ID NO: 91250 - DNA, 2734 bp, Zea Mays
tgccgccatccatcctttttcccttcctcccctcaccccctcgtcggaatcggaacggctgtcgtctgccccttcgcccccctcttcgatccctcaccccacccagtgctagctagctagctagcttctagtggctagtagctcccctcccctgtgggctgcaacctggtttgggttcgcggatcgatcgcgagatcaatcaatccatggcgcggaccaactgggtggccgataagatgctcgacgtctacatctatgactacctggtgaagcgcaacctgcaggccaccgccaaggccttcatcgccgagggcaaggtcgccaccgaccccgtcgccatcgacgcccccggcggcttcctcttcgagtggtggtccatcttctgggacatcttccattcgtccaccgccaaagcctcatccacatccactgccgccgccttcatcgaccacaccgccaagcaacagcagccaatcggcgccgggaccggggcgcctcctcctcatccccttcacgattccagagagcaccagatgaggctccagcagctgctgcaccaacacaacccccacctccacactacaagagatgcttctcctcccgcctctatcaatgccctcaactccgatgtctccgctgtcctcgcgtccaaaatgatgcaagaccgagtcaggaaccccaaccctattgactccgacgcctcacagcatctcctagacgcaaacaggatcgcgcttctaaagtcaccaccacctagccacactgggcctatgcctatgcagcagcagcttcatccaaggaaccagcaacttgacatcaagcccgatgttggtatgccacagagaacgatgcctgcagacccttcttccatgtatgcatcagggatgatgcacccaaaacctgcattacttgccactggactaaatcaaggtggtgttgggagtgtgccacttaaaggttggcctttaacggtcccaggtattgaccaactccggtccaatttaggtgtgcagaagcaattggtgccatcttcaaaccagttccaacttttatcgccacaacaacagttgcttgctcaggcacaaacacagaatgaccttaccagaatgggttctccagcaccatctgcttcgccgaatgttcgaccagatgacccggattatttgatgaagttgaagatggcccagatgcagcagtcctcaggccacaggcctatggaattgcaacagccgcatcagcagaacactagaaagcggaagccaacttcttccggagcagctaatagttctggcacaggaaatactgtcgggccttctcctccgtcaactccatccactcatacccctggtggtggagtaccagtggctagcaatgttaatattttacagaagagttcaatgatttgtggtgtggatgcaactggtggacttgcctcatcctcaaaccagatggatgctttggatagttttgttgattttgatgaaaacgtcgactcttttttgtcgaatgatgatgtagacggaagaggcatgtttgcagcacttgaaaaagggtcttcagagcacaatacagagtccttaaagggtctctctttgagtgaagttggtaacaaccgtacaagtaacaacaaagttgtttgctgtcacttctcttcagatgggaagttactcgctagtgccggccatgagaagaaggtcttcctctggaatatggacaattttaagatggataccaaaatagaagaccatacaaactttatcacagacataagattcagaactaattcaactcagttggctacatcatcttctgacggaactgttcgactttggaatgctgctgatgaaagtggcgctttacaaacttttcatgggcataggtctcatgtaacatcagtagattttcacccaagattgacagaggttctttgctcttgcgacgacaatggagaaattctcttctggacagttggtcagactacatctactcatgttttgcgggtgaagcagggtggaactggaagagtcaggtttgaacctcgaagtgggcagctcctcgctgtggcagctggaagcatggtgaacatttttgatgttgaaaagcaatccagcttaccctgccctccaaagggtcacaatagtgaggtaaactttgtgtcctgggatgaaaatggtgaatatctggcatctgtaagtcaggacactgtgaaagtgtggtcggtatcgtctggtgtgtgcattcatgagttacgatccaatggaaaccaatatcagtcatgcacattccatcctagatacccgaaagtgttgattgttggtggttatcagactctggagctgtggagcttatcagataaccagagaatcccaatccaggcgcacgaagggttgatagctgcactggcgcactccccgttcactggaatgattgcctctgccagtcatgacagatgtgtaaagctctggaagtagctatatatagaggtgatggaatagtcctaatcctaattatatatgccattattaacttatatgtagcgtttgtttcattccttggttaataacttatataatataatatatacataggcggagacgtgagatggatatacttttcaagggtgattggaccctgtgaggtggatggatgtagggtcggttgtacatgatatattgttgagctgatgattgggctgtatctgcgcctataccattatataacccaccggtttaaa

SEQ ID NO: 91251 - DNA, 106 bp, Zea Mays
ccaataaagagtcacgtaggccgaaaggtgaaatcataaagaatagaaagcattatatggacatgcgcttctgggtaagtttatttccaatcaataatgtagcaat

SEQ ID NO: 91252 - DNA, 4192 bp, Zea Mays
agattttcactttccaattcctatttatctcttcttttgttctttaatttggttcgtacgtacaagacttctcggatcactcgtcttctttgattgcatcatcgagacctgcattttcccttccaaattcgtcactcactctggttggccgccttctgtcttctgatccaatccggttgaaatcctccgtctccttccagcaagatctggcacataaggagaatcggcaagaaccattctgcaaatgaggccggatacgcggcttgaatcggcggtgttccagctcaccccgacccgcaccaggtgtgatttagttgtggtggcgaatggacggaaggagaagatagcctctggtctgctgaacccattcgtcgcccatctcaaggttgcacaagaacaaattgccaagggaggctattctatcacacttgagcctgacccagagattgatgcaccctggtttaccaggggcacgttggataggtttgttcgatttgtcagtacaccagaggtcctggagcgggtcacaaccatagagtctgagatattgcagatcgaggatggcattgccgtccagggcagtgacagtcttgggttgagatctgtggaatactataatgggaaattggtggactgcatggaaggtagtaaggcaagttacaatcctgatgcagatagggcacttgttccatacaaggctggtacacaaccaattccaccattgcagaatcatgatgctacacaggaggagaattcaaaggatcaattgctcagagtgctagagactcgcaaaacagtcttacgtaaagaacaggctatggcctttgcacgtgctgtagcagcaggatttgacatcgacaacttggtgtatctgatcacttttgcagagtgttttggtgcttctcgcttgatgaaggcatgtacacaattcattgagttgtggaagcaaaagcatgaaactggacagtggattgaagttgaacctgaagcaatgtctgcacgctccgaatttcctccgtttaatccttctggcattatgtttatgggggacaacatgaagcagactatggaatctatgtctgtttccaacggagatgcaaatggcgaagatgcttctaaagcagatcaaaggacatctcagcactctggtgctccccatgagttcttccatggtccatatcagtcagcatatccaccatgggcaatgcatccaccttactctatgcaaggcatgccttactatcctggaatgaacccatattacccttccccctaccccccaatggatgagaccaggtaccacccctcagaaaggagagtatcaaagaaacactcagatagcaaggactcagaaacttcagatgataaaagtgaccagagtggttcagagagggaaacttcttatggtcacaggtcccataaaaaagataaaagggcaggtaagaagaagcctagtgtggttgtcatccgaaatatcaatgtaacatcgaaaaggcacggatcatcagacagtgactcacaaacaggttcagatgtagtatcagaggatagcgacgattcacacgccaagtccagaaagaaaaagaataatagctcaagttcaaagaaaaaagatgctaggaagatggttttcgagtctgcagatgaatatagcaagaatggaatgtcatatgggcaagatggagaccaagggagctggaatgttttccagagtttcctgctaagagctgatgagaaaagagataatgacgcggacctattcgccagtgagaaaaaagcacccccagcaaggatgaaggagagcacaagcgttgatgttgattcaattctcttggtggagcaaaattctgctggggccaatgaacataatacaacaggtttcagtatggaaaatgagaggattagaccccagcagatgctgtctggtgatgaacttatgatgtatggggaaggtgaaggcatgagctttggatgtgatgacataaaggagattgaagctggaggtgtgagatacagaagaggaacaagtgatgacttcatgatatatggacaggaaaagtcaatggacagagggagttctttggatcctcttgcagaagcacagtacaagagccccaccctggttgacaaaaatgtgcacagcttggcagatgaatcgtttatgatacctcttaggtctacctcagaggataaccatgaaccagaatgtcgtactgccattgacattgatgttgagcttccctcaactgttcagaagatatcagatgctaaagctggtagtcagcttttctatgagccagctgaattgatgccggagcgtggatgtgaagacgtttcgtttggatatgatccagcaatggattataatagtcagatacagagtcaatctgccaccatggttgaagatgcacatatggaagatgcattgttgagcactgtggatgaaataaagaagccagagaaagacaagaagctaagaagttcacaggagagtttggataaacgtagaaaagatgcttcagcgaggaggttgtcatcatcaaaaggcccgctgactgatgcacagaaacgcgcacaaaacttgcgaatatataaagcggaccttcagaaggcaaagaaagagcaggaagaggaacagatcaaacggctagaaaggcttaagctagagaggcaaaagaggattgctgcaagaagcagcacttccaatgcaccaacaccacagcagcccagagtaaagccttctcccaaggtttcccccagcacctacaagagctcaaagctcagcgataccgaacttgcatcctcttcacctctcagaaaatttcctatcaaaactaccccagggactgatcctgaaaaaacagcaaaatcaagcaaactaaatgacaatactaatgcagttagtaagccaaccttgacagacatgaaggagagaagtgggaggaccgaatcatccaacgagagattgagaaaacttgctgaacctaaaaccaacagttcgactggccatactttgaattccaagtcagcaagcgtggaccgcccgcggagaaaaagcatgccacaagatagccagacaaagaaaatttcagctataatgcagcttgaccagagtaaatcagcaacactaccagaactgaaggtcaaatactcgcaagctcctgctgttgtgaaaaatgcagtagctagtagagagagaaaagaggtttcagctggagctaaatctcttcgtacaacagaaactgctagtgtaaaggaaaccaacggtaacatctcaaggatgaacagcagcgacgataatgtggtggttgagaagaccgttgtgatgctcgaagatgaggcggtcattctacattctggaagaaatgcagcaaaggaaacttgtagtgatgacaggacagagaagcccagcccagaatcggagtacatagctatcagggctccgctgtctccagttattcttccggaggctgagagatctgatgacctggggagctcatatgaggtggtgactgagtgtctaaaggatgaacctgaggagccaaccttgggcgccgtggagaaaccttaccaggccccctttgctagggtgacatcgctggagaatgcatcagacaacagtccattacctgaatcacttgcgcatgcaaatagcattaaggctcgagtgcctgagcctgtgtacacagtttcagttgagggccatgtggtaagtgaaaagcctcgaagcaaagagccaaaaggcttgaggaaacttttgaaatttggcaggaaaagccatgctgagggcgcaatggattcatcagttgacgaagcctcagcaggagatggttcgatgctgaagaatctcatttctcaagatgactctggtgcgtcttcttcaaaagcttctcggtccttctccctactgtcaccgttccgcagcaagcacaaggtgattgttctgtgagcacaaggtaatcaatttgggaggagaggaatataatggcgcagcacagtacatacttttggtttttcccttctagtatatatttacacacacgtatacataaatacatacatactatatgatggacttgtcattagacagcctatgtgaaggctgtgtgtggcgatggatggttgtttgcccttgtggttttgtaccctaactatttgtgttgatatatatggtgatactttttgttccaga

SEQ ID NO: 91253 - DNA, 504 bp, Zea Mays
tctggagctagcagagaggtggaagaacttagtgtttgcgtcgcccaacctaatgcgagtgaggcgagccctttgacggatcctcgatttttcaattacagcaagtcccaaggctctgactttgagtgccttcaggagatccagttcctcttgggtgagcacacactcctcttgagcaatttcaaatcagaggattaattctttggaaattgcaagttgtaatctcgtgtctcccactttggtcttgcgccatagtttgatggcctttgctgcacgcgctaatttgatatgaaggcgcttcaggggtgcaaaggaagaatgaagcggtttcagccaggcagcttgaacagcctccttgaatccctccatctttactcaaaaattttcaaaacggaaagaggggctatgtgtcgtcgtcaattctccctggagaagcagagtgtggccagacatgagggagggaagggagtgcagatagcagctaggaaaatgcagctcccattc

SEQ ID NO: 91254 - DNA, 554 bp, Zea Mays
tgatggagctcctggagcagcggtggtgcagcagggcaggtgtggttgctgatgaaggatgccacagtggtaggggccggctcccctagctctgggaaagcagttgtagcctgttgagcgttctccatgccgattataggagtgggttatctcagggtgagggttggacgagcggggcgaggaggagccgtgctgctgctcggctggagaactcggcaaaaggcattgaaatttttcatgggagatgattagtgcaaggtatggcttgttcgattggacttatacagatttgtgcagcagcaaaggcaggagcctcattagtgtgcctaccaatgcccactttcctggcttcagtggtgactcattgaagatgtggattttcctgcagtgtatgtgaaatcattgctatctcagaggggttgatctcagctacctgataagaagcactgctccatttactgagcatatgtagaagctgcagcccctgctaaaggggatgatgtatccattccattctgtagcaagaaatatgacgacataattgtcctgtcaaa

SEQ ID NO: 91255 - DNA, 3133 bp, Zea Mays
tgggtgctcagctcagctcaccctatctttctcttatcttacgccgtcgtcgtcctgctccggcgacggccaggcagccgagcagataaaaagagccgaagcagcaccaccaccacgtgcctctcttctcagcttgcctgcctcactgcacccggccacaagggcaagatgcccgcctctgtcgctgtctacccggccaagatggcatgctgtctccagctccaccatcttcgccggccgtcccctgctccgctccctgctcgggtcctcttcctcctctcgaccccgcgcctgcgccccgtcagagcgtctcccggctcgtccccgcccaactccttcgctggctggtcctccgactccgacagcgcggatgacggcgccgacaaatctactctagggttcggccgagcaggagggcttcttggacctggacttgctgcctttttcttcctcgccggcattacctttgctgccgtctctatcagaagcagtggcacccacgcagctggaaaattgcaaaacttgcctacagagactgctgccacggaatcttaccctgattatcactcccacaaagaggatggtgctaccagggaagcttccttaccaacggattgggacgaagaagactatgacaacctcgataaaaaagaagatacagatgaattcctgacgcctctacagtcaaacgaggttcctggggtgccagctgaaggtgaagtggggcacctgttgcagaacactgagcctgttactgatggtgaccatgttgtcggtgaagaagcgaatcagtttgacaatctcattgcatccgatggtaatcaagatccaccaccacctttgcccatactcgatgctgcaggcccctcggaggaaattcctgatgtagaagaaacatcagatcccaaaatggatttgccagaaaaccagcatttcgatgaaacattaacttcagatgcaatggtgctagattcagatgttgtgcccatccaggacatctctgaaggtgccattgctgctgcatttcacccagaagacaaaggtgtcgagcagaacccacaaactcttgacaaagatgaactttctccatccggattgcctgattatatggaacatgtaagcgccgatgggatgcatccacttggatcaaacgagttatccatggctacaaggaccagtgagacaggagatggggaggaaactatagtagaggatctgtataaaggagaaagtgaattagaaaaccaaaacaaacaattggagtccacaccacctgaccaatatttttcttctcctggaattcctgctccctctgtagtatccactgctttacaggtgcccgcagggccgattgtggttccagcttctgttgacccaacccaggaaaatgctatagctgcattgcagattctaaaggtgatcgaatccagtgctcaagctggtgaattgtgtacccggcgtgagtatgctcgatggttggtagctgcgagcaattgcctttcaaggaacactttctcaaaagtgtatccagcaatgtatattgataatgtcactgaacttgcatttgacgatgtcacacctgaagatcctgattttccattcatacaaggtgagcagaagctggattgatttctagcaagctttcaagatctgatatgaatatcccagaagatgttcatgacaatcatatcttgttttcccctgagagtcctttgtcacgtcaagaccttgtgagttggaaaatggccctggataagagacaactgcctgaagttgacagaaattgtttgttcaaactatctggctacatagacatcgataagataaacacagctgcctggccagctttggctgcagacttggatgctggagaccagagcattacagctcttgccttcggtttcacaagacttttccaaccgaacaaacctgtgacaaagggacaagctgccctagcattttcagctggtgattctggcgaagtggttctggaggaggttgcccgtatcgaggcagagaaaatagctgaagcagctgtaaatgcacatgctgcattggttgctcaggtcgagaaagatcttaatgcaagttttgaaagggagcttaaggaggaaagagaaagggtagagacccttgaaaaagtagctgaagaagctagggtggagctagataggttgagggcagaaagagaggaagagaagaatattctggtcaggggcagagctgctgttgagtctgaaatggaagttctgttgaagttgaggagtgaggtagaggaacagctgcagaacgtactgagcaagaaggtggaggtgtcgttcgagaagagtaggattgagaaactccaaaaggaaattgagagcgataactcggctgttgtgcaacttcagtatgagcttgaagtggagaggaaggcgttatctatggcaagggcttgggcagaggaggaagccaaaaaggcccgggagcatgcacgcgcccttgaggaggcccggaaccaatgggagcgtcaaggaatcagagttgttgtcgaaggagaactgaaggatgacgcctcagctggggtgacatgggctaacgctggcaaagaaaacgcagtcgacgagtctatcaaccaggcagaagctctgctggagaagctcaagacaatgtctggtgagatggaggtgaggtctcggggtgcggtggagagagtgatgcagcatgtgaggtccttcatcgcaatcctaaagcagcaagctgcagatgcaaggcagtggtgtaccgagtttggggcttgtgctgcttccagggcaaacgaggtatcagcacaagtgaagggaagcgtatctgcgtttggtgcaacccttggagacaagtcgaagagggcaatggaagagtgcaaggacggcctggagaggatttcacacagattcaagacagactagataccaattttgttgtttgcttgttttttggggatgatgttgttgcagagttgtttactatagcatgctggaacgaacagtaagtagttcccgaccgtggccttgtggaataagtaagtgcaacgaagcacttgtggccttctggaataagtgtaattaataccaacagtaattaataatagttcccgtttattatattatatcac

SEQ ID NO: 91256 - DNA, 1066 bp, Zea Mays
atataaatgggtgggtgctcttttatgatcgagcgcatacaaaagatcctacttggcaattgggtggcttcattattgatggtcccttggctgacgttcgcacaataagagaagtattccattgccctgtgctgatcagtttatggcgtatccggcatgcttggcataaaaatttgcttaacaaatgttcagacattgagaagcgatcgacaatggccaaacgtcttggagatgcaatttctattatatgcagagggactggtgatgttgaattatttgaatcctttctgcaagattttgttgagtgtgttgggtttcttgactacttcaaagttgtatggcttccaagacttggcattatggcaacttctgtgggttattccatcctcttctactcaaaaagtgtcacccaacccttcaggccttaaaaagttgtcagtggagaatgtcaagactagagctagggttgggttatctgaacttctcacacagtcccaattaacgtgttctagacaatcaacatcacattctgcattgacaagacaacggttcaaaataagaagtcgacttttggaagatgcttttgatcagctaagtttgctttctgaagaagatctcaaatgaccaatttgagtttcatttattaatgaacatggtgaggagaattgatggtggtggaattttcaaggatttcatggaaaatattactcgagcggcttttgatgtgcagtacggtctcttcaaggagactgctgatcatcttttgtacccaaacccaggatcaggattggttcatgaactacatctgcaatatttccattttcttggaagtctacttgggaaggtactttgaccatgtccctttttcccgttgctaaggagatacttgatctagctcctagattcttacgtaatttggggtttgtggcctaaaatgtagtggtttgagtctttagttcaaaatggaatcgaaatcaagatgttttaaggacgcctagcaccaaggagttgggtctgaagctatacaggcccttagtttaaattaacttgtggcaccttccctaag

SEQ ID NO: 91257 - DNA, 4606 bp, Zea Mays
atgccgatgccggagtcacatccgcacgctgttgctgctgctgcggcgggtctggctctggcgtcgacgtctagccgtcggagcctcagcttgggctcctccatctcgcagtcattccggcagatggacacggaagaccccttcggccgggcgcagtcggaccacgacgacgaggagaacctgcgctgggccgcgctcgagaagctacccacctacgaccgcatgcgccagggtatcctccgccgggcgctggacaacgatcaacagcaacaacagcggcagagcgtcgaggtcgtcgacatccacaagctggccgccggcggcgacgggggccgtgcgctcttggaccgcctcttccaggaggacagcgagcgattcctgcgccgcctcagggacagaatcgacatggttggcatcgacctccccaccgtcgaagttcgctaccaccagttgacggtggaggctgacgtcattaccgccggtcgcgccctccccacgctctggaacgccgccaccaattttctccagggtctcattggacgatttggttcttcaaacaagaagaacatcaccatacttaagaatgtcaatggtatcctcaagccatccaggatgacacttcttcttgggcctccatcctcggggaagagcacactcatgcgggcactcgccggcaagcttgacaaaaatctcaaggtctctggcagcattacgtattgtggccatccaatttcagagttctatcctgagaggactagcgcgtatgttggtcaatatgatctccacaatgccgagatgaccgtaagagagacactggatttctccaggcggtgcctaggcattggtgccagatatgagatgatcgccgaacttgctagaagggagcgggatgcaggcatcaagccagatcccgagattgatgctttcatgaaagctactgcagtacaaggacaggagactaatattataactgatctcactctcaaggtgcttgggctggacatttgtgctgacgttattattggcgatgagatgatcagaggaatttctggcgggcaaaagaaacgtgtgacaactggggagatgctaacggggccagcaagggctttatttatggacgaaatatccactggtctggatagctcgagcacatttgagattgtaaagtttatgaggcagttggtccatgtaatgagtgaaaccgtcatgatctctctgctccagccaccgccagagacatacaatctttttgatgacataatcctgctatcagaaggatacatagtgtaccatgggccgcgcgagaatatcctagaattctttgagtctgccggtttccggtgccctgacaggaaaggtgtcgcagactttcttcaagaggttacttccaagaaagaccaacaacaatactggtatcttgatcaggagcagtatcattatgtatctgtacccgactttgcagaacgtttcaaatcattccatgcatgccagcagatgcagaaggagttgcaaataccttttgaaaagtccaaaactcatcctgctgcgttgaccaccagaaaatatgggctttccagctgggaatcactcaaggcagtgatgtcaagagagcagctattgatgaagcgcaactctttcatctatattttcaaggtcacccagttgatcatccttgcactcatgtccatgactgtgtttctcagaataaagatgccccatgggcagattgctgatggcaccaaattctttggggctctgacttttggtttaataacaatcatgttcaatgggttcgctgagctacaattaaccataaagaagcttccagttttctacaaacatagggatttcttattcttccccgcttggaccttaggagtggcaaacataatcttaaaagttcctgtctcgttcgtggaatcagcagtatgggttgttctcacgtactatgtgatgggctttgcacctgctgcaggaaggttctttcgtcagtttatagctttctttgccacacaccaaatggcaatggctttattccggtttcttggtgctgttttgaaaacaatggttgtggccaatacttttgggatgtttgtgctgctcattattttcatctttggaggatttgtcatccgtagaaatgacatcagaccatggtggatctggggttactgggcatcacctatgatgtatagccaaaatgcaatatcggtcaacgaattccttgccagtaggtgggctattccaaacaatgacacgactatcgacgcgccaacagtaggcaaagcaattcttaaatccaaaggcttgtttactggagaatggggattttggctttccattggagccctcataggattcattattttgttcaacatgctctacctttgggcccttacatatttaagtcctagtagtggctccaatgccctggtttcagaaggtgaggatgatgtaaatgaaatggcattggaaggaagaaggaaagatgcaagaagaagcaaagatgaaatatcccaagttgtatccagtgatccaggcactaatggaggaacaaacacgctagctcaatcacgagtcactttgcctttccagcctcttgcactttgctttaaccatgtaaactattacgtcgacatgcctgcagaaatgaaggaacaaggattcacagaaagccgtttacaactactctctgatatcagtggcacttttaggccaggggttctaacagcactggttggtgtgagtggagctggaaagaccactttaatggatgtcctggcaggaaggaaaactagtggagctattgaaggagatattaccctgtcgggataccccaaaaaacaagaaacttttgcccggattagtggttattgtgaacaaactgatatccattctccaaatgttactgtatttgaatccatcacctactctgcttggttgcgtctttcctcagatattgatgatggtacaaaaaagatgtttgtggaggaagtgatggcccttgtagagcttgatgtgttgcgcgacgctctagtgggtctccctggagttagtgggttatcaactgagcaaagaaaaaggctgacaattgctgtggagctggtagcaaacccttcaatcatcttcatggatgaaccaacttctggtcttgatgctcgagctgcggcaattgtcatgcgtacagtaagaaatacggttaacactgggcgtactgtggtctgcacaatccatcagcccagcatcgacatatttgagtcttttgatgagcttctgcttttgaaacgtggaggtcaggttatttatgctggtgaacttggtcgccactctcacaaactagttgaatattttgaggcgattccaggtgttccaaagatcacagaaggatataatcctgcaacatgggtgctggaagttagttctcctctatctgaggctcgattgaacatgaattttgctgaaatttatgcaagctctgtgctttataggaaaaatcaagaggttatcaaggagttgagtattccccgatcagacaaccaggacctgtcatttcctacaaaatattcacagaatttctacggtcaatgtgccgcaaacttttggaagcaataccgttcgtactggaagaatccaccctacaatgctatgcgctatctgatgacatgtctctttggccttgtatttggtacagtattttggcaaaaaggaaagaacatagattcacaacaagatttatataatctgcttggagccacttacgctgctacattctttcttggggcttcaaattgcatcacggttcagcctgttgtatcgattgagcgagcagttttctaccgtgagaaggcagcggggatgtactctccgttatcctatgcatttgctcagacatgtgtggaggtcatctacaccatcttacaggggatactgtacacagtcatcatatatgcgatgatcggatatgactggaaagcggataaattcttctatttcctgtttttcatcactgcaagcttcaactacttcacattgttcggcatgatgttggtagcatgcactccctccgcattgctcgcgaacattctcatcacgtttgctctacctctgtggaacctctttgctggattcctcatcgttagaccggcaataccaatttggtggaggtggtactactgggcgaaccctgtgtcgtggaccatctatggcgttgttgcgtctcagtttggcgagaacgaaggtgagctttcagttcccggtgggacgcccgtggtggtgaagcagttcttgaaggataatctcggcatccagcatgacttactcggctatgttgtgctcgtccatttcgcctacgtcattgtgttcttcttcgtattcggttattccatcaagttcttcaacttccagaaacgttagcgggatcatttgtatgtaattaatcggtcgccgtaagttctagttctagttctagttctagtcaaagcaagtgcttgttttgggaggaagcctgtatgcaagtagcagtgtattcctcttgtttcttcaatgcaaaaatattaaaaggaagatgacgaatgcaaaagtgacatgtcttgttccttttcttctt

SEQ ID NO: 91258 - DNA, 2246 bp, Zea Mays
cttcttgaggctcatataaccaggactcaatatactaatcttggaaaggtgtttttagttttgggttaatggtagccttttttactacagccaaacaatgacacgactatcgacgcgccaacagtaggcaaagcaattcttaaatccaaaggcttgtttactggagaatggggattttggctttccattggagccctcataggattcattattttgttcaacatgctctacctttgggcccttacatatttaagtcctagtagtggctccaatgccctggtttcagaaggtgaggatgatgtaaatgaaatggcattggaaggaagaaggaaagatgcaagaagaagcaaagatgaaatatcccaagttgtatccagtgatccaggcactaatggaggaacaaacacgctagctcaatcacgagtcactttgcctttccagcctcttgcactttgctttaaccatgtaaactattacgtcgacatgcctgcagaaatgaaggaacaaggattcacagaaagccgtttacaactactctctgatatcagtggcacttttaggccaggggttctaacagcactggttggtgtgagtggagctggaaagaccactttaatggatgtcctggcaggaaggaaaactagtggagctattgaaggagatattaccctgtcgggataccccaaaaaacaagaaacttttgcccggattagtggttattgtgaacaaactgatatccattctccaaatgttactgtatttgaatccatcacctactctgcttggttgcgtctttcctcagatattgatgatggtacaaaaaagatgtttgtggaggaagtgatggcccttgtagagcttgatgtgttgcgcgacgctctagtgggtctccctggagttagtgggttatcaactgagcaaagaaaaaggctgacaattgctgtggagctggtagcaaacccttcaatcatcttcatggatgaaccaacttctggtcttgatgctcgagctgcggcaattgtcatgcgtacagtaagaaatacggttaacactgggcgtactgtggtctgcacaatccatcagcccagcatcgacatatttgagtcttttgatgagcttctgcttttgaaacgtggaggtcaggttatttatgctggtgaacttggtcgccactctcacaaactagttgaatattttgaggcgattccaggtgttccaaagatcacagaaggatataatcctgcaacatgggtgctggaagttagttctcctctatctgaggctcgattgaacatgaattttgctgaaatttatgcaagctctgtgctttataggaaaaatcaagaggttatcaaggagttgagtattccccgatcagacaaccaggacctgtcatttcctacaaaatattcacagaatttctacggtcaatgtgccgcaaacttttggaagcaataccgttcgtactggaagaatccaccctacaatgctatgcgctatctgatgacatgtctctttggccttgtatttggtacagtattttggcaaaaaggaaagaacatagattcacaacaagatttatataatctgcttggagccacttacgctgctacattctttcttggggcttcaaattgcatcacggttcagcctgttgtatcgattgagcgagcagttttctaccgtgagaaggcagcggggatgtactctccgttatcctatgcatttgctcaggtaacctttaaccaaatagccccttttatttacgtcattaggacataacacaataacgtggatatgagcatcttatctgtgagctatcatcactaactaaatccatgcatccatttaagggttcatttgacatttggttttggcagacatgtgtggaggtcatctacaccatcttacaggggatactgtacacagtcatcatatatgcgatgatcggatatgactggaaagcggataaattcttctatttcctgtttttcatcactgcaagcttcaactacttcacattgttcggcatgatgttggtagcatgcactccctccgcattgctcgcgaacattctcatcacgtttgctctacctctgtggaacctctttgctggattcctcatcgttagaccggtgagcatgcaagctactcttctgggttccaaaatttgagtgagactctgatctgatctgatctgatgattcgcaggcaataccaatttggtggaggtggtactactgggc

SEQ ID NO: 91259 - DNA, 2312 bp, Zea Mays
agacctaccaaatagcgcagctgtagcctctactctctagagggtggcgaaggcggagctgacctgaccggctgacccgcccaacccaacaacctctccgctggccatcttcctcccgggatccctctccctccttcgatccagctcagctctcttcctcccgccccgtactcttcttgatccgttcactcatacttctcgagagaaaaggaagaggattcgatctgttgctaccgctagctgcggtactaacagcagcagcagcaacaggaggtaccgtagaagaagggaagggaatccatgaagagatggggcagcagcggacaggccgccgattccttctaccaggtccgccccgattgcagccaaaacgtccccaacaccaagttcaagatcaaggcggggaagacactgagcgttaggaaatggcatgctgcgttcacgcgtgatggatgcctggatatcgcctctgttctgagccgcatacagagagggggtgtgcaccccacgatcaggggagaggtttgggagttcttgctcggctgctttgaccctgggagcaccttcgatgagagggaccagattagggagcggagaaggatgcagtatgccagatggaaggaagaatgcaaagagatggattctcatgtcggcagtggtaaaatcatcaccgccccgattataactgaggatggattccctattaaggatccgttggtattacttgaggctacttcagacacgcaaggtacttcaatcgccaccggcaacagtggaaatggaattgagaaccgtgtcttggataaacaaattattgactggaagcttaccttacatcaaataggccttgatgttctgcgcactgaccgcaccatggtattttatgagaacaaagataacatttcaaagttgtgggatattcttgctgtctatgcatggatcgacaaagaagttggttattgtcaaggaatgagtgatttatgttcacccatgatagtgctactccacaatgaagcagatgcattttggtgctttgagagattgatgcgtagactgcgaggtaatttcagatgcacacaacagtctgttggggtggaaaaccagcttcagcatcttgcttctatcattcaggtgcttgatccaaagttacatggccacctagaaagacttggcgggggtgactatctcttcgcattccgcatgttcatggtattgttccggcgagaactatcatttggggactccttgtacctttgggagtttctccttcagaatggcaccatctgcatattcatcaaaccatatttgaggcaaaatatgctagcaagcatacaaaaaaggcacgtggatacaagaaattgtggaaaacctgcttttgtatcaacaacactacaacagcaagcctcaatactgcaaagagtgcatagattccatccaactgctgtgttgtcttgctgatgcatgggtgcggacggggttgctggcggtctggaaggagtccatgctgtagaactgggcaggaagtcaaccagcaaacttgtgcattggtgacccattattccacatgcgaatcatacagatgatgtgggctctcgaatatgatcctggcatttgctccacttatgaagaggataatactggggctgtggtccacaaaattgaaggaaaggtaaaatcaatacgtcagtttggtaagtacgagagggagaatatgaagaagagggcaaacgatggtgatggacctgtccctatttcggtcttcctggttgctagtgtcctaaaagagaacagtacaaagcttctgcaagaggctcgagggattgatgacattattaggatattgaataatgttaatggaaatctggacgccaaaagagcttgcgttgttgcactaaagcttcataggaagtatcacaaaaagttgcaggaaaagaaatcctaacatcatatggcgagattgcacgcaacacaacactgggacttatatattgcttgtttctgttcctttcattttcccactcactgtatcggaggaagaaggtggtttacatatacagtcgcgggcgagacctcataaatataagtgacttattgtatctacaatatcaatgatccacgtccacagcctactcaattgtgaacatcaacctagtacatgataatttattcacgatcacaatggacttggcaaatattatcccatcagtatttgtcatgaacctcagtctactctcgtatcatcttaggtttttggatcccttcgttttgaaggaactgaaatttacttaatggagtaggttacttggtttaca

SEQ ID NO: 91260 - DNA, 1993 bp, Zea Mays
agacctaccaaatagcgcagctgtagcctctactctctagagggtggcgaaggcggagctgacctgaccggctgacccgcccaacccaacaacctctccgctggccatcttcctcccgggatccctctccctccttcgatccagctcagctctcttcctcccgccccgtactcttcttgatccgttcactcatacttctcgagagaaaaggaagaggattcgatctgttgctaccgctagctgcggtactaacagcagcagcagcaacaggaggtaccgtagaagaagggaagggaatccatgaagagatggggcagcagcggacaggccgccgattccttctaccaggtccgccccgattgcagccaaaacgtccccaacaccaagttcaagatcaaggcggggaagacactgagcgttaggaaatggcatgctgcgttcacgcgtgatggatgcctggatatcgcctctgttctgagccgcatacagagagggggtgtgcaccccacgatcaggggagaggtttgggagttcttgctcggctgctttgaccctgggagcaccttcgatgagagggaccagattagggagcggagaaggatgcagtatgccagatggaaggaagaatgcaaagagatggattctcatgtcggcagtggtaaaatcatcaccgccccgattataactgaggatggattccctattaaggatccgttggtattacttgaggctacttcagacacgcaaggtacttcaatcgccaccggcaacagtggaaatggaattgagaaccgtgtcttggataaacaaattattgactggaagcttaccttacatcaaataggccttgatgttctgcgcactgaccgcaccatggtattttatgagaacaaagataacatttcaaagttgtgggatattcttgctgtctatgcatggatcgacaaagaagttggttattgtcaaggaatgagtgatttatgttcacccatgatagtgctactccacaatgaagcagatgcattttggtgctttgagagattgatgcgtagactgcgaggtaatttcagatgcacacaacagtctgttggggtggaaaaccagcttcagcatcttgcttctatcattcaggtgcttgatccaaagttacatggccacctagaaagacttggcgggggtgactatctcttcgcattccgcatgttcatggtattgttccggcgagaactatcatttggggactccttgtacctttgggagatgatgtgggctctcgaatatgatcctggcatttgctccacttatgaagaggataatactggggctgtggtccacaaaattgaaggaaaggtaaaatcaatacgtcagtttggtaagtacgagagggagaatatgaagaagagggcaaacgatggtgatggacctgtccctatttcggtcttcctggttgctagtgtcctaaaagagaacagtacaaagcttctgcaagaggctcgagggattgatgacattattaggatattgaataatgttaatggaaatctggacgccaaaagagcttgcgttgttgcactaaagcttcataggaagtatcacaaaaagttgcaggaaaagaaatcctaacatcatatggcgagattgcacgcaacacaacactgggacttatatattgcttgtttctgttcctttcattttcccactcactgtatcggaggaagaaggtggtttacatatacagtcgcgggcgagacctcataaatataagtgacttattgtatctacaatatcaatgatccacgtccacagcctactcaattgtgaacatcaacctagtacatgataatttattcacgatcacaatggacttggcaaatattatcccatcagtatttgtcatgaacctcagtctactctcgtatcatcttaggtttttggatcccttcgttttgaaggaactgaaatttacttaatggagtaggttacttggtttaca

SEQ ID NO: 91261 - DNA, 2031 bp, Zea Mays
agacctaccaaatagcgcagctgtagcctctactctctagagggtggcgaaggcggagctgacctgaccggctgacccgcccaacccaacaacctctccgctggccatcttcctcccgggatccctctccctccttcgatccagctcagctctcttcctcccgccccgtactcttcttgatccgttcactcatacttctcgagagaaaaggaagaggattcgatctgttgctaccgctagctgcggtactaacagcagcagcagcaacaggaggtaccgtagaagaagggaagggaatccatgaagagatggggcagcagcggacaggccgccgattccttctaccaggtccgccccgattgcagccaaaacgtccccaacaccaagttcaagatcaaggcggggaagacactgagcgttaggaaatggcatgctgcgttcacgcgtgatggatgcctggatatcgcctctgttctgagccgcatacagagagggggtgtgcaccccacgatcaggggagaggtttgggagttcttgctcggctgctttgaccctgggagcaccttcgatgagagggaccagattagggagcggagaaggatgcagtatgccagatggaaggaagaatgcaaagagatggattctcatgtcggcagtggtaaaatcatcaccgccccgattataactgaggatggattccctattaaggatccgttggtattacttgaggctacttcagacacgcaaggtacttcaatcgccaccggcaacagtggaaatggaattgagaaccgtgtcttggataaacaaattattgactggaagcttaccttacatcaaataggccttgatgttctgcgcactgaccgcaccatggtattttatgagaacaaagataacatttcaaagttgtgggatattcttgctgtctatgcatggatcgacaaagaagttggttattgtcaaggaatgagtgatttatgttcacccatgatagtgctactccacaatgaagcagatgcattttggtgctttgagagattgatgcgtagactgcgaggtaatttcagatgcacacaacagtctgttggggtggaaaaccagcttcagcatcttgcttctatcattcaggtgcttgatccaaagttacatggccacctagaaagacttggcgggggtgactatctcttcgcattccgcatgttcatggtattgttccggcgagaactatcatttggggactccttgtacctttgggagatgatgtgggctctcgaatatgatcctggcatttgctccacttatgaagaggataatactggggctgtggtccacaaaattgaaggaaaggtaaaatcaatacgtcagtttggtaagtacgagagggagaatatgaagaagagggcaaacgatggtgatggacctgtccctatttcggtcttcctggttgctagtgtcctaaaagagaacagtacaaagcttctgcaagaggctcgagggattgatgacattattaggatattgaataatgttaatggaaatctggacgccaaaagagcttgcgttgttgcactaaagcttcataggaagtatcacaaaaaggaaaagaaatcctaacatcatatggcgagattgcacgcaacacaacactgggacttatatattgcttgtttctgttcctttcattttcccactcactgtatcggaggaagaaggtggtttacatatacagtcgcgggcgagacctcataaatataagtgacttattgtatctacaatatcaatgatccacgtccacagcctactcaattgtgaacatcaacctagtacatgataatttattcacgatcacaatggacttggcaaatattatcccatcagtatttgtcatgaacctcagtctactctcgtatcatcttaggtttttggatcccttcgttttgaaggaactgaaatttacttaatggagtaggttacttggtttacattctaccacttttcaaaatttaaatacaagtatatctcaaattt

SEQ ID NO: 91262 - DNA, 1340 bp, Zea Mays
agaagctcatcgcaagtccacatccacacacatactgacacaaacagaaagctccaatccaatccaagagaaatgtctccgagagcagtcatcatcgtcctctgcctcctgtccgcctcaccctcacggtttgccgccgccgatggcgctggcgcagatgaatgcggtggtcctgcggtcgggggcagatgccacagcgtcgcccgcgcgctgcgcctgaagctaatcgccatcccgtcgatcctgctcgccagcgtggtgggcgtgtgcctgccgctcttctcccgctccgtcgtccccgcgctccgccccgacggcaacctgttcgccgtggtgaaggccttcgcgtcgggggtcatcctcggcaccggctacatgcacgtgctgccggactcgttcagcgacctcagctcgccctgcctgccccggaagccctgggcggagttccccttcacggcgttcgtcgccatgctcgccgccgtgtccacgctcatggtagactcgctcatgctctcgttccacggccggggcaaggccaagaggagcgctgctgcggtcacgcaccataatcatggaggccaataccatgacagccctccggtgcacgggcacgggcacgggcatctagacatgagtgagggtgagacggacgtcgaggccggcgtggcgcagcagctttgcaggaaccgtgtcattgttcaggtcctggagatgggcatcgtggtgcactcggtggtgatcggcctcagcatgggcgcgtcgcagaacgtgtgcaccatccggccgctcgtggcggcgctctccttccaccagctcttcgagggcatgggcctcggcgggtgcatcctgcaggcggagtacggcgccaagatgaggtcggggctggtgttcttcttctccaccaccacgccgttcggcatcgcgctggggctggcgctcaccaaggtgtatagcgacaccagccccacggcgctcatcgtcgtcgggctgctgaacgcggcgtcggccggcctgctccactacatggcgctcgtcgacctcctcgccgcggacttcatggggcccaagctgcagagcagcgtcaggctgcagctcgtctccttcctggccgtgctaatgggcgccggcggcatgtccgtcatggccaagtgggcgtagcttcatcgatcaggttcagctgccgttggtattgtatattgatattctctgtgtttgctcacgcttgcattgcatgttcagtcgcattaagtagcagtattttagttgtaaatattacttactactgggaggtgcatgggcctgatttactagtccagtaacaagacttgagagttttggtt

SEQ ID NO: 91263 - DNA, 105 bp, Zea Mays
caaaagagctgccaacgttttccaatcaaatgtcagcgaaaaatgtcgtgcgattatacttcacatacaacctctatacaatcaaactatcgaaaaaagcataat

SEQ ID NO: 91264 - DNA, 82 bp, Zea Mays
gcgttcacacatccctcccactgcctggtggtcccagcgccacatcatccctgttcatcgtcgtgtcggcattcgccattgg

SEQ ID NO: 91265 - DNA, 2647 bp, Zea Mays
gcttggctccccccacccgaatcttttctgcttgttgaatctgaaatttgtgctgggttgagcagcgtccgtccttgcgcttagcgaattcgcggtgtttacgctccgatgcctcacgtaaggctatctctcaggcttcccaaaagctcgggtaggttgaatcgtggagagttccacagcgtcctagccgccgccgtggcctgacctcgccataaccttccattccatggaggtctccaccatcagcttctcgtccccgccgccgcgggccacgccggccgacctcgaggccgtcggcctccgccgcctcagcgacaacctccagcgcctgctcgacccggccttcctcaactgctcggacgccgagatcgcgctcgccgcggcgaggggcggcggcgccgtcggcgtccaccgctgcatcctcgccgccaggagcgccttcttcctcgaccacctcgcctccctcccggctccggccgccgccggcgagaggccacggctggagctcgccgacctcgtcccgggcggccgccacatcggccgcgacgccctcgtgcccgtcctcggctatctctacaccggccgcctcaagcccccggcgcaggacgccaccgtctgcatggacgacgcgtgcggccacgggacttgccgcccggccatagatttcgtcgtcgagtccatgtacgcggcgtctggcttccagatctcggagcttgcctccctcttccagcgtcgcctctctgacttcgtttgcgaagcgctggacgaggacgtggtgccgattattcatgtcgcttccacctgcgatctccaggacctgctcaatctgtgtattcagagggtcgcagtctccgctctcgatagccgctacctggacaaggagcttccggctgacatatacaacaagatcaaggagatccgccgccaaccagagaacgccattattctggaccctgagcatgacaagagggtcaggaacatcctcaaggccttggattccgacgacgtcgatctcgtcggcttgctgttgaaggaatcgacggtgaccttggacgatgcattcgcgatacactatgctgcagcctactgtgagcccaaggtgtttgcagagctgctcaaactggactctgctaacgtgaacctgaagaacagcggtgggtatacgccgctgcacatagcttgcatgaggagagagccggacatcattctttcgctggtggagaggggagcctgtgtgctggagaggaccctggatgggcgcgatgctcttactatctgcaagagactgacaagagagaaagactgcaataggaagttggacaagtacgaggagaaaagtaaggcttacttgtgtatcgacattttggagcaagaactcaagaggaaatccttcgttttggaccccatctctatctctatagaggagtcgattgccacgcctttgctggtcgataattttcacatgaggctcataaacttggaaaacagagttgcgtttgctcggatattcttcccttctgaagccaagcttgtcatgcgcatcgcacaagccgattcaacccaagagtttgccggcatcaccaacttcagcagactcaaggaagttgatctaaacgaaaccccaacgatgcagaataggaggcttcgcgaacgccttgatgccttaacaaagacagttgagctagggagacgatacttcccacactgttcggacgttctggataagttcctcaacgaagaatccactgatccgatcttccttgagactgggaccccggaggatcagcaagtcaagaggatgcgtttctctgagctcagagaggacgtgcgcaaggcgttcacgaaagataaggcagcagtggctgcaatagcttcctcggcgtcctcgtcttcgtctccgaggtgcagacgacccaataggaaatcacggtgatgtcagtctgttcaggacacctgcactgggttgtgtgtgttttgacatgtaacactgtttcagtagataatgctgattgtcagatttgctgccgctctacagaagattaagcgaccgtctgtttcaagaattattcagacagttacttgtgattctttcaagcagcagttacaaaatgtccaagttgtcttggaggttggccagcacccgtaggacggtgtccacgacgacagggtccgcgcccagcagcctgtgcagctgcgcctcgacgctagagcccaagacgtcgcccacgaacctgtacacctgagcgaggcgcaggtcgtccggagacagggggaactgaaccgtctcgacgtccggcgccagggtaccaccatcgtcggcgcaccaggccgggcaaccggcggcagagcggtgagggtgccgcggcggcacggcgaggcccagcttcttgtccgctctgaggaagtgtttctgggcgtggctgcgtatctgcgtgcccgtcttggtggcgacgaacgcctggaccctcttccagtcgcggccgaacagcagcagcgcgtggaggaagcggccgtgctcgtcggcggtccacttctcccgcggcctgctcaccacgtacggcttccgggacttcttccccgccatcccggccgacgacttcactgctgctgctgccatgtgtttctctgtctccttcccttgcttgcc

SEQ ID NO: 91266 - DNA, 269 bp, Zea Mays
aagaattgttgctatgattagtcagcggttagtgacacttgtttttccccactattgcttttttagaggagatgctgatgtgcaagcatcttcaccttgagttctgccttgccagaatgaatcaactttattttcccatcctgctccatttgaggcaaattgaacagggatttgtttggcttccaaatggtttgttggtcctaaaatagtcagaatcacatgacaactgtgctagaggtaattgttaggatttcttggcaagcgagacc

SEQ ID NO: 91267 - DNA, 901 bp, Zea Mays
tgctgcgtcctgaaggagccagacggataaacagatgtcagccgcagtgaacaagtcgtcggccgggacgaagaagtcccggaagccgtacgtggtgagcaggccgcgggagaggtggaccgccgacgagcacggccgcttcctccacgcgctgctgctgttcggccgcgactggaagagggtccaggcgttcgtcgccaccaagacgggcacgcagatacgcagccacgcccagaagcactttctcagagcggacaagaagctgggcctcgccgtgccgccgccgcaccctcgccgttctgccgccgactatggtggtgccctggcgccggacgtcgagacggttcagctcccgttgtctcaggacgacctgcgcttcgctcaggtgtacaggttcgtcggagacgtcttcggctgtggcgcgatgtggccggtcgaggcgcagctgcagaggctgctgggcgcggaccctgtagtcgtggacaccatcctacgggtgctggccaacctccaagacaacttccctccctgtagcttgtaggtcgacaatattttgtagccagttacgttatggcgggattggttttgaatcctgtgattacaaatttcctgctagataaaaaatagggatttttacgtcactagttctcaaagtcgatcggtacgagtaaaccgatctgtgctagacatgtcctcgtctaagggcctatgcaggaacttcatagaaattatgtgcaaattttagaagaatccaaaatatatttaagagcttctccaacaaatatatatatatatatatatatatatatatatatatatatatatatatatatatatatatatatatatatatatgagtcctaaaaattaaaatagaatatgatttaaagtgtttacagct

SEQ ID NO: 91268 - DNA, 1387 bp, Zea Mays
aaccgcagaggccaacagcacaacgagcgcaccactccccaagaaatggagctgacccaactcctcctcctcaccggcaccgcctcccgagctcctgctccgcgcgcgtagccgcgccgcagttcccagtaataacacgcccgcaagctccgcagtccgctccctgcgcgagggtgttgtttgagccatgaagatggcgacgatgactgcttacaagtatcaagctcaggcgttgatgagggactacttgctagctgatctactcgttccgtacacctctgtgctctttggcattgtcctctgcaaggcttatgatttcactcgaatactgagctccttttatttcaaggggtatactttattgacaaaaatacagcgcatcgaatggaacaataggggggcctattacattccgtaattcgataatatccacttctgcattgggggtttctgttggctacttcatcactgatcttgaaatgatcttctggctgtatccttcccttggtggaatggaatatgtaggtgccaacttaaactaatttcacaagaaccaataatcataagctagtctgatttaacataacaattttttttttcagaataagttcacatgccaccagtttctcaacatgttagaatattctcaggtggtccctagctagtattatcttatggttacgtgttgccatttcaggtcctccaccatactctttctctggttgcaatagcttacacaatgttgtctggggaagggcagttttacacatacatggttctcatttcagagacaaccacccctgaaatcaacttgcgatggtttcttgacactgctggactgaagaaatcaagtgcttacttggttaatggaattctgatgtttgttgcatggctggtggcaaggatatttttgttcatgtatgtattttaccacatttatttgcattacagtcagataatgcagatgcatgcctttgggtactacctgacgtttgttgtgccatcggtgctctttgtaatgaacacaatgtggttcatgaagatcttaaaaggcgtgatgaaaacactggcaaaatggtcatgatggatgatgccaagaggatcccagaactatcaacaggatttggtctttctggcatcattgatctgtaaagttatggatatcagggtaactagagaaagttaatatgtaaagtattagcaaacaagctagattaggtgaaattgccctattttcagcagtgctggaagttcataaccagtttggtttgtaccggagatccagcacgctgttctgcttacccccaatgccatgtgtatatctggagcattttgcttaccccaatgccatgtgtatatttggagcattttaatggatggtttgttc

SEQ ID NO: 91269 - DNA, 1288 bp, Zea Mays
aaccgcagaggccaacagcacaacgagcgcaccactccccaagaaatggagctgacccaactcctcctcctcaccggcaccgcctcccgagctcctgctccgcgcgcgtagccgcgccgcagttcccagtaataacacgcccgcaagctccgcagtccgctccctgcgcgagggtgttgtttgagccatgaagatggcgacgatgactgcttacaagtatcaagctcaggcgttgatgagggactacttgctagctgatctactcgttccgtacacctctgtgctctttggcattgtcctctgcaaggcttatgatttcactcgaatactgagctccttttatttcaaggggtatactttattgacaaaaatacagcgcatcgaatggaacaataggggtatgtccagcgcacatgcaatttttatcacggctgtatcattatatattgtcacgtcgactgatcttttctccgattgtgtcaaggggcctattacattccgtaattcgataatatccacttctgcattgggggtttctgttggctacttcatcactgatcttgaaatgatcttctggctgtatccttcccttggtggaatggaatatgtcctccaccatactctttctctggttgcaatagcttacacaatgttgtctggggaagggcagttttacacatacatggttctcatttcagagacaaccacccctgaaatcaacttgcgatggtttcttgacactgctggactgaagaaatcaagtgcttacttggttaatggaattctgatgtttgttgcatggctggtggcaaggatatttttgttcatgtatgtattttaccacatttatttgcattacagtcagatgcatgcctttgggtactacctgacgtttgttgtgccatcggtgctctttgtaatgaacacaatgtggttcatgaagatcttaaaaggcgtgatgaaaacactggcaaaatggtcatgatggatgatgccaagaggatcccagaactatcaacaggatttggtctttctggcatcattgatctgtaaagttatggatatcagggtaactagagaaagttaatatgtaaagtattagcaaacaagctagattaggtgaaattgccctattttcagcagtgctggaagttcataaccagtttggtttgtaccggagatccagcacgctgttctgcttacccccaatgccatgtgtatatctggagcattttgcttaccccaatgccatgtgtatatttggagcattttaatggatggtttgttc

SEQ ID NO: 91270 - DNA, 2204 bp, Zea Mays
gccaagcaacagttggatcactgacatccgcgacctcgtcgcagggcccacactacatgaccgacagctcgcgggttgtgcccgccagcctaccagaagcgtttccggcagcgaggtttcctcccatcgatctgtacgccctccccaccggtgggtcgcgcacctccaccaacctaccttcccgccccgcccgtcgccgtcgacgactcgccgtccgtttccgccctccaaaaccctactacctcttaccttccagccccgcgtcctccatggccaccaacggcagctctccgagggttcgggacacggagagcagtctggagaaggtgaagcggcagctgtcatcggggtctgggaggtacctgctgcaagggcccctgctcaagcgatctgagacgttacggaaatggaatgagcgttgggtcatattggacccgacatcaggaaagatggaatacaaactccggagaaatgaaactgccattaaggggaccattctgtttgacgcctcgagcaccattactttatctcctgtgaactttcaagggatgccaaaatataatggctgctgcttctacatcggaactcctcaaaagaaggattactttctttgtgctgaaactcctggtgctgcgaaagcttgggtatctacattacatgcaactcagttagtcttacgagctcataaagaggcagtaaattctttggctgggaatggctctccagctacattaggcacagttgctactgcagttgctaatgctaatgcaacagccatggaggctaccaaggagatagaagctgcactaaaggtttcaatgagggcagctcttgggttggatacaaataactccaacgagggccaacttgatgacctaacaatcatgaaggagaccctacgagtgaaagatgaggaattgcaacatttggctaaggatattcgttcccgagatgctacaataaaggaaatagcggacaaactaacagaaactgctgaggctgcagaagctgctgcttctgcagctcatacaatggatgaacagaggcagcttttgtgttcggagattgagcgactaaaacaagccttggaaagacaaatagaacaatcagtggttaagcttagacaatccgaagagaaggttatcagcctgagcaaagagaaggagcagttgatgaaggaaagagatgctgcatttcaggaggctcatatgtggcgcattgaactagtaaaagccagggagcaagcagtgatacaggaagcaactattgcccgagcagaggagaaggctagagtttctgaagcagatgccgcagctcggatcaaggaagctgctgaaaagttgcatactgttgagaaagaaaaggaggagcttctagccctggttggtgttctccaatcacaagtcctgagagagcagagcagcacaaagcaagtatgcgaggagaggtctgaatcatgctcaggcgccgataattcacctctgttgacaaagcatgttgacgcatcagacgatgatgtggacaaagcctgcgtaagtgactctagatcggtcccggtttcgagcgatagcactgaggtccagctggctgtggatggggtggacatccgtcctgttggcgatgcagagtggagtagcttccagcagccagaagcgctgatcgctgatgtccgggaggtctccccagaggcggacggcggcagcttggatattcctgtggtcaatcccccaccagtcagtgatcatatccagggaggcggcggcgcaacccatccctgaaggcctgaggttgctgctaccttccgagattggtgtggttgctgagaacccaatagatagggatgtctaaatctggagagaagtgccgttgagagtgtatgcggattgtatgtccattgtattcggagtataagaccgaataaaaagatcgcagctgtgtttggctgtgggattgtaaaaaacttttagcgctacacctcaacaggactgggccctcttgggctaccggccggcactgccctgctgctcgtactcctgctgacttggaaaaacatcaggcagcaagctaggcgagatgttgcttttatctcttgggacagttcactagtgaaaggtgagccctctctgtcatgatagcctcgaaaccaacttcagaagcatctggatgccgagctgtaatggagagcagcaatatcactgttctcc

SEQ ID NO: 91271 - DNA, 2320 bp, Zea Mays
gccaagcaacagttggatcactgacatccgcgacctcgtcgcagggcccacactacatgaccgacagctcgcgggttgtgcccgccagcctaccagaagcgtttccggcagcgaggtttcctcccatcgatctgtacgccctccccaccggtgggtcgcgcacctccaccaacctaccttcccgccccgcccgtcgccgtcgacgactcgccgtccgtttccgccctccaaaaccctactacctcttaccttccagccccgcgtcctccatggccaccaacggcagctctccgagggttcgggacacggagagcagtctggagaaggtgaagcggcagctgtcatcggggtctgggaggtacctgctgcaagggcccctgctcaagcgatctgagacgttacggaaatggaatgagcgttgggtcatattggacccgacatcaggaaagatggaatacaaactccggagaaatgaaactgccattaaggggaccattctgtttgacgcctcgagcaccattactttatctcctgtgaactttcaagggatgccaaaatataatggctgctgcttctgtatcctattttcctatattttggttaaaaagattgtttcagaaagagtttcttaaatagttatatttagaggaatcacatgttttaaggttgtgctgttcctttactgtatttagacatcggaactcctcaaaagaaggattactttctttgtgctgaaactcctggtgctgcgaaagcttgggtatctacattacatgcaactcagttagtcttacgagctcataaagaggcagtaaattctttggctgggaatggctctccagctacattaggcacagttgctactgcagttgctaatgctaatgcaacagccatggaggctaccaaggagatagaagctgcactaaaggtttcaatgagggcagctcttgggttggatacaaataactccaacgagggccaacttgatgacctaacaatcatgaaggagaccctacgagtgaaagatgaggaattgcaacatttggctaaggatattcgttcccgagatgctacaataaaggaaatagcggacaaactaacagaaactgctgaggctgcagaagctgctgcttctgcagctcatacaatggatgaacagaggcagcttttgtgttcggagattgagcgactaaaacaagccttggaaagacaaatagaacaatcagtggttaagcttagacaatccgaagagaaggttatcagcctgagcaaagagaaggagcagttgatgaaggaaagagatgctgcatttcaggaggctcatatgtggcgcattgaactagtaaaagccagggagcaagcagtgatacaggaagcaactattgcccgagcagaggagaaggctagagtttctgaagcagatgccgcagctcggatcaaggaagctgctgaaaagttgcatactgttgagaaagaaaaggaggagcttctagccctggttggtgttctccaatcacaagtcctgagagagcagagcagcacaaagcaagtatgcgaggagaggtctgaatcatgctcaggcgccgataattcacctctgttgacaaagcatgttgacgcatcagacgatgatgtggacaaagcctgcgtaagtgactctagatcggtcccggtttcgagcgatagcactgaggtccagctggctgtggatggggtggacatccgtcctgttggcgatgcagagtggagtagcttccagcagccagaagcgctgatcgctgatgtccgggaggtctccccagaggcggacggcggcagcttggatattcctgtggtcaatcccccaccagtcagtgatcatatccagggaggcggcggcgcaacccatccctgaaggcctgaggttgctgctaccttccgagattggtgtggttgctgagaacccaatagatagggatgtctaaatctggagagaagtgccgttgagagtgtatgcggattgtatgtccattgtattcggagtataagaccgaataaaaagatcgcagctgtgtttggctgtgggattgtaaaaaacttttagcgctacacctcaacaggactgggccctcttgggctaccggccggcactgccctgctgctcgtactcctgctgacttggaaaaacatcaggcagcaagctaggcgagatgttgcttttatctcttgggacagttcactagtgaaaggtgagccctctctgtcatgatagcctcgaaaccaacttcagaagcatctggatgccgagctgtaatggagagcagcaatatcactgttctcc

SEQ ID NO: 91272 - DNA, 3651 bp, Zea Mays
gcactccatcttcctcgacgcagctctctctccccttgatcttttcaccgtggctttatctcctgccgtgtcgttcttttattccccacgcccaggtactaatccagtgcacccaccgccctctgagattttccatcgtcctcctcagccgctcagttcctgggagaaagaaaaaaaaaatcctgccgcgcgctggtgtccatctcctgaagatttttccaccggatgcctctccatttcttacgtagcgcagatactcctctccttgagatatttccagccgccgcgagtctttatcttcttctcccacgcgcacaagctcctccctctgcgcatctgcctgcttccggccgagttctccacaccgcgctccactactcggcaaaccgctgcccaggttcggccagccaagtgctccatctcccattcaagctccatgcgcgcgcgtcctggattcctctctccctcgcgtcttcttccccagcacgccggcgcgtctccctgcgcacgcgccgccgtcgagttctccgtcgcgcgccgtggtgtttctcagcgcgcaccttcctcttcctagctctgttgccgcgcgcgcccagcagaagtcccgtccgtccgcgctctgcccagtccctagctcggcctctgctctgtcgctgctgctgcgcgcgtgcttgtcggtgtttccagctcgccgtggagccgagctctccaccgccgtcctcagcgctcgcccagctctgttggccgcgcccctgttcctgctccggctcatctgcgccaccgccgcatcactgctctccttggcgctcgcctttggtgctggccgcgtgctcctagtccggctcagccgcgacctcgccgtcgatcctaagctcgttgcgcgccctgttccactgtgtcgatccgctcattttgttgagtccgtccgcgcgcgcagcttcctcaagtcgtcgtgtgcccagctcgctccagctcgcaggtcgagcttctccctcacactcagatccggccgttaacgtctagccatatgttctttttccccagctcgtggatgtcgtcgttccgtgtgtttgaccttcagagttcgccggccatcacgacatcctcatctatcgtgccatgcttcgatggtcgatttgcacagtttctgctcggcaatcggttctgtcaccgtcgaacctcgttcctgctcgatctcgtcgaaccccgaatcccggacgttagacaaaaataagtgagatccgtgtgcatcgcttatcaagtgctcagtcgaagacttcaatcgaaggtcatcattgttccgtgcgtcaataagaaatcctaagagtcaggtgaagacggaattagcagcgtgatgttcaccaagtactcgacacaagggctgaactgaaatccttgccgtgctcgtggatagcgcgtcagagttagtatggtaagccgatttatattttggttagcttaattattgatttgatgaatagtttgcgtacataagtaggaagtggtcgtgtcacgcgaaactcaaagttttaaaatgattattgtgtgaggagtggttaaatgaataatatgtctagtgtcttgatcatatagctgataaatacggttgtggttatattaaatgattattaaaatgtatcgcaagtaatatgtggtggatacatatgtcggataggtttaaattggctctttgctgaggactgaggagaattaataatgtgaagaattgatttagtaatccaaacaattatccgataagtctgtcgtcgttgattttgtaggatattttggtggttaaacctgaaatgtttgattaattgttgacatgtaaaatatgtgaggtgtaaaataaaattaaaatagttctttgtgagtgatgtggtataatttataaagcgagtgataagtttagaatttaattaattagctgataagttgtgtttaggctaattgtattaaatgtgtatagtttgttgtttcgtgatgtttgcgttagattcgggtaatctagaaaagcgtaaccattactcttagtcgtacgtcgataactagtgtttccgtatgaaacagtacaacgcctcgccgctaggtgtttaattcgctatcgcgtagcactatttaggtttgtaatattcccgtctatatgcgttcatgtgcataatgcatttcattcaagtacgtgaattaaccacgtgatgcggaagacgacccaagtcgaccccaagcgcgggctactccgcatggtgatgctgatggacgaacctgcctgatcaagtgctaggacaaggatgatcgtcaagtggacgtcgcctaccaaacactaacctagtgttattcaggcaagccccagtacatgcaaccccttccttatgtttttaaataatttttacatactttaagtctagcgaaatgtgcattaggtttatagtagttgcttggaaaccctttgatgcattggctaccttgaaatccattccttttatagatacttctggtaaagtatcaaatacgatttacaaaattgcttagccttgcctagaggtaaatcttgtgaatagagattgtcctttgcgttaatgctcaggggttatcctgaggaaggatggcttttgcctgcaataatatttttattgggagcgtggtgggatcttactgcaaagttctctataatgctcttttcatcctaaggaacacaaacaatcctaaggatggaagtacttaaatcgagacttggtttaggaacaagtgatgttctacccaggttgattaaggattatagcgaatgtaggcttgctgatcgaggatcttttaactggtcacatgcctcgtcatgggtaagccttgcctcatgcagactaataccagagtaagacaacacgcaatgggagtggagagatggcgagagtagcgtgtaccctccatggcaagaggctagacggtggtgtatctgtgctctcggttggcgtgaacctgatctggtcttaagaacctcggtggcgagttgacatatgcaagggttaagtgctacatatgtcgtgtgattggagatccctagctgggtattaatcgattcggattgtcgttacttctcggacatgaagacttggtcactgccctgcaatctaagtcatggatggaatcataatgagcaaaaatcgtgtgtattgattaatgtgatgatgaaattagactagatgcaaacaaggtctattaatacttaatctagcattaaaatgttgaaagtaaggactcattttagtaagctttctgcaaactattaatgttgattcttgttaaaagcctttccttgattcccaaatccagcgtatccttgagagtctttttccttagtcgggtaagtcttggtgagtacttgcgtactaagggttttattcccattgttgctgcaggtcacgagtcactttgattgtgattggtgttaagcgccggtgggcacgaccttcttaaaagtctaagtatttcctctatactttttattgaggattgtcactgagctagcatatatttcaaacttataaataatttataacatttcaaagtttattctttgaaccacttttgtaaccactccgataaatataatgtaaatttgttgcaacttgtaaaatttggtaataagattttcgctgc

SEQ ID NO: 91273 - DNA, 666 bp, Zea Mays
acattgagcatcatatgttgcccgagaagggctatggtgcagcttcatatccttagagatatggaggcagaagtcattattgcatttgtagccatgtgcattcatgggagaggtgttgaatctattatgtggatgtggataatttggacttgtgcatggtgattctacttggcgttgagtttttagttacttgtttacttgctgcaatttactgttcaaaagaaaagaaagaagttctgaacacgtggttgtgtaagcacagttgatttacaatgtcctatttgttgttgttatgtttacttgctgagatgtgttatctcacatcttgcattgtttgatgcaggcacctaatttctgctttgggaatagagggatgtagcagcacgaccactacacctttaataaaggaaccaccatttaataatgttgttaatcagagttggacaagtctagtgaattgttttgttcttggttgagcgtttattttggggtgggctgagtttcttatcccatttgttttgcttcagttgagtcataattaagttttaccacttttgcatttcagtttctactatgtgaattatatgtctttatatcttgtatgagcttcatgtttcccctccttgttatgctagttttcaaaggaggtgctgccggatttttgct

SEQ ID NO: 91274 - DNA, 298 bp, Zea Mays
ccaagaaaataaataaattaaagctcttgttattggcccacagaaggaaagaatgtactgtcctgtttgaaacaaatgaaccagacatgcatttccatcagcaacccacttggtcaacaaaggaggtccagcatgttctagagataaattgcgtcgattcaagaaactagaacattaaccgccacggcaaagtgcagagttaaaatgttgcttaatatacccattggcatttggacatcatgacttcagttgatcaaatgcagtcagaagactggtcttgtaagtttaatatcagcat

SEQ ID NO: 91275 - DNA, 896 bp, Zea Mays
aataattaagcacgttactgttagcttcaaatagggtcttggtaaaaaattcaggcaatcttcagaaacaggaattgccttttcagtgtttgaatgatcagacatattaaagcagggggacatggatgtatatccacttgcagttaaagctgaaacaacattatctgttgatcacccaccagatgtagatgaccaaaagatgaaaactcctaactcacatatcacccaggcggccagaccgtgtttgaaatgaaagaaaatggggattatcaagtaagagttgtttgccagatcctttgggtcaatggaactaggtatgaacagcaagaaatatatggcataggaaactccatggaaggtaatgctgatgcaaattatccagggaaagaatgtgttatttgccactcggaaccaagggagatactattatcctcccatgtaggtatatggtaagtctgttggtcgtctattcaagaattgcattttttttgtaaaaactagcgatctacttcggtataagttttcattatttaattgtattctaaattaaaaacatagttatcttttgataataatatttgcttgccagatcctcaattgtatgatccacagtattccatattaggaatattggtccagaaaaattagtagttccgtacttatgtctaagcatcttccattttctcgtaactgatttaatgttgcattagcatatgtaagcttctagcatcgcatggctttgccgacctctgttgtatctgcctatctagaggtcagagaccaagatgccaaggagagtgtgtatatacacatcattcatgcatgtgccatggctacctgaagaagcgtggtgaggaggattcctcaagccaggttgacttcttttttgggaaaag

SEQ ID NO: 91276 - DNA, 865 bp, Zea Mays
aaacaggtgctattagattagcgagagtcgttcctccaccaaccaattcgcttctctgtcaacttcacttcctcgtcgacgcctccggcccaccaaccatgccggcggctgcggcggcgcagaggctcctcgcggcgagcacgaaaatcatcggcgttgggcgcaactacatagcccactccaaggagctcggcaatccggtccccaaggagcccgtcctgttcctgaagccgacctcgtcgtttctccacgctggtgtggccaccgccgccgttgagatcccggagccgctcgagtcgctacaccacgaggtcgagctcgccgtcgtcatttcccggcgcctcctgtcgccgccgtccgccaccgcggccgctcggcgggccgcgccagttgccgctgaggctgtttccagcgggggtggcgtcctcctacctaggggtggtgtcgccggggtagcggccaacggatggagtggtagcggcccagggctccgcttggctcgaaggctctgcacctacgacgagagagatgacagggcactagaggaagaagttgagaagaaatttggatggatattgaagataatcttcctaggaactgctggcctagttggttaccaattctttccatacatgggtgataacctgcttcaacaatctatctcgcttttgcgtgtcaaggatcccttgttcaagcggatgggagcttctcgtttagctcgttttgcagtggatgaccaaagaagaatgaaggtggtagagatagggggagctcaggaactgcttaatgtattggaaggtgctaaagatgataaaacacgaaaagaaactctaaaagctcttgctgcgctttcaaaatctggtga

SEQ ID NO: 91277 - DNA, 112 bp, Zea Mays
tttttgttttatttttcatctgcattctctggtcttttctctgttagaataatatatggtctgaagctccactttcctagtcatatgtttctaggaccattttttgtcatgg

SEQ ID NO: 91278 - DNA, 1966 bp, Zea Mays
ggggggggggggggggggtcgccgcctgaaccatttggattccctcacctggaattcgaaaaacggcgactactcccctagagcagatccatctagactctagagtacatccgagggggaagcgagcagatcgatggcgatggctgagaaggtgaaggagaagatgctgatgctccgcagcagcgacaaccaggagttcgaggtgaaggagtcggtggcgatgcaatcgatgaccctcaagaaaatggtcgaggacggctgcgccgacaaaggcatcccgctccccaacgtcacctcccacatcctcgtcaaggtcatcgagtattgcaacaagcacgccgagccgaccgggccgggcgacgcggccggcaccaccaacaggtccgccgaggatgagctcaacatcttcgacgcagacttcgtcaatgtagagcactccaccctcttggacctcatcctggctgcaaactacctggacatcaaggggctcctgaacctggcccgccaaaccattacagacttgatcaatgggaagatgcctgaggaggtctgcaagaccaacatcaagaacgacttgaccatcccttccacgtcggccttggccaccacaatgccctcctccgagcgaaagcagatggaggccaggtttatcgcctatatgcaagaaactgctgaggagaggatgactgggtttgctgttcgtggtgaaaaatacagaaagcatggtgaacgtccgccacaaccaccattggagatagttaaatacccagctcttttggaaagagcttggggatgggattcgatactgccgtactgtcctgtgaattcttggcccctatacaagacttacctccaagaatattatgagcgcaattctcgtgaagtattggctcatcaagtggaagctaatgctgcctctggtcccaatctcaacggggctgatgagaatgatctggcaactctgttcaacttgtgtatcagtagggaggttcaacttttgaatctgctgaagcgccgtgatcaaaaacacaatgttgatgagatcagcctgaatgaaaagctcaccaactgtgcccgtcagataacttttgtggaatatgctggttttcctttccccagtgttgccttaaagtgcatcatggcggagtctgatctgttgtgcatgttgctgatgtgtgggactggaatgatatcccaagtcaacatttgctccaggattcgaaaggtggccttcagatttatgacctacaaaggacctggatgttttgctgctgctgccaccatgatggccaccacaaaggaggccaagttgatgagtggactgctgaggaacagatgtagggaaaataatggtccattttcaaggagtgtctttatcaggaaatggaccattgcagctatgttcagaatatgtgaggaatgttctcctgtggaagagtctacagggggctacactgctactaaattgatacttgatggatctgatgacaagaatccttgtgataaggaactagttaataaggacaacctgctgcagaggaacaagataaatcaaaaataccaaggactgttcaaaggaaaaacaactaaatgccgacaccctgtacaaaagcaagaaccaggagatggagcaacgcccgcatcacccagtccggccaatcccatctcaactgtggtgcaaaaactttggtaagaaggaatactgaaggaccttccaaactagcatgaagtgcgggcaccttgcttttcttttgccttctttttgtgaaaacgtgtgcttagcgacaatgctggctaagtgttagaagcatctctggaatgcttcgtgtagtatcttttgactctcttttcttttgtcgtctcaatcatgttacatgagaaatgcctgatggactcaaataatgaaccggtgattcaaaaaccaaaagcctctgatgaatctatttgagggtttggatcttgatca

SEQ ID NO: 91279 - DNA, 1214 bp, Zea Mays
gctttgcctgtgccaaaacacagactgttaccaacttaatctgatgttttatatttatgaactttgcattatttgcaaactaatttctaggccaccacaaaggaggccaagttgatgagtggactgctgaggaacagatgtagggaaaataatggtccattttcaaggagtgtctttatcaggaaatggaccattgcagctatgttcagaatatgtgaggaatgttctcctgtggaagagtctacagggggctacactgctactaaattgatacttgatggatctgatgacaagaatccttgtgataaggaactagttaataaggacaacctgctgcagaggaacaagataaatcaaaaataccaaggtagaggtttctcttaaaatcggctgctagctcaaatacgttggcacatttatgttttcggttgcggaaccccgtatcaatgagcattcttctcttaaaatcggctgctacctcaaataagttggtatgtactaatgagcactgaattatgacaatgacaagatctcctctgaggaggaggaactaccaaaagaaaaccacctggaggaaaggaatgaggcaaagaaagacgaatgctgtctcaatgagaattgcactgctatctcaaatatgttaactgataatgtttctttcatggatatccttgctgacactggtaaaagagaaaattcaaagaaaattgtgcgtctagcttgaatgtgttctctcttttatgttcattttttagagaaaaaaatttcttatgtttgttacacggatatccttactgacttcactgaataatataggactgttcaaaggaaaaacaactaaatgccgacaccctgtacaaaagcaagaaccaggagatggagcaacgcccgcatcacccagtccggccaatcccatctcaactgtggtgcaaaaactttggtaagaaggaatactgaaggaccttccaaactagcatgaagtgcgggcaccttgcttttcttttgccttctttttgtgaaaacgtgtgcttagcgacaatgctggctaagtgttagaagcatctctggaatgcttcgtgtagtatcttttgactctcttttcttttgtcgtctcaatcatgttacatgagaaatgcctgatggactcaaataatgaaccggtgattcaaaaaccaaaagcctctgatgaatctatttgagggtttggatcttga

SEQ ID NO: 91280 - DNA, 2412 bp, Zea Mays
ggggggggggggggggggtcgccgcctgaaccatttggattccctcacctggaattcgaaaaacggcgactactcccctagagcagatccatctagactctagagtacatccgagggggaagcgagcagatcgatggcgatggctgagaaggtgaaggagaagatgctgatgctccgcagcagcgacaaccaggagttcgaggtgaaggagtcggtggcgatgcaatcgatgaccctcaagaaaatggtcgaggacggctgcgccgacaaaggcatcccgctccccaacgtcacctcccacatcctcgtcaaggtcatcgagtattgcaacaagcacgccgagccgaccgggccgggcgacgcggccggcaccaccaacaggtccgccgaggatgagctcaacatcttcgacgcagacttcgtcaatgtagagcactccaccctcttggacctcatcctggctgcaaactacctggacatcaaggggctcctgaacctggcccgccaaaccattacagacttgatcaatgggaagatgcctgaggaggtctgcaagaccaacatcaagaacgacttgaccatcccttccacgtcggccttggccaccacaatgccctcctccgagcgaaagcagatggaggccaggtttatcgcctatatgcaagaaactgctgaggagaggatgactgggtttgctgttcgtggtgaaaaatacagaaagcatggtgaacgtccgccacaaccaccattggagatagttaaatacccagctcttttggaaagagcttggggatgggattcgatactgccgtactgtcctgtgaattcttggcccctatacaagacttacctccaagaatattatgagcgcaattctcgtgaagtattggctcatcaagtggaagctaatgctgcctctggtcccaatctcaacggggctgatgagaatgatctggcaactctgttcaacttgtgtatcagtagggaggttcaacttttgaatctgctgaagcgccgtgatcaaaaacacaatgttgatgagatcagcctgaatgaaaagctcaccaactgtgcccgtcagataacttttgtggaatatgctggttttcctttccccagtgttgccttaaagtgcatcatggcggagtctgatctgttgtgcatgttgctgatgtgtgggactggaatgatatcccaagtcaacatttgctccaggattcgaaaggtggccttcagatttatgacctacaaaggacctggatgttttgctgctgctgccaccatgatggccaccacaaaggaggccaagttgatgagtggactgctgaggaacagatgtagggaaaataatggtccattttcaaggagtgtctttatcaggaaatggaccattgcagctatgttcagaatatgtgaggaatgttctcctgtggaagagtctacagggggctacactgctactaaattgatacttgatggatctgatgacaagaatccttgtgataaggaactagttaataaggacaacctgctgcagaggaacaagataaatcaaaaataccaaggtagaggtttctcttaaaatcggctgctagctcaaatacgttggcacatttatgttttcggttgcggaaccccgtatcaatgagcattcttctcttaaaatcggctgctacctcaaataagttggtatgtactaatgagcactgaattatgacaatgacaagatctcctctgaggaggaggaactaccaaaagaaaaccacctggaggaaaggaatgaggcaaagaaagacgaatgctgtctcaatgagaattgcactgctatctcaaatatgttaactgataatgtttctttcatggatatccttgctgacactggtaaaagagaaaattcaaagaaaattgtgcgtctagcttgaatgtgttctctcttttatgttcattttttagagaaaaaaatttcttatgtttgttacacggatatccttactgacttcactgaataatataggactgttcaaaggaaaaacaactaaatgccgacaccctgtacaaaagcaagaaccaggagatggagcaacgcccgcatcacccagtccggccaatcccatctcaactgtggtgcaaaaactttggtaagaaggaatactgaaggaccttccaaactagcatgaagtgcgggcaccttgcttttcttttgccttctttttgtgaaaacgtgtgcttagcgacaatgctggctaagtgttagaagcatctctggaatgcttcgtgtagtatcttttgactctcttttcttttgtcgtctcaatcatgttacatgagaaatgcctgatggactcaaataatgaaccggtgattcaaaaaccaaaagcctctgatgaatctatttgagggtttggatcttga

SEQ ID NO: 91281 - DNA, 506 bp, Zea Mays
gattgaacagcacccttttcataaagtctcaggtttgaaacaagccacagcttaatttccatacagtcactggtggcatacataaagtcgccatacaaaaggaggctccaaagcacagcatactacatatagtcttcaaaccagcatactacatataatagtcttcgaagcattggtggcatacaaaaggagcagcatcaaacaacctgaagaggacaaagagatgaaaggtgctgggggttcatcaccgacggcgaactgtggggaacgatggccggggaaggatgcaaggcagccgccatgagcgacgacagatccacggcgccatggcaactaactgtgcgggcgcacacagagcttccagaggactcacaagttgacgttagtgaaggatccaaaccgggcgccgtggggacggtggatccatgccgccagggctctccggcgcggcgatggcgacctccaaggcaggctcgggaccagagcccagtatgccagtaagtgat

SEQ ID NO: 91282 - DNA, 472 bp, Zea Mays
aaaatttgggattgttagctcagaggatatggctgagcatgcttatgaagatagatacgctaatgttgatttagtttgtgctctatgcgacaatggaggtaaaattgtaagggggtggagtacatcgctggcgacgaacagcagccatggggagggtgcgttctgtctctatctgtacctactctgctggagtactgggcaaacgataaatggacaacatcgtcaccatttatcagggaagctggaggttactgaaattttcaatttttcacaagatgatttgttgaccgaaggcatgatgatacttgatacacactgaggtttttgtctagatgggtcagtgtgttgagacaaaagaaaaacagaaagcatttgagatttgacgttacgctgtcttctattccataaacgaactaaggtgtatattctgcgccatattggaatttatgcaatcaagcctgctagtttgtta

SEQ ID NO: 91283 - DNA, 98 bp, Zea Mays
ctgtcatcgacaaatttctgcagcaagaacaggcaatgagaatgtagaagttgttgcagacttattgaggaagttagatgctaacctgaaacacgaaa

SEQ ID NO: 91284 - DNA, 131 bp, Zea Mays
ttcctattctttaccagcccgagccacacaaatggtcgagtaactttgcatacctactgttcagtaagtttgcactgggacaagccccagccgcacaaatggcggagaccagcccagcggcgcggcaccag

SEQ ID NO: 91285 - DNA, 425 bp, Zea Mays
aatatccaacttttaacgcttgtaggttccatccgtcttgtatgggaatgaccattgagcaagccaaaaaattacatgtgctcggattgtgctaaagaaaatggtgcaaagagaccctcaaactcatacccagtttcaccaaactctgattctaagatatggacctcggtggttttctccacgttaggaaagctggaagagtcttttctactcagttttatgataacagtggtgttatggtcaaacaaagtcttgcgtgtatgtaccaacagctaaactgtaaacacgacattaccatagttgattacatgaataattatcttttatatcttattgtaaaatctgaaacagttgtcatgtagatggttagcttgcattttacgctacaattacttcaaatcacttcttgtttcattttacaccaa

SEQ ID NO: 91286 - DNA, 1012 bp, Zea Mays
ttggctgccctgtttgctttggaacgtgcaacgtttctgggaatgtcaagaattattttggagactgatgctatggagttgaagaagggcctgacaacgacgaccctagaccggagtgtagatggcagcttgttcagacaaatcagagaattcatgaatgtgtcatttgattgttgggaggttcaacattgtccaaggacgtgcaacaaagtggcagattgccttgcgaagtatggggcgagcgtggtttgctctggttcgaatgttttcatgagccaagtccccgcctttgtttccaatttagtctccggcgatctgcctggagatgttgtttaacagtctctatgagtctgtgtttcaaaaaaaaagtcttcttcgttcttccaatctccttcctattcctctgttagggtagccagtagctaacagctaggtcctgctctgctggtacgctgtcatcctggatctaccgcgcgtcatcctccttgcctaggcgtagcgctcgggcggaaccgagctgcggccttaagcatcgacaccgtcctcgacttccccaccagtacctacagtgaaggccgaccagattgaagtgaagcgccaacgccgacctgtagatctcgcctccaccgccgctagtgccctccatcccctgtccgcgagtctcggcaaccaaatctgagttttgaagctttgaaccccagggcggttactgttgtcgtagaccccatatagagtgtgaaggggaaagtagttattgatgtattccgcctaattaatcctcagaccatgatgcttggccaggagccacggcagacgacatcaaaggtcgggcacctaaataactcatcgattcaggctcttatccatgggctgaacagacactactaatttgcaatcaattaccgcaaaaatgagctcgagaagaaaatgttgttgaacttgcacaaaaagaaatggatagatgggctaattttgaagaggtttgacactcactcaaaaaaccaacgagcaa

SEQ ID NO: 91287 - DNA, 2394 bp, Zea Mays
gcaccttctccaccggctgtcgcacgcccatctgccggagtcacagccgatctgccccacgggcaccgcgtcgagcttatcaccggggaggatggatttgggtcggtcaccacccttctccatcccccggtcaagggtacgtactctactgcatcccagcatcagttgtgtgcgggttctaaattccatttgccgggtgctgctcatgtcaagggtgattttactcgggttgatggttctggaggagagattagaggtcgtttgcctaagttaaacttccctacgtttgatggagaaaaccccaagctgtggattaaacgcagtagagattattttgacatgtatgcagtagagccgcaagtgtgggtgcgcgtctcaaccatgaattttgtgggagcggctgcttggtggttgtcttccatagaagagtcatcccaattggctagttggtctattttttgtcaagctttactggagagatttggtagggatgagcatacggtgtttattcgccagttgttcagtattcggcaaacctcatcggttgctgagtatgtggagcgcttctcgcagctgcgtgataacttggtggcgtatggtcgaccgatggatcccctctactttgttcagcgttttgttgatggcttacgcgccgacattcgtgcggccgtgtttgtgcaatgttcgtcttccttcgatactgcttgtgttttggcatcgttgcaggaggaggtgtcggggccgctgaagcgcctggaaggtgttcgatcgtcgttctcggtggtgcccaaggcgccggtgtgggggcccttgccgctgccactaccaccgaagatggatccgatgggtggcagaaccgaagaagcccaacgaggcgatccgtttcgtcctcgtgtaatcgatgataagctcgtagcgcttcgggcctaccgtcgtgctcgcggcttatgccagaagtgtgctgaaaaagtgtccaaggaccaccagtgccctccgacagtgcagttacatgcgctgcaagaagtgtgggatctttgtcaattggatgaggagcagttgtctgttactatggatgtcgaatctcctgttgatggtcagttgtgcttggcagtttcagttgctgcaatacaaggcagtcctgctgtttacaccatgaagttgcaaggtactattcaaggccagccagtactcattcttgttgattcaggtagttctcattcgtttgtgagttcaagagtggcagctaggctatctggtgtttcagagatgcaatgcccaatgatggtgcaagtggcagatggaggaagacttttgtgttctcgtcagctcttgggggtcacttggtctgtgcagaactgtgagttcctttcggattttcaggtcctggatattgcagcgtatgaccagattcttggtgtcgattggttggctcaatatagtcctatgaaggtacactggctacaacaatggttgttgattccttatcgaggttcatctattctgctgcaaggttgttcagtttcctctccacaacatactgtggtagtgaagtctggatctaaatctctggttgtttctgtcgctggaatgggacttccagagcctatggaaactttattatctgagttcagttcggtgtttgacccaccatctggccttccaccgtcgagggattgtgatcatgccattctgttggtggctggggcgtctccggtgcatgtgcgaccctatcgttatcctccacttattaaagatgaagttgagcgacagatagctgtcatgttaaaataaggtattatccaactgagcaccagtccattttcttcatcagtattattggttaaaaagaaagatcattcttggcgcttctgtgtggacttccgtcatttgaatgcaatcactgtcaaaactgtgtttccggttcctgtgatagaagaactattggatgagcttggtcaggcgtcctggttcactagcttggacctgacggccggttaccaccagattttgttacgtccagaggacacatacaagacggcgtttcaaactcattccggtcactatgaattttgtgtcatggcattcggtctcacaggtgcaccggccacgttccaaaaggcgacgaatgctactctatcttccttgctgcgccgttgtgccttggttttttttgacgacatcttaatttacagctctagttttgaagaccatttgcagcatgtgcgtgccgttctggaactcttggtccgggatcattggcaagtaaaattgtccaagtgttctttcatgcagcagcaattgtcttatcttgggcaagttatttcggcagcaggagtggccacggacccggctaaaatcaaggctgtggcaacgtggtcgatgccacgttcagta

SEQ ID NO: 91288 - DNA, 246 bp, Zea Mays
atgggcgaggacagatggggcgacgctgaacgcaacgcttggcgatggagggaggtcggggctacggtctgcgtctggccgatggatctcggcgttggcggtgacatggggatctccatcgcaggatccatgattggagatggctggggaacgggacaggagatcgagggaggcgtcacgggaggagatgctggggctagcgtcggggccgaacgaggaggcagggtagccgaaggctacccctag

SEQ ID NO: 91289 - DNA, 405 bp, Zea Mays
atgggtccttttggtggaataatgatagagtgcggcaccaatcaacctattgagaaagtgcttgcagctgaagatgcagagtgttgtatttgcctatcggcttacgatgacagtgcagagttgcgcgaactaccctgcgcgaggatgttgcagcattcgaacaacgccaacgagctgctcttgcgccggaagctggaggagcagcagcaggctgccgaacttcagcacgccattgagctccagagccgccgcctcatgggtctccagctgctcgacctcaaggctcgcgcagctgcgacagcagcggcggcatcggcactgccaacaccagttgccaatgccttcgcgtccagccatcctttgagcaccatggcagtcgagtcgccactagagtccggagagtag

SEQ ID NO: 91290 - DNA, 2044 bp, Zea Mays
atttctaaccaggtagatccttgctatacttgacaaactaaaggaggaaagggagcaacaagaaggaaaatatggggaggaagatgtggatggttcatgtatatcagaagaagaagatggtgactgggatgtagatgagccagatgaggaggacatcatttacgtaaaatagcccattgtcttctaggaacttggtcatcattcatccagaacacagcaggtgtgcttctactgatcgaaaatacatcttccaaataactatgaggacttaaccaagcaccattcaatcttcatttgcttctatagtttgggtacagtctctctctctttttctaagccattgtgtaatagagtagcattagtacgatttaatgatacaatgtcactttctcatatgttctaacagaaatgatcagtggaagatgttgtcttcgtagccaatgattggcacactgctattttgccatgttatctaaagagcatgtataagtcaaatggaatttataaaaatgctaaggttgcgttctgcatacataatattgcctatcaaggtagatttgccagagcagacttcgatcttcttaatctacctgacagtttcttaccatcatttgattttattgatggacatgttaagcctgttctagggagaaagattaactggatgaagacagggatcgttgagagtgatctggttctaacagttagtccacattatgttaaggaactcacttatggcccagataaaggtgttgagttggatggtgtccttcgcacaaagcctcttgaaattggaattgtaaatggcatggatgtttatgaatgggatccttcaacagataagtacaccagcgtgaaatatgatgcaacaacggtaactgaagcaaaggctctcaataaagagaggttgcaagctgaagttggattgcctgtggactcgagcatccctgttatagtttttgtcgggcgtcttgaagaacagaaagggtctgacatactcattgcagccattccagagttcgtgggcgagaatgttcagataatcgttcttggcacgggaaagaagaaaatggaggaggaattaatgcagctggaagtgaaatatccaaacattgctagaggcatagcgaaattcaatgttccattggcacatatgatgtttgctgggtctgacttcattattgtcccaagtaggtttgagccatgtggtctcattcagttgcaagggatgagagtttctagctcgctttgttacagttcagatttgagtgcgcattcccatctgttcatcacctggaggacttgttgacacggttgaggaggggtgtcaccggattccacatgggttctttcaatgtcgagtgtgaaactgtagacctagctgacgtgacggcagtagcgtcaaccatcacacgggcctagaacagtacggcaccccggcgttccaagaaatggttcagaactgcatggcgcaaaacctatcctggaaggggcctgcgaagaagtgggaggaggtgcttctgggccttggagtcgaggggagtcaagctggcatcgacgacgcagaggagatcgctccacttgccaaggaaaacgtagctactccatgacgcttggtgcctcggaaacacgcgttggtgataggaagcatcttctaggatcctcctggccttgtggctggagtgagttgttcagtcagacacagtttcgcctctacaacatcttcctcctcctggtggtggtccgaactccgaagcaaattccagtgataaaggatgaactaagaggtccatgtttctattgctagaccttttgcctcctaaatagacgatgtactgcgcttgtaacaagaacctcactttcgtgtcaagtaatatcaacaggtttcataatggtagtgaactgcactggaaaaacctgtaaacaatgcaaacaggattcaaaactaaaacaaatctgctattaaaagctgttattcaaaattgaaaaaaacaaaacctgttaattcagtattataactcagcaaacataaataaaaaaaaca

SEQ ID NO: 91291 - DNA, 2582 bp, Zea Mays
gtgtacaataatcctgatgaactactaaaacacttgccttaatctgaaatgagtacaataaaacatatataaggaaactcaaataagtaaagtcttgcttgtccctcacaccataacatgactgatgaactactaaaacacctgcgaggtctgtcagcgtagcctcctcgacaccttctgcttctgctaactccggtgcaaggtacgccgctgccatcccaatccctacccccaggcaagctttgttgattgctttctggttgttgatttctgagctagctatttagaagtcaaaaattgggtgaaatctgattaaccaaactacctggttagaaatcaaattggatgaaatctaattaattttgatatgtgtctcctgagttcaaggatgtcttctacaataattcagccaagaacaagaagcgctaattggaatccaaattgtttgatgtggtgatatgatctggaacttggaccatctttatgctttatggggctaagaagcataagacctgtccgaggcaattgtatctcaacataatcagtttgatgggctccaggagttatatcatcagaaatgtttttttagtatttctatgtaccagcaaaatattgactgaatatttctaaccaggtagatccttgctatacttgacaaactaaaggaggaaagggagcaacaagaaggaaaatatggggaggaagatgtggatggttcatgtatatcagaagaagaagatggtgactgggatgtagatgagccagatgaggaggacatcatttacgtaaaatagcccattgtcttctaggaacttggtcatcattcatccagaacacagcaggtgtgcttctactgatcgaaaatacatcttccaaataactatgaggacttaaccaagcaccattcaatcttcatttgcttctatagtttgggtacagtctctctctctttttctaagccattgtgtaatagagtagcattagtacgatttaatgatacaatgtcactttctcatatgttctaacagaaatgatcagtggaagatgttgtcttcgtagccaatgattggcacactgctattttgccatgttatctaaagagcatgtataagtcaaatggaatttataaaaatgctaaggttgcgttctgcatacataatattgcctatcaaggtagatttgccagagcagacttcgatcttcttaatctacctgacagtttcttaccatcatttgattttattgatggacatgttaagcctgttctagggagaaagattaactggatgaagacagggatcgttgagagtgatctggttctaacagttagtccacattatgttaaggaactcacttatggcccagataaaggtgttgagttggatggtgtccttcgcacaaagcctcttgaaattggaattgtaaatggcatggatgtttatgaatgggatccttcaacagataagtacaccagcgtgaaatatgatgcaacaacggtaactgaagcaaaggctctcaataaagagaggttgcaagctgaagttggattgcctgtggactcgagcatccctgttatagtttttgtcgggcgtcttgaagaacagaaagggtctgacatactcattgcagccattccagagttcgtgggcgagaatgttcagataatcgttcttggcacgggaaagaagaaaatggaggaggaattaatgcagctggaagtgaaatatccaaacattgctagaggcatagcgaaattcaatgttccattggcacatatgatgtttgctgggtctgacttcattattgtcccaaattcccatctgttcatcacctggaggacttgttgacacggttgaggaggggtgtcaccggattccacatgggttctttcaatgtcgagtgtgaaactgtagacctagctgacgtgacggcagtagcgtcaaccatcacacgggcctagaacagtacggcaccccggcgttccaagaaatggttcagaactgcatggcgcaaaacctatcctggaaggggcctgcgaagaagtgggaggaggtgcttctgggccttggagtcgaggggagtcaagctggcatcgacgacgcagaggagatcgctccacttgccaaggaaaacgtagctactccatgacgcttggtgcctcggaaacacgcgttggtgataggaagcatcttctaggatcctcctggccttgtggctggagtgagttgttcagtcagacacagtttcgcctctacaacatcttcctcctcctggtggtggtccgaactccgaagcaaattccagtgataaaggatgaactaagaggtccatgtttctattgctagaccttttgcctcctaaatagacgatgtactgcgcttgtaacaagaacctcactttcgtgtcaagtaatatcaacaggtttcataatggtagtgaactgcactggaaaaacctgtaaacaatgcaaacaggattcaaaactaaaacaaatctgctattaaaagctgttattcaaaattgaaaaaaacaaaacctgttaattcagtattataactcagcaaacataaataaaaaaaaca

SEQ ID NO: 91292 - DNA, 1736 bp, Zea Mays
gatctagctggctcttgtgcaattggtatgccacagctgctcttctcaccgtgtgaggacgagcacagtaaaagctaagcatttcttgattcatcctcccagcttcgttaattactatcaatgatgttgctgcatatttctttggcatcttctttgggaaaacaccgctgatcaagctctctccaaagaaaacgtgggaaggctttataggtgcatcaatgacaacattgctttctgcatttgtgctactcctgctgaaaatgtactaaccacaccttccatggtggagtgcagggcctccctgttggggcacgagatcgcccacccgtcgtctacaccagattatttctatcataccatcagatagtggatggacaaccaagcgtgcaccgtttcatcatttctgattctttcttagatgactaagataagtgtgaggtctgtactcatattctttccttttcttttcaatgcaggtatgatcttatacgagtggagattggcaacaaagatataaagcttgaatacttagtggaggcatttacaacttcaaatgacgtagcctcctcgacaccttctgcttctgctaactccggtgcaaggtagatccttgctatacttgacaaactaaaggaggaaagggagcaacaagaaggaaaatatggggaggaagatgtggatggttcatgtatatcagaagaagaagatggtgactgggatgtagatgagccagatgaggaggacatcatttacgtaaaatagcccattgtcttctaggaacttggtcatcattcatccagaacacagcaggttgcgttctgcatacataatattgcctatcaaggtagatttgccagagcagacttcgatcttcttaatctacctgacagtttcttaccatcatttgattttattgatggacatgttaagcctgttctagggagaaagattaactggatgaagacagggatcgttgagagtgatctggttctaacagttagtccacattatgttaaggaactcacttatggcccagataaaggtgttgagttggatggtgtccttcgcacaaagcctcttgaaattggaattgtaaatggcatggatgtttatgaatgggatccttcaacagataagtacaccagcgtgaaatatgatgcaacaacggtaactgaagcaaaggctctcaataaagagaggttgcaagctgaagttggattgcctgtggactcgagcatccctgttatagtttttgtcgggcgtcttgaagaacagaaagggtctgacatactcattgcagccattccagagttcgtgggcgagaatgttcagataatcgttcttgtatgtttcaatttagaagtgatttctattctttcgcatgacacagttcacaatctgatagttgctgagagaaaaaaaattgttcttcagggcacgggaaagaagaaaatggaggaggaattaatgcagctggaagtgaaatatccaaacattgctagaggcatagcgaaattcaatgttccattggcacatatgatgtttgctgggtctgacttcattattgtcccaagtaggtttgagccatgtggtctcattcagttgcaagggatgagagtttctagctcgctttgttacagttcagatttgagtgcgcgtaagataaacattagcagccatcttttcttatcatgttacatcttgattcctgtaaaacaaaaggtgttagaaaatac

SEQ ID NO: 91293 - DNA, 759 bp, Zea Mays
cgcgatgcgctcgcacgtgccaccgccccccggcccgcgataccgtgcctccgctcgacgcctgcccccgatccctgcgattccagcgccgtcgccgcgcgcgatgcccgtgcacgcacccccaccccaatccccgcctcagcgccgctcccccgcccccacccccgtcctcgccgccccgctccacgctcgcgtggcgtcgtcatcgctgcgctctgcgcccgctccgcccccacccccacacgcgcacacacacctcaccccgcgtcgtcatccacagcccctgcatcgccaccatggactcggggttgaactggtagcccgagggcgcgggaggtgccgccggcggcggaggatgaggcaggcagggcgagggcggcgacgccggaagctcctggaaatggctgcgcgcgcggtggtggtgagaccgctggtccgtgccgggaagcgagaggctgagcaaggtgagcgggtcctcctcctgcggacggctcatggcagtctgccggctcgaacccgccggagcgcgccacggggcggtaaatctggccggacccggagccggcgccgtggctgctgaggtcgctacggtgtatggttggaccccgaccacgaccccgataggctgtcgggcgagaggctcatcatcagcttgcccgggcgcgcctcggtctcggtggcgtcagtgggaaccggcgaaccggacacgacggcccaccgcctccctctgcttcctcccgtcgaagccctccacctctg

SEQ ID NO: 91294 - DNA, 537 bp, Zea Mays
atggaggagctgagcgcgcaatcgtcggcgcggatcctaggcgaccttctgctatcggagacggggacagtggggaggagggtggggcggatcggcatggggaggagggcacgcgcaggctacgatccaaccttctggtattggagatcaacgcgcttggaaggggatggaggagctgagcgcgcaatcgtcggcgcggatcgtaggcgaccttctgctattggagacgcgcaagcatggcggtgcgcagatcgtccccaaccttctgctattggagacgggcggagcagaggagggcgcgccgatcctccccaccgtcgatgtcgcgcgaagaaaaggaaccatgacgacagtgcgcggatcctggccaaccttccactattggagaacgggcggagtagaggagggcgttcatggaaggttccggtatggcggactgaagcggaatttccttcccaacagcagcgcgggcggcggactggagcgacagggattgcggaatcagcgaggctggggcgcagagagcgcgggcgttga

SEQ ID NO: 91295 - DNA, 94 bp, Zea Mays
ttttacaataacataataaacattagcaattttagtttacaaaaccgagtacttaatttttacatgcccagagtagtaccaaagtgcaacttta

SEQ ID NO: 91296 - DNA, 2878 bp, Zea Mays
gagccccactcatattcaaaaggcgcccagctttcaagacgatgataataagtagttaggctgccattattccaatatcatggaatagcatggcccggggctaaggtaactccagtgggagagccgtgttatgggtgaccttattgcacggttcagagagcacttgtgtatgtgatgcaagtgaacgtgtacgaaaaagctgtcgtaaagtttcgttgttcgttccgtcgttgaccctatctatgtttctacgatggcccaagaacacgctcattcttcagccgtagagagacttttgaattgtgaggtaccattacgagctcaatatatacgaatgttattctgtgaaataactcgaatttcaaatcattcacttgcttcaactactcatgctatggatgtgggagcatcaactccgttcctttgggcttttgaggagcgggagaaattgttggaattctatgaaagagtcccgggagccaggatgcatgccagtttcatacgacctggtggagtggcacaagatctgcctcttggcttatgtcgagatattgattcctccacacaacaatttgcttctcgtatcgacgaattagaagagatgtcaaccgacaaccgtatctggaaacaacgattagtggatattggtactgtcactgcacagcaagcaaaggattggggattcagtggtgtaatgttaagaggtcgtgcgacatgaagacattgatagcaatatgggggaagttcccatcaggcaacaacggttctgcccgaccctacaaaagcatgcatatgttgtcagtgaagattttgtgtgaagccttggagacgacgtacccggggctagggtgagctgaggggggacagcgtaagtgagcgaatgtgtgtaagcccagtcaaagattcctattctaggcgggccatcaaccttcgaatggtgttggtcctacggaccgtgaacggattcgcctctggcctctgggcacgtcggaaccgcatgagttcaccggggtggagcacggtccgccaaaatcggcataggttaggtgctattgatggaacatggtaagcccatctttctccatatgaaagtgatgcaggcacatagagatgtgggtagaggaagtctcaaaaagcgaaggccgagctataggtcacgtgacctgcaccgaaaaggtggctgactgggctttctcctggatcaaagcagatcagctcgccaaattcgttgaccgaatcgggcgccccggaacgtcgaatgaaaatacgtggtctttctacaaccctatttatatgataggcccggcccctttccccctatccctcccttatgtttaggagcgggatttgcccaagaacgacctgtggtggtacggactccgcaagcgtcccgcaccctctgagaaagaaactcctcaaccatcacaagataaagaagtatgacgctctgtgtctgactctattggtcatagttccttgctgttgcggccggtgctcgtttgcgcgtgtgtgaaccaccagatcataaggaaagatgcctctcggggcatctgagaatgattcgagccgtatgaagggaaactcccacgtacagtttgttttgggggggaaggagcccgacagggtccccccactgacttggcccgggcctaagtgaaagtgaaaaagtgaagtggtgggcctacccatcccaacctggggtatgctgggattcgcgaagagcagcaccttacgatgttcatgaccaatcggatcttgacgtaccagtaggtaccagaggagatcgctatgatcgttactgtattcgtatcgaagagatgcgacaaagtgttcggatcattgtgcaatgtcctaatcaaatgcctagtggcatgatcaaagccgatgatcgtaagctatgtcctccatcacgatctcgaatgaaactatccatggaatcgtgcgccgtgtgaaacgtagatcatcgccgttcttaaccgagactcaggttaagctccgtctcggaaccgtcgtggggttaggagtaaagcatcccgaggttggcgcatctccttgggcgtggagaagcattgggaaccccaatatctttcttcggagcagtttcttttcccgtcccctcgccccggcatagcgcttcgcttccggttcttcggaagaatcaactgacttctcccttcttcattgatctgggggaaagggaaccgtctaccagttgggaagctagacatcaaggttgtggcttgatgaggataactaagctgacacgccggagttggctgctggcacaacagggtggtgccttaccgcaccgcaggcgcacgcgcggtagcgttcgtggtggtgcttcaggattccaatgtactgcgtccaagatcagaacgagcttgccggcggaccactgccgtcccattctttagtgagctggagcgctgccatcttatccacggaaaacgcgtcaagctatcgcttcgggtcgaagcactaaaaaaagaaaaggaccgggaaacgcggcggcataggaaccacgggaacccaggagggagaaagacgatgtacgggatatgggatcctcgtagtaggctggaccaaaatccagccgagagagggcagcctttagaagcaacaggttgggaaaccaagagaaggtcttatcttcttgccggcacaaaaagagggattagcattattgaccccatgagaaagcactaacaccttcggctccgcgcactgggaaaaggcttccgcgacaggaaaccggctactagttaggaagtgaacataaggtatcaagaggtccctcacagtcaggtgcgatgcaattgccccctattagtcaagtacccctcttcctattttgtttaggggttaaaatgatgaa

SEQ ID NO: 91297 - DNA, 462 bp, Zea Mays
aattccggccgacgtgctcgcaggccacgcgaccacgtcgctcgccccctctcagcactccccgctcggcctccacctcctccttccccctcgctcttcctatcctgctggtcctcctctttgccgcccagccccgcgtccctagagatgctcctccgtgccctgatcttcccggacgacctcctcccgctcctgccctggtccgtggcgcagtcgctgctctgccgcctcgcgctgcggagccccgccgacctgctcccggcctttgtcggggctgcgcacgcaccgaggtctgacgacgcccaccctgtcactaagtggaagggcgcctgcttcttcgagaacagggcatggctggagttccgcaacgggaccggcagggggctcggaggcggcgtagtccatgtagaggtaagagggtgatggagctattgtggggccacgcgaggtgaccagttgaaa

SEQ ID NO: 91298 - DNA, 639 bp, Zea Mays
gcgatacgattagctcctcccgtcccctcgcctcccccgccctcctccctctgcctctcgctccgcgaggccatcgcccgggccacgttggacctgccgtcctccgcgcacgcgctagactggctcgccgacatcgtcgcgcagggcaaggaggcgctctctcagggcggcgactccaaccccagcaccgcctctggggccgacctcctgtaccccgctgacggtgtcgctgtaggaggccctgtgggggtggcggatgtcttcagaggatgccaaaatatttgcaagttgtgggttgtggtgttgtcactaatgtcacctctacttgattctgttcattagtgtgctatgttgcacggataccgatcatattttggatttcaaatctcactattttctacttgcctactggcagggtagtacttgtgcagaacatgagaaatcaaacatttaaattaacctaggcagtcaggcttccaagttgcttatcatatcaatatttgtaggtgctatagcaagggtgaagacatgaaagtcagcacttaatattaatagtttcatcatgagatgaacttctgttatactgtatttttagcctttttcatataatgcagcatatattatgcaaaaaaagaaaca

SEQ ID NO: 91299 - DNA, 116 bp, Zea Mays
gaatctaaaagtgaatcaaaatgcttaatgtggttggggaggaaagctgcttataagtcctcctcttctctcgccaatagagttacagtccagtgttcttgaaacaacatactagg

SEQ ID NO: 91300 - DNA, 135 bp, Zea Mays
ctatccgtacgctattgatattcctagcgctatcccttttctttgcaaagaagccccttcccttaataaattgaaaacatcataaggctttactcaaaaaagtaagatttggctcgggtgcatcaaaacttgcaa

SEQ ID NO: 91301 - DNA, 863 bp, Zea Mays
cagggaagttggcgcgcagcgaacgaccggtccaacggttgccatggcgcagtgcagggagggtcccagagcgtgcggcgaacagtgagcgagctgtgccagggaaaatcgcgacgcacaggggaggagcttggggacgccggtcatggaaacaggggcaggacgagctccatggcatgtggccgagcagaaagtgtcagttgatggagatgaagacatggctgggggcaacaacttgatccatgcgctagggagaaggactcgacgaccagcgagctgggagaggcaccgagttgcaggaaggagtagggagggcgcggcatggctggataggagctcggctgggaactgctcggcgcagtggagcaggggcggacgagcgcgccagggagagagcgccgcggccagccgaagaagcagggactccacggcgatgctctggtcgaggtggagacgacgaccaccaaagctgggcgagctgggagccgagcgcgaggacaaccggcgctgcacaaggaaacagcgacagcgtagaggagagaggaaaacaaaggcgccggtggccggacagagagagccgccatgggagatgggcacagggaggagcagagccgaaccaggggctggggcgcgacacaggaggagcgagctgagggagctcctctgcgcggcgaccagggagctaaaggctggagcagcgcgcgttggtggaagatgagccggagctgggaatttgaggagcacgcggcatgaagaacaagcacagggaagggctgccgagcagggagataacgccggctgaaaaaaatcagacaagggaagggcggcaggatttttccagggagaggagtacgtggaagttg

SEQ ID NO: 91302 - DNA, 761 bp, Zea Mays
aggcacacggcttgtttataggcagctcagtgatgatggaacccaagtttgcagcactgctttggatactgtggatcatttacaagaggcggacattatctaatagagctgagcaaatatacgagcaggtatgtgaaatccttgaagataatgctgtaaacgccgagattgacaactccaattctgaggtttgggtggttacctcctggctcagggatcacctgttggttcctcaagagagaaagaatgctttcctgtggaagaaggtcgaagaactcatacgagaagattctcgaatagatcaatatccaaaggtgattaaaggggagtcgaaagttgtttacgagtggcaagcaagtggctcgcttagtgcaaagattaaaaaggtgcaaggtgcaagggccaagtcaaggactggtgtaggtgtcataaaatttggggaagaaatgagtgcttcctccttgggtgaggtgagggagcagggctcgtgtgatttaacacgcgaagaaagaagtaaggacaaggtcacgtgcagtgattaggttatcaatcaatctatctacatgtatgcctctggtctttagaggaaccagcacgtgagcttggcaagagttactgatcttttgtaaattttgatgataggagccgagccgtcacagtgtgttgttgctgttacagttgagtttgttggcatgtcatgagattgtctggtacagtttcaacaactgatgaatgaacatggtcactggaagatgctgctg

SEQ ID NO: 91303 - DNA, 1432 bp, Zea Mays
aaaggaagttcgtcctctctctcacggtctcacctctcacgtccagagagagagagagaggatgccgtcgcgttcgccgcggcagtcggcccgaccccccctcccgaccgccgccgagccccctcccggcctcttcccggccagggaggacctcgtccgcttgctcgccgtcatattcatcgcagcggccgccgccgcggcctgtagcgtcctcaaccgccgccctgagcccttctgcgactctccccagtggcccgatgactacgccgacgattcgtgtcaaccttgccctccgaacgggcgatgtgtggacggcgagttggagtgcgtccaggggttcaagaggcacggcaaagcatgcatagaggatggactgctcattcaaagagctaacaagattctaaggatctgcgatcagcatgctcgtgctttatgtggccattctgccgaaatcctgtttcaggagcatgaggtctcaaatgcaattgatgaactcttgtcaaagattcccgctggtctaactgaggatgggcttcaacttgtgaaaactagggtgctggagagtgccgggggcttcttcgatacaacatttacttccagcaaagtcaaagtatataaatgccctgagctggttgcggagcttcatatgccaatgggttgtcgagttcgccaatggatctttagaaataccacatctgtggcaatcttttgtatcctgtttgcagcactgctttggatactgtggatcatttacaagaggcggacattatctaatagagctgagcaaatatacgagcaggtatgtgaaatccttgaagataatgctgtaaacgccgagattgacaactccaattctgaggtttgggtggttacctcctggctcagggatcacctgttggttcctcaagagagaaagaatgctttcctgtggaagaaggtcgaagaactcatacgagaagattctcgaatagatcaatatccaaaggtgattaaaggggagtcgaaagttgtttacgagtggcaagcaagtggctcgcttagtgcaaagattaaaaaggtgcaaggtgcaagggccaagtcaaggactggtgtaggtgtcataaaatttggggaagaaatgagtgcttcctccttgggtgaggtgagggagcagggctcgtgtgatttaacacgcgaagaaagaagtaaggacaaggtcacgtgcagtgattaggttatcaatcaatctatctacatgtatgcctctggtctttagaggaaccagcacgtgagcttggcaagagttactgatcttttgtaaattttgatgataggagccgagccgtcacagtgtgttgttgctgttacagttgagtttgttggcatgtcatgagattgtctggtacagtttcaacaactgatgaatgaacatggtcactggaagatgctgctg

SEQ ID NO: 91304 - DNA, 3207 bp, Zea Mays
atgaccttgttcctccccggctccaccattgctcgaagacgacgatgcggcctcgtgaggacggaggagtttgagatgatgatgcaattagcaaagtcttcctggatcttgcaccttaactgcaacaaacgccgagtggctcccattgctgcactactatctgcagtattgcacccagcaatattttgtaatttggaaatgcaccagacaaatgaaaaagggccaggccctttaaaatggtttgttgagaatcttcttaatgaaggctcaaaaagtcctcgaactattcgcctagcagctttgcatttaagtggtctatggttgatgtacccaaaaactcttagattttatatggaggaactgaagctgctctcgttatacggatctgtggcattcgacgaagattttgaagctgaactctctgaaaaccatgaagcaagatttgaggtttccatgctagcacaaagtcctgatcgtgaattcacagaggtgttcattaatacagaattatatgctcgtgtttcggttgctgttctctttcatcagctttggaaacaaatcaaagaacatagtatattggaaactgaagaagctcttgaatgcggcaaactatttctactagaacttctggactcagcggtgaacagcaaagatctttcaaaagaactctacaagaaatatagcagtgtacataggcgtaaagttcgtgtgtggcaaatgatatgtgttctatcacactatgtagaagatgatattgttggagaagtgacatctagcattcacatctgtctttatagaaataatttgccagctgtccggcagtacttggagacgtttgctatactcttatacttaaaatttccaaccttggcagaggagcaacttattcctatttttcatgacaaagggatgcgacaacaggcactatcttcatatgtttttatagcagcaaacgtcatacttcactcaagacagtccgtccagatataccacctgaatcaattgcttcctccaatactgccgtttttaacatcccatcatcacagtttacgtggttttactcagcttcttgtccattcagtgctatcgaggttgtggcctactctgcatcccgaaacttcagaagatgcagtctttgagaggaggtgctttcaagaattgaaagattatttggcagaaaattctgactgtgttaggcttagagtttcaatcgaaggtttccttgatgtctttgatcccaatgcatctgggaccccccctggaatatttagcgcccgtcctgaggtgtctgacttcgaatgtgttccggtgtcagtgatggagcgtgtgattgagttcctgaacgatgtgagggaggacttgagacaagctatagcaaatgatacagtaacaatcaagaatgaggatctcgcggtgggagagcatcacaagagtgacgagagcgtgtctgagatggtaaaaactggtcaagaggtacttgatttccagaagaaaataacaccccataggggggactccgagcaagcattgaacttgaacaccagaggtcattcaggcgttggtgacgaatacatttcaagaataatttcagagatggaggaagatgaccaagttttcgacctagcgctagaagcaagattgcatgctgcggaaacgatcaagcagagccggcaagaactgatcgtggttgcgtcattggtggaacgcataccaaatcttgcggggctgacgagaacgtgcgaggtcttcagagcagccggtctggttgttgccgacaagagcgttcttcaggataagcagttccggctgatcagtgtgaccgctgagaaatggctgcctgtgacggaggtccccgtggacagcgtgaaggcttacttggagaggaagcggggcgatggttactcggtgattgggctggagcagacggccaacagcatgcctctggaccggttcgggttcccggaccggacggttctggtgctggggcgggagaaggaaggcatccccgtcgacatcatccacattctggacgcgtgcgtggagatcccgcagctggggcgtggtgaggtcgctcaatgtccatgtcagcggcgccatagccgtctgggagtacacgcgtcaacaacgcaatcagcgttagcttgttgcttgtttttgctccattgaccattgacgacgaagactactactactacctgggagggagagtagaaatcaacatgcagcactcacaggaaggagagaaagacctgggctgggctgggccgacagtaatgaacgctagcccaccttcctttcccaccaccaagacgtacaagtcagactatattacttcatttatttgtgctaatatcgtaacgttttattgtgtaagcaatttggtacttgaagcctgcctgcatttggatttggagcggcatcagaagttttttaaagtatttattcgtagaggggtcgatcgagctcgcccttttattgctgcaaatatataatacacattattactgctgcaaacataagattacgttacattacattaaatgaaaagctatattacctcccgttctcgttatcccgctagttcatttttaacgaaacagtgacaaatatgaactaaacagcaacaaataaaaagaaacggaggggtactacgcttttttttatttcagtgcgcgcgtgtctgctccagacggtgctgctgcgcccagtccttgacgatgtgcggctgctgacccgacgacgaggtcgtggtctgaaggtagcggtacacccacgccagcacagccaccgcagccacgccgaaccctcccgacgaaacgatgcctaccgtgagcagcgccaccgtgatggccgccggcaccagcacggggctgaagatcaccatcaatggcgtcgccacgatgagcgccagcaccgtgcccgtcaccgccagccccgacaacaacaacatggagaaggctgccgtggctgtggctaacgccttggccaccgccatgggcgcgggcggcggccgctgctgctgctggtgaccgtagtgggtggcgttgtagtcatcgtcgccgtagaggcccctcatgtagttctctccgacggcctcgcttcttctccctgcacgatggtcatccgcatgatgagcagtggccatacaagctctggctagctagctagctagtatacaatgattcaaaagaaatagatgagtggagc

SEQ ID NO: 91305 - DNA, 1835 bp, Zea Mays
atgaagaaatccatcaccacgcttgatctcaatctgctgctttgtctgcaactgctgatgcaggagcgcagcgtaaccaaagcggcgaagcggataaacgtgacaccttcggcggtgagtaagtcgctggcaaagttaagagcgtggtttgacgacccgctctttgtgaactcaccgctgggtctgtcgcccacaccgctgatggtcagcatggagcaaaatctggcggagtggatgcaaatgagcaacctgctgctggataaaccgcaccaccagacaccgcgcggcctgaagtttgagctggcggcggaatcaccgctgatgatgatcatgcttaatgcgctgtcggaaacagatctaccaacgttacccgcaggcgaccatcaaattacgtaactgggattacgattcctttagatgccattactcgtggtgaagtggatatcgggtttttcccggtcgcgaaagccatccctcgctcgcggggagctgttaagctcgctaccgtttagccatttgataatgaagtgctgttttagtgatgtgcccctgcgtctggttacgcaaagatcatccggcactgcatcaaacgtggaatctggacaccttcttacgttatccgcatatcagcatttgctgggaacagagcgataacctgggcgctggacaatgtgttacaggagctgggacgcgaacgcacgattgctatgagcctgccggaattcgagcagtcactgtttatggcagcgcaacccgacaatctgctactggcgaccgcgccgcgctactgtcagtactacaatcaactccatcaactgccgttggttgctcttcctctcccgtttgacgaaagccagcaaaaaaagctggaagttccttttaccctgctgtggcataaacggaacagccataatccgaagatcgtctggttacgggaaaccattaaaaacctttacgcgtcgatggcataaccgaatcgtatgaaacgcgacccaatttcacaataaaatgtaaaaaagttgtaataagcttgtctgaatcgaacttttagccgctttagtctgtccatcattccagtaaatgattactcttgtattcataatggaccattaagcatggagcgaaaaatggcgactcactttgcccgagggattttaacggaaggacatctgatttctgttcgtctcccctcccagtgtcatcaagaagcccgaaacattccccctcatcgtcaaagccgttttctggcgtccagaggtttactcgcagaactgatgttcatgctgtatggcattggcgaattgccggaaatcgtcaccctgccgaaaggtaaaccggttttcagtgataaaaatttgccttcgttttccatttcctatgccgggaatatggttggcgtggcgttaacaaccgaaggtgaatgtggcctcgatatggaactacagcgtgcgacgcgcgggtttcatagcccacacgcgcccgataaccacaccttttccagcaatgaatcgctatggatcagtaaacaaaacgatcctaacgaagcgcgggcgcagctcatcacgctgcgccgaagcgtgctaaaactaaccggtgatgttttgaatgacgatccgcgcgatctgcagctgctgcccattgccggacgcctgaaatgtgctcatgtaaatcatgtagaagcgttatgcgacgcggaagacgtgctggtgtggtccgtggcggtcacgcccacgattgaaaagctcagtgtctgggagttagatggcaaacacggctggaaaagcctgccggatattcacagccgcgccaacaatcctaccagccggatgatgcga

SEQ ID NO: 91306 - DNA, 2863 bp, Zea Mays
atggcgtctcctcccgagcgtgaggtcgccgcactcgagagctgcttccgtgccctctccgcggctgacgccgtcccagcggttgtcgactgcgtcctcgcttcctccgcctcgtcctccccttcccaactcttccacgcgctcctccgttcctttcctccctcccagtctgaccgtcatgccgccatctgccacgccgcggcgctccgccatttgctcgcgcaactcgacagcccccctaaggttagggaggctctgcgcttgctgctgtggagggtcttcctgcccttgctccaggatatcattgaacccactcatcctgcccactttgacctggtaatcgagatgatgtgcaatgcagtctctgacactggatgctgggacctgcttggagctacaatagtatcattctgcattcggtcatctgttgttgccatgggtttgtccgccgcagacgccaactctatactttaccaaagtataatggaagcggattttcctgcggagactctctcatgcctactaccgctctccaattcaagcagtgtgttagcatcattgctggtggacatgctggagaggcgaaggactatacctacctcccaggaaggtgctgctgatctagctgcattggttcagaatttgacatgggaccttgccaagttggtactcaagatgtttacacatgctcaagagtatcggtcttgtgccactcgggtccttcttcagcctgtactcatatcgcttacagatgtttcttctgtcactgtatcgtttggtgcagtccagcataagctatcgaggtttggtttcctagaatgtatatggaattcctgtatttctctatttcctttggggcctggtgagcggcttgatgcatacagaatactctctgtatacttctcaacactgaaatcaggacatcaagccgctgtcttgggagttggcattgtccaggaatttgaccttaagaatgtcagtgaattctgggatgaactgcgcaggggactggttgacaaggattctttagtaaggaaacaggccttctatgtcttgacaatatcacttagcatctttacctcttcatctggaaatgatagctgccagcatttttccagtaggagcccagctgctttgcctgctcaaatcaaagcaaatgctggggaaacaaaaagggaaaggtgggctaacaaagaagccaagtcccttggtgttggagagatggaccaatcaggtgaaaattgctcaaatggtcaagatcggtggaaggtctttttgttactctatgagatgctccaggagtatggcacacatttagttgaagcagcttggacacaccatgtagtgcggctgtttgagtgtacgctacaaaatgactatctaaatcacacctcctgtggagcctttcatgctcagatggaatcttgggaaagaattttgtactggatggcagttttgtgggagcgtgggttcagtcatgagaatcctcaagtgagatgcctggttatgcaatcctttttggatattgcatgggaacgctacaaggtttgcactcatataattccaaggggttttgtgctcggccctctgatacgtggtttgaatgatgtggttcatcataaggattttggcattgggggtgcttatagttcgaaaaccataaaagatgctcagagatttttcagaacttatacccacaacttggcgagatgtgaccgcatacatctggtttggagtctggcttctgcggctaagcaagattcatttggccgagcaggattgatgactcttgcatcctgtgttgcttcatgcacacgtcagtcagagacaaatgatgtgccatgtgctatatctgggaaagcagtgaccaaatgtgatggatgtgtacctacagaagttaggccaacagatttgttagatgtcttatggattctcagtgagaggagtaaacaacactttaatccaaagtatcgtctgaaagtttgtgaacaggttatccaagttgcaacatcactgataaatgccactgaaattccacttaaccagcttctgcatttcattgccacaattcctcgagagttcactgattatattggaccattgagagtagtagttcaaaaatggttttttcagaaggaagaatgttctcctggtgacactttgttgagtaagctgatcgatttctctgccaccttcgtaagtcaaaaacggaatgaaggttcgaatgtttttgatgacgaggatgtggatgcatgggaagctgaagcaaggaggtgggctagaacccttcttcttgtaaccgaggaggaggaacatttgaaacgaatcttcaggtttttggaggcatatggctacaagctctctgagcaatgtcccagtggagatttcatacccataaaattttttatcattgttttaagcttcattgaggaacttgagctgagacagagaaagcttgtttgccggagtaatacaatcttaagaggttcagatacattaaatggattagtgctcgatgatctcaacaaaatgttcacagaatcacttttgctaattttggaaaatatggtggcattcagtaaactgtcttgctccattttctggttagatgtggacaacaaggatttacccccttctatcaaaggaaagcttggaggcccaagccagcgtcgtttggctacctccattacttcttcagtattacagggtgtatgttccgtcctgttttttttttctttggtttgctttgtgtaaaaggttccatttcacatgtttcacttaatctttcagatatactgcattactactatcttgatgtttttgtctgctgtgctagtccaacaaagttttcttttctactgtc

SEQ ID NO: 91307 - DNA, 3157 bp, Zea Mays
tgcgcaccagctggagtctgtgctcggttaactgatgagagtatgatcagagaaaggaagcgcctccctacctccagctccaataaataggggaagagagagagagagaactataagcctgctgctagacactgagcgagcgagcttgagatcgatctcaggaggcggccggcggcggcagcagcagcagagcttgttggcgccgccatggcgataggtggcttcgtggaagcccctgccggcgccgactacggtggccgcgtgacgtccttcgtggtgctctcctgcatcgtagccggtagcggcggcatcctcttcggctacgacctcggcatctcaggtggggttacctccatggagtcgttccttagaaagttcttcccggacgtgtaccaccagatgaaaggagacaaggacgtgagcaactactgccgcttcgacagcgagcttctcaccgtcttcacctcctccctctacatcgccggcctcgtcgccacgctcttcgcctcctccgtcaccaggaggttcggccgccgcacctccatacttatcggaggcaccgtcttcgtcatcggctccgtcttcggcggggcagccgtcaacgtatacatgctcctactcaacaggatactccttggagtaggcctcggattcacaaaccagtccatcccgctgtacctctcagagatggcgccaccgcagtaccgtggcgccatcaacaacggcttcgagctctgcatcagcatcggcatcctcatcgccaacctcatcaactacggcgtggagaagatagcaggtggatggggctggaggatctctctgtccctggccgccgtgccggccgcgttcctcaccgtcggcgccatctacctgcccgagacgcccagcttcatcatccaacgccgcggcggcagcaacaacgtcgacgaggcaaggctgctcctccagaggctgcgtggcaccaccagggtccagaaagagctcgacgatctcgtgtccgcgaccaggacgaccaccacagggcgtcccttccgcaccatactgaggcgcaagtacaggccgcagctggtcatagctctcctcgtacccttcttcaaccaggtcaccggcatcaacgtcatcaacttctacgcgccggtcatgttccggaccatcgggctcaaggagagcgcgtccctcatgtcggccgtggtcacgcgcgtctgcgccacggccgccaacgtggtggccatggtggtcgtggacaggttcggccgccggaagctcttcctggtgggcggcgtgcagatgatcctgtcgcaggccatggtgggagcggtgctggccgccaagttccaggagcacggagggatggagaaggagtacgcgtacctggtgctcgtcatcatgtgcgtcttcgtcgcgggcttcgcctggtcctggggccctctcacctacctggtgcccaccgagatctgcccgctggagatcaggtcggcggggcagagcgtcgtcatcgccgtcatcttcttcgtcaccttcctcatcggccagaccttcctggcgatgctgtgccacctcaagttcggcaccttcttcctcttcggcggctgggtgtgcgtcatgacgctcttcgtgtatttcttcctgccggagaccaagcagctgcccatggagcagatggaacaggtctggaggacccactggttttggaaaaggattgtagacgaagatgcagcaggggagcaaccgagagaggaagcagcaggaaccatagctctgtcgtccacgtccaccacaacatagtcatcatcaacaatactcatggcatgggcctgccctgtatagatagataattaactagctgcaccgcacagattgtctccgactataagctagctagctagttggatgcatgcatgcatgcattctgttatttctgtgaccatgaatcaaagggccttccaacagaacagaatatgagatgagatgaatcttatttgtgactgagtgccaagccaaccaagcagaggcagcgtaacaatccaagccactgtcggaagcccatgcatcaaatcaaaacagcgtcatcaccctctgccagtgccagcccaagcacagcgtgccaaatggcaactagcaaatcagaaaccgtcaccgatgcctttttgtttgtcaggtaaggcacaatgtacttcttcatgtcacctttggagataccaagatgacctcccggcacagacacaaacttcacccgccctgcttcatccagtgtcttcaaaccaatccagtcttcctcatacagtttcgtctgcacacacagagcttgccattgtaagcagagcacacatggaggaggacccaactcacgtgcatgaatcaattctaccttctgaggtggtagaactggatcaaaggctccatcagggtagtaaccaaaccatgccgtttctcgtggtatcaggactgcatcatcctgaaactgcaaataacatacatacatacatacatatattaagataggtcaaaagaattcaatcgattttggattcagaccatgtcaagcttaccataatcagaaccaaattctctaagctactgaatctttccttgtaggtggcatttcttttatctggaatttcattgttaagttttggaagaaacctacaactcttcagataatctgccatatcctgatacatacttttagttagacaaacttcgtgcaccagaaacattctcatatactatgaaactatattacatgacaaatttaattgtactaataatcaattaattattcaagaaaaatgaccaaactagttattcagcactatgaagctaagcatttgtaagcatcatccagtatgataagcaaactcaaaagtacatccataagaataatagagtagcatgtcatgtcaacgaaactacataaaaggtgcattcctcgttatactcacagttgggattttgaggtagccactaggtgcaagatgttcctgtaattcaccatgcctcaagttatcgcgtgatttttttttaaaaaaaaataataaagtgtttaccatgacaaaaaaatcaagttcgatttaagccaatgcattcaaacctgcacatagtctgagtagatctccaatttgatcagagcatcaacaataatgcaaaaaaatccaga

SEQ ID NO: 91308 - DNA, 2093 bp, Zea Mays
cttttgcgacattgcgcaccagctggagtctgtgctcggttaactgatgagagtatgatcagagaaaggaagcgcctccctacctccagctccaataaataggggaagagagagagagagaactataagcctgctgctgtatgtaacccagatccaccccattcgcatctctgcttctttctgcttgggtgccctctgccctgaccacagggcccaaccatatcttcttcctcacacagagacactgagcgagcgagcttgagatcgatctcaggaggcggccggcggcggcagcagcagcagagcttgttggcgccgccatggcgataggtggcttcgtggaagcccctgccggcgccgactacggtggccgcgtgacgtccttcgtggtgctctcctgcatcgtagccggtagcggcggcatcctcttcggctacgacctcggcatctcaggtggggttacctccatggagtcgttccttagaaagttcttcccggacgtgtaccaccagatgaaaggagacaaggacgtgagcaactactgccgcttcgacagcgagcttctcaccgtcttcacctcctccctctacatcgccggcctcgtcgccacgctcttcgcctcctccgtcaccaggaggttcggccgccgcacctccatacttatcggaggcaccgtcttcgtcatcggctccgtcttcggcggggcagccgtcaacgtatacatgctcctactcaacaggatactccttggagtaggcctcggattcacaaaccagtccatcccgctgtacctctcagagatggcgccaccgcagtaccgtggcgccatcaacaacggcttcgagctctgcatcagcatcggcatcctcatcgccaacctcatcaactacggcgtggagaagatagcaggtggatggggctggaggatctctctgtccctggccgccgtgccggccgcgttcctcaccgtcggcgccatctacctgcccgagacgcccagcttcatcatccaacgccgcggcggcagcaacaacgtcgacgaggcaaggctgctcctccagaggctgcgtggcaccaccagggtccagaaagagctcgacgatctcgtgtccgcgaccaggacgaccaccacagggcgtcccttccgcaccatactgaggcgcaagtacaggccgcagctggtcatagctctcctcgtacccttcttcaaccaggtcaccggcatcaacgtcatcaacttctacgcgccggtcatgttccggaccatcgggctcaaggagagcgcgtccctcatgtcggccgtggtcacgcgcgtctgcgccacggccgccaacgtggtggccatggtggtcgtggacaggttcggccgccggaagctcttcctggtgggcggcgtgcagatgatcctgtcgcaggccatggtgggagcggtgctggccgccaagttccaggagcacggagggatggagaaggagtacgcgtacctggtgctcgtcatcatgtgcgtcttcgtcgcgggcttcgcctggtcctggggccctctcacctacctggtgcccaccgagatctgcccgctggagatcaggtcggcggggcagagcgtcgtcatcgccgtcatcttcttcgtcaccttcctcatcggccagaccttcctggcgatgctgtgccacctcaagttcggcaccttcttcctcttcggcggctgggtgtgcgtcatgacgctcttcgtgtatttcttcctgccggagaccaagcagctgcccatggagcagatggaacaggtctggaggacccactggttttggaaaaggattgtagacgaagatgcagcaggggagcaaccgagagaggaagcagcaggaaccatagctctgtcgtccacgtccaccacaacatagtcatcatcaacaatactcatggcatgggcctgccctgtatagatagataattaactagctgcaccgcacagattgtctccgactataagctagctagctagttggatgcatgcatgcatgcattctgttatttctgtgaccatgaatcaaagggccttccaacagaacagaatatgagatgagatgaatcttatt

SEQ ID NO: 91309 - DNA, 83 bp, Zea Mays
atgggcgttattgttatcaagctgagctggctctcagcgtcagtcaacaagtggtttcttcgcttgccagacgacttcccggc

SEQ ID NO: 91310 - DNA, 1060 bp, Zea Mays
tatatgtacgagttgagttggataccatggtaaggttgctaaacatgaatatgctttcgaaaaaaggatgttaagtaacttagtgactctgcttaacactgtaggatttgaggctgccatagtatgctctctgaccgtgctaacgggaggaaggagatgatttaagttctccatgtttataaccagaaagaggaggatagtccaatcatggtaactaaatagtaggtagtaatgtttcacggtaaatcacagttctcgaatgcgatatgatctttgactcggagtattgaagactaatttagtttgagtttgagattagttgtttttgtcattaataaactcacattagcgtctggttacgagctcactactagattttagatctccatttttggtgtacttctgctgcatgtgcctcccatagttgcggatttgcaggtaaacatgaatacaaggctggcttgatctggcaagtgctcgccattctatgggcccatcacacttttcgagtacactgtttgatcatgaagagcagtctgctgccactaaacttgaggttgttgatcatgattgtctgaaaatttatcggggatatgccttgggatggagaaatgtcacagaacacaggatgaagacgattccaagaatccacccatgtcaggactagaagacgccttcacatcacggagtagagctctcagcaacaacagtgcaacgatgtttggacttttgttcacatatgggagtgtttaaactcctgcacctagatttagaaacaccaccatgtaaaatagacaaggcggtgcttttgcaaacatgatgctgccacgagacccgaacttatgtatggccaaacatgttaacatattttgtatgtcatgggctgttccagaaacattctgaaatacacggttccttctaaattctatattttgtcttgatagaacgcccgtaaaagtgcttcaatgttctagtttacatgaaaggtatatagcaatttactcaagaattctattgtctctataggacggctccacttattctagtaaaataaaaaaaa

SEQ ID NO: 91311 - DNA, 1542 bp, Zea Mays
ctgcctctctccctctccgcctacctctccttccctaccgtctcctgccactgcgcccctccaatagcgttgtcccttgccctcgcgcgccccgtgctcttcgtcgtcttcgccagcccaggtggcaggaagctacccatagccagcctcgtcttctcggccaaatccttcttcggtgcaccgctggccgccacctcggcctccgtcgctttgtcgctcctgtgccagtggctgcctccagctcgctcgaggtcgtcgctacggggaagaaggggcctttccgaccaaatccttctttggcgcgccactggccgccaccgcggcctccgtcgcgttgccactcccgcgacaaccggccgcctccaactcgcttgaggtcatcgcagcggggaagaaggggctttcccagccagatccttctttgacgtgccgctggccaccaccgcgccctccatcgcatcgccactcccgctagctcgaggtcgtcacaatggggaagaagggctgcaagatgaagacacacaaggttctttcctgctagctcgtccttagttcctgtgagtcctttggttgttcgatgccttctactgattcatgtctcgttcggttatgtgtgtcatcactcgtcatggcgtcggtgaagcgatttcgggtgacaaggaaggacaagatcatgcggcggtgcgctgggaagcaacacttgctcgccaagaaaaacaccaagcgcaagaagagactctccaagatggagatgttcgccgatctgtgggccaaaggcttcagtttgctaggattcatctgctttagctcaattgggatggccagatatgcggataccaatcttatacaccttatcatggccagatagaatctatcgccctagctcaatttgttaaatctgtctagatatttgcaagcatgacatcttcacaactcctgggctacttttacaggacatctgatgcttttatttggaaatgacctccaagaattcaggatttgaggctgccatagtatgctctctgaccgtgctaacgggaggaaggagatgatttaagttctccatgtttataaccagaaagaggaggatagtccaatcatggtaaacatgaatacaaggctggcttgatctggcaagtgctcgccattctatgggcccatcacacttttcgagtacactgtttgatcatgaagagcagtctgctgccactaaacttgaggttgttgatcatgattgtctgaaaatttatcggggatatgccttgggatggagaaatgtcacagaacacaggatgaagacgattccaagaatccacccatgtcaggactagaagacgccttcacatcacggagtagagctctcagcaacaacagtgcaacgatgtttggacttttgttcacatatgggagtgtttaaactcctgcacctagatttagaaacaccaccatgtaaaatagacaaggcggtgcttttgcaaacatgatgctgccacgagacccgaacttatgtatggccaaacatgttaacatattttgtatgtc

SEQ ID NO: 91312 - DNA, 583 bp, Zea Mays
gtaaaagttatctttgcctgtttccaccacactgtatcatacaggtaaacatgaatacaaggctggcttgatctggcaagtgctcgccattctatgggcccatcacacttttcgagtacactgtttgatcatgaagagcagtctgctgccactaaacttgaggttgttgatcatgattgtctgaaaatttatcggggatatgccttgggatggagaaatgtcacagaacacaggatgaagacgattccaagaatccacccatgtcaggtaacacaatagcatgtcagccatatgctatacatgcatatattatggtatggaaataactccggagagtatatcacattgtgttatgtatgcaaacactaatgcaagacagccatcctgcccatcatgttggtaggggtcaaaagcttcttgctgctgaaattgatggtacaccgtacaagcatttacctttgattttttctgacgttaatatgttgcttcactgaaggactagaagacgccttcacatcacggagtagagctctcagcaacaacagtgcaacgatgtttggacttttgttcacatatgggagtg

SEQ ID NO: 91313 - DNA, 518 bp, Zea Mays
caggttgagacacagtttcaaattcttgaaggtcgtgacggttgggctggagagcacgctggtaggggaggacctcaacgaccgtgcctttgtctatggcttccttagcttcctggacaagatctcttgcgtaatcgtcctatttgtcttggaattgtacgaagacacgaatgagatgtagcgagatgaggggacacggtgagcaggtacgagatgggcctgatctcctcatacttcaccgtcctctccctggtggtcacatccattctgaggctataggtcaccactccgaaagccattgcaatggaagccccactgcttgtctgacaaactgaagaaaccggtgagtgtagatgtcgatcgggttggaagaaagaagaaagaaatgtgcatcctcttcaattagtttcaattagatttgaaagcaggtcactttgtaatagtatgtgtcttgtcatcgtgttggcacaacacagatgtgtatgatgtagttacgtataactcaagattctcattgc

SEQ ID NO: 91314 - DNA, 532 bp, Zea Mays
acgagaccttgctggaggtggtttaggtgatgaccgacctgaagttgatcatcaagcgggcctacatttcctccgacgacgagtggttcatgaacggttgatatcgtgattattcacggcattgtcttattggatgttcttgacaaggagctcatcacttatgccattagagttcgctaatggtatggctggcactttccaaagctcatcaaaatagttttagataatatttagtatgccaaagctgtgaaggtgatgggcaacagagctaatgcaatcaaccttgacttctcagatatattgtctgatgaagagctagaaacatatctaaaggtgattgcagtaatatccatgggaacagaagttattgaacatgacttgttaaatatcagagagctatatgatcatgtgttggccctactatatgactatttaagaagcaagatgaacactatcaccgcaattctaacagcactggtgggtgaatcagttggtgccatattgtgcatggtggaagtttggtaaacttggc

SEQ ID NO: 91315 - DNA, 1881 bp, Zea Mays
atgccgtcagtggttgcccacataggggcatgctccaccatgcgcgcacctcgccctgcatgccggcagacataccctgcggctgcccacacaaggctgctaatggcggaggctgagcgccgccatggatctgacacggtgtggaatggggaggagccgaagcggagattggatcaaagtggactgggcaggagccaagcaaatcgtgtccaggacgactgggttcgctatgctaagatgactgaagaaattggagagcaactgcatattgtcggtgatgaccttgtcactaatcccactgcatttttggcacatatggtctatatgaaagaattgatgaatctcgaaggatgtggttaaacatgtctcctagcagccttgtaagattagcaataaaagaccatgagctctggatgctgcgatgcttatagcacaccgccaagttttagatcctcatgctttgaatctctgagtacttaaaacaatgtgtaagggagtccttggattggacctggactgatcgaattcaactgaatttgtaatagaactgactatatatccacccatatttctgacatgtagttggtccttcgaatccaaccacgcattggagacttgttcatatttctaatttccagcctgcacagtcttagcatatatctttgcttagggagttgaactgctccgttgtataatgttgaacattttttgtggttccgaggaattattgttgagcatgcctattatacttggcttccttgtccttaggaaagcatggctttttgacatcctgtcttgtgatgatatatgtccagtaactgttccgtgatcgagttcttgccaattctcatgcttatatctgtctggccgagtcctgttccagttctgcaaatcagcaattgaagtgttttgtgatcatgacaccatgctgtcctcatgttgtgtgtaccggtattttattcttcggtgctgtatcttgccgttgtgattggtcgtttaacaatttagcaggacttgtctgttctgatgtgttttcgacggcaacatattttttagtatctgagtaatatctggcagaagacaccctaacttttgtccaatatcaaacaaagatattatttgcgagtctgctagcctaatcaagagttgttgaatagagagatcctttgaaaagaacaactttttaaactagcaataaaattgacatgactggtccacttgtatgattgtatcttaccattatattcatatttcaaaactatactagggtaggtaaagtgccaacactagagcaaacatgaacctgcgtagtgtactcatgaaaaggataattttgtttgcctacattttcgaatcaataaaatatacgaggtttgtgattattcataaattttgattgttgccagttgcatctgattttttgttatagctgaatgaattgtttcatgtttgggctctatgtagggctctatgataggctttgaatttcagtgcttttgtttagactgaaatggttcagttcatgggtcatacccaagtttattactcctgggccttgctgccataatggctgaagaacctttcaagcttctggtaggactgaaagtgtaaagtgcattcatttctataaatctgagttgtgctcaactgctcaacatacaacttaacactactacaacaacaacaacaaagcctttttatcccaagcacgttggggtaggctagagatgaaaccccgtatgaaaacctcagagctcaaccccaaagaaaaaaaggggaaataaaggcaaaggagaaccgaaaaacgacgaaacagggaaacacataaaagagataaaacccacaagaaccagcaatatctaaatgggcacaagaaaaggt

SEQ ID NO: 91316 - DNA, 360 bp, Zea Mays
atgccgtcagtggttgcccacataggggcatgctccaccatgcgcgcacctcgccctgcatgccggcagacataccctgcggctgcccacacaaggctgctaatggcggaggctgagcgccgccatggatctgacacggtgtggaatggggaggagccgaagcggagattggatcaaagtggactgggcaggagccaagcaaatcgtgtccaggacgactgggttcgctatgctaagatgactgaagaaattggagagcaactgcatattgtcggtgatgaccttgtcactaatcccactgcatttttggcacatatggtctatatgaaagaattgatgaatctcgaaggatgtggttaa

SEQ ID NO: 91317 - DNA, 637 bp, Zea Mays
aaggatattacatcaggaaaaggtgtcaatgtcgtctatgattctgttggaaaggatacatacaaggcttccctggagtgcttggcgtcccgcggcttcctggtgtcgtttgggcagtcgtcaggcaaacctgacccaatcccaacgagcgacctggcttccaagtccttgttcctcactcgtcctagcctcatgcattacactgctacccgtgatgagctgctggagtcagccggcgaggtgtttgccaatgtcgctaacggggtgctgcacgtccgggtgaaccacacgtatccattgtcggaagctgcccaggcccatgcagatctggagggcaggaagacatcagggtccatagtgctcatcccgggatagactcaagggcatgtgaatgaataaatggggtgatctggttatgggaacggcgtaataataattatatctatgctgtttatgcggtatgttcgagtctgtttctgagttcctaaatctgaatgaataagtggcgcccttgtgttgttgggtcagggccgtgccggaattattgaacagaggcctttattcacaaaatcactaaaaaataacagtatagaaatgaaatttatgaaaagcatacctactaaactcttggttacat

SEQ ID NO: 91318 - DNA, 3653 bp, Zea Mays
gtggccttctcttctctctcctccccgctccgacgcgacgaattcgaagttggaataggcgagcggggcagcgccatttccgtccggatttctcttctgtcttctccttccttggctgtccagtctaggaggggagaaaggcaagttcaaaaaaaaaaaaaccccgcccgaatcccaacaaaaccctaggcctcacgtccccggccgccgccgccatgccgcccggggccgacgcgtcctccctcgccgccgccgtgctcgacgcaggcacgccaccggccgccgccgccgccacatccagagtgctcgactacctctcccgccacgccgacgaccaaccgcgggccttcttcgccgacgccttcccgtccctgctctaccgcctctttgtctccgcaccctcctccccatcattcatcgacctcgccgctgccgaccccgcgctcggcgacctcatcctctccctcatctaccccaccggcccgctcctcgccgccgccgccgccgcagaccgcctcaccctcatacgttacgtcttcccctccgagcgcctccccgactggctccgactcgccctcgcgtctcccccctccaccgacctcgcctcgccgctcctgtcgcgtcgcgtcgcctccgagctccacctctccgtcttcgagtactacctcttctggttcgcctactaccctgtctcgtccgcatcatctgccgccccggccgcatccgcctccaaccctcgactcacctcgcgcgcccgcctcgagacctgggtctctactctcgccaccacggccatccgcaaatccggtcagaagcccgaaaactcgctatacctcaggctgctctatgcctacctcagggagttcgtgccaacgcgcactccacccgttaatatgtccgggggcggcaccctgctccaccgtgcacccagccatggcgtcgatgcaatcgactcgtttgcacgggccgagttcttccttcacacccttgtccacttctggcttgtcggcgatgacttctcgccgctccccaagcagacttgccatgcactcggcttgcggttaccttctcgtgctcatgctgacttgagtgagcggccaccgtcgccaggcctgggtgatgcagtgaagctgcttgtcatgtacctcaactgctgcgatggccgcgcactagccgatgcgtgtgtgccatctcctcaagggttgtcagtgtccaatgggctctgtgatacccaggttgggttctggaatccattgatacagaggcctttgtaccggtttgtactcaggaccttcttattctgccccattggcactgcgataaaaaatgcgtcacaagtcttctctgtgtggttggcttatatggagccatggaaagttacccaacaggagctggataggtatggcaagcagcaaggcggggatgagaaggagccacaaacgactaagatggtgtacaattcatcgtggaggacgtatgtcctgtcgaattacctgttctacaactcaatggttgtgcatttcttgggatttgcgcacaagtttatccattctgatgttgcctcagtgctgctaatggtacacaaggtgttggaggtcttgagctcttccccggagctattaggtcttctccataaagtggacgctgcttgccactctaggctagtggcatcatccccagcatctgatcatgtgttgaagtatgtgccatcaatccgtgaacagctaaaggactgggaggatggtttgtcagaaagtgatgcagatgggtcattgttgcatgagcattggaactctgatcttaggcttttcagttacgatgagaatggggcttataatcttcttcagctacttttggtccgagcagagtcagagatactgcgccttccaggtgagacgcaacaagcactccagacgctggattctatcaagtcacagatgaaaacagccttccaagggcacattgaaagaattaacgggaatacgtcgttggaggaatcacataatcaacagcatcaggtgcgtggggaggtattcacacctaagcatcccagcttgaggaagggttcttgggctgatgttaaatacaaaggtgagtggatgaaaaggccaatctcagaggctgaagtagcctggcttgcaaggattctgatccggctctctgactggttgaatgacgccctggggcttgagtgtgctgatgctgaaggtagtcctgctggcgccacctacattcagtttgatgggaacacgacggtgggcgggccaagggatgctgcgagaatggctctcggtgctgtatgttcattcatggtgctagtggggcaagcggtactgaagttgatgaggtcgcacagggtgaagatcagtctgagagtgtttgcttcgaagaaactgctctcagccgctgttgtgctgtatgcagtggtggccgtgacacggaatgtatcgcgttgagagttttgatttgataatggggttatgctgtataagctaagcttgtagaggaagtcgatcgataggaggaaaagaaaagaaaagtgtgtcgttctgctgttgtccagtaagcttgatgtaaatgcctgcactggaatggttttggacttaaaaacgcaatggagtaattaggacagttctaacagtattaaaacagctgctagctcctcatggaagcgttaaatgtatcggtggccttcgaagttcacttaaaaggtcaatacatttttaggctcttatttctaagcttgtaaaaatggtgcattgttatggataacaaacttaaggacctagaaacaatgtaactcagaattcatgcatttaactcagaatgtttgattctgcgtggacaaaacagtccgattgcattcccaagctcttaaacgattagtactagtatatagtagttagaagaaagaggaatcactattgataacagatgtcggcattctcctcgctcctgctgccatcgtttttcctttttcctggacagccactgcaactcctcccaaatcctcccacccggtttagccggctccgctgccaccgccgcgactccacctctgtcgccaccatggtcaagtccaaggccatcagggtccacgagctgggcggccccgaggtgctgcggtgggaggaggtggaggtcggggagcccggtgaaggggagatccgcatcaggaccaccgccgtcggcgtcaacttcatcgacatctactttcggaagggggtctacgccgcgcccaccatgcccttcaccccaggaatggaagccgttggcgtcgtcaccgctgttgggcctggcctcactggcaggaaggtgggcgatgttgttgcatatgccggcaaccccatgggctcctatgctcaggagcagatccttccagcggctgtcgctgttcctgttccaccttccgttgatcataagcaagcagcttctgtgatgctcaagggcatgaccgcccatgttctgcttcgccgggtattcaaggttgagagtggccatactatcctggtccatgctgctgctggtggtgtcggctcactcctttgtcaatgggcaaacgcccttggtgccactgtcatcgggactgtttccaatcaagaaaaagccgctcaggcagctcaggatggatgccaccatgacgaatctactag

SEQ ID NO: 91319 - DNA, 739 bp, Zea Mays
accgcccgccctgctcgttctccctggctgcgatgtggagctcgccctggacgatcgtccctgcccctcctctctgatctgcgtgcaggggtttccctcccatggcgcctggtcttcttcccttgactccatgccgagagccccagccagctcgccctggctctagcttcttccttggacggcggagccctcccattcctgcagcaggccagcgtccctctctccatcatcttccctgcttggttcttggcgagctccccctgctcttctgctcgccctggccctgtgccatttttccattcatgcggcaagcaccagcccctccccacgccaacctcccttttctatggacgatgcccctctctggtggccgccacctctgttgctcccatggtgatctctaaatccctctgttgttttactagtcttgttaataccctgctgatgtgatgttttatgtgtgttgatgtgtgcgatatggagtaaaatccctggagaattaggtggaggagaaggttaagttcaacgctccttaggtgttctatgaagtgcttgaactgaagttcgttgtcgttctgttcaccgcgatatgagtaggggagcaagtcttagtgtggcgtccgtcaaatgttcgatgaagtgctcagactagaactcgttatcgatgcatgaaatatgattgtgaacatgcttgtaaagtaattgtgtcatgtgttgaagttcagattttagatataaa

SEQ ID NO: 91320 - DNA, 180 bp, Zea Mays
cctacatcacctcccattccgcctttggcccgcaaccggcgtccctctccgttgatggactcctactcctccccctcggcggtaccgccggcagctgctgaaacggcacggtactcataccgcccaaggctgcggtggccgccggatgtggaggagtacttcatcatggcgtacggccgc

SEQ ID NO: 91321 - DNA, 1167 bp, Zea Mays
cttgcgttccttccttcggtagaaagagccggccgggtagctagtacattgttggagcagagcagcggcggcggcggtggccatcatcaatggggatggggtccctcctctcgctctacctgcttcctcgggccgtcttcctcctgctggccgcctgttgctccttcgccagcggcggcgtgaacaactacaacaccagcgatgccgccgccaggcagctgcagtggggcaacgccagggccacatggtacggccagcccaacggtgccgggccctacgacaacggcggcgcttgcgggttcaagaacgtcaaccagtacccgttcatggccatgacctcctgcggcaaccagccgctctaccgcgacggcaagggatgcggctcctgctacaagatcaggtgctccaagcacgccgcctgctccggccgcaccgagaccgtcgtcatcaccgacatgaactacaccccgggcgtcgcgccctaccacttcgacctcagcggcaccgccttcggcaggctggccaagcccggccgcaacgacgacctgcgccgcgccggcatcatcgacatccagttcgccagggtaccctgcgagttcccaggcctcaaggtcggcttccacgtcgaggaaggctccacccaggtctacttcgccgtgctggtcgagtacgagaacggcgacggcgacgtcgtccaggtcgacctcatggagaagcgcgcccgccgctggacgcccatgagccagtcatggggatccatctggcgcctcgactccaaccaccgcctgcagccacccttctccatccgcacccgcaccgactccggcaagacgctcgtcgcacgcgacgtcatcccactcaactggaggccaaacacattctacagatccatcgtccagtactcctcgtgaatcccacaattcatctcctgcagctacagctgcagcctttttgtcgtcgccctcgcagtctcaggctcagctcgatcgggtagatcgatatgcaggcagcggtgcgtgctgtaataattataataatatatatatatatatataatatatataatatatactctccccgacccttcttaattatccttggtattcaactttcatcaagaaaaacattaaatatttataaaatataattactactgtttataagaca

SEQ ID NO: 91322 - DNA, 258 bp, Zea Mays
atggcgacctccctaggaccgccgagcgacggtggctctctcccaggatcgagcgacggcggcgctcccctaggaccgagtgacgacggcgctcccgaggatcaaagatctaggaggcatgcatgggcggtggatctgggaggcgtgcccgcgacggcggatctaggaggcgctcgtgatgtcggctcctcggaggcgcgccccggagtggcgcccgctggcgtttcacggccggcgacgacgcgcgaccttccctag

SEQ ID NO: 91323 - DNA, 201 bp, Zea Mays
caacattatattgttcaatcaacggatcaaattatactgttgaatcaaattgtattcatgtttccatttttcatttttgtgtttacaaatgaatttggtttagaaaatgctgacatgcaaatgatattagcttccacatgcatctaaaaaatagaatgctccctttatgaattgaatcaaaattacgaattgaatcaaaat

SEQ ID NO: 91324 - DNA, 1230 bp, Zea Mays
atcgaagacctccacgaggacctctacaggtctatcttcgcgctctacctcgctggccgttgcagggcctcctggagttcattgcctcgacagattggtcacacgcgaggctcgacatcaagcgccactgcggcgagcacctcgacccacatttaatgaacccctttgttagtgtgtccttctgtggcgtcaagccagagttctgatatgggatctgatctcgtgtcgcacccgcaaaactcgatatcaagcgctgttgcggcaagcacctccatccgcagctatggaaccctttcgtcgacgtgaccaggtccttccctggggtcaagcgagagttctaagatacgatgtagtcccaccttgctacccttccccaatggccccattgcatgttggctcctggctgacctctgtaccatgcgactcccttgcgcggccgcgcgtgaacactgtcgcctcgctcccagatccttatctggggattgcagctgcttcagatacatgactaccaggtttaggatcgtggttttatggtcacttttttgtgagcccgaacataggtttctataaccaacttaatagtaaagaaaattttatggtgctaccggaagcagctggcggctactagggcatgtcatgaccagacgtggtcagctcaaaaattttgattgacatagagagtcccattttgacctttgtaccactgctttaatttgaatgtggtacaaggagaaacataccaaagttcgagaacttttggtagacatagcgggtcctagtttggcctttctaccagtgctttcatttcaatgcggtacaaggagaaacataccaaagtttgagatttatggcatacacacaatgataccagtatcagtgtgtgtctgttgccggagatagaaggactgaccttccttgagtggacacactttatcttcctgaaaaaagtaaagatggtggatttcatctccatcatgagcatgttctaggtcaggtcaaggctctacacttctttcatctggtactctaattagatctactacatatttaaaggtggaatagattgtaggctgataaacttggatatttttgagcatgtaaagctttcgaaagtctttttacagtctgtcaattacgccagttcgaaccaggaaatccaggcgcattgctgccagagtagtagtgctagacctttctgtagtagtcaatgtcacagttttgcttgatcaa

SEQ ID NO: 91325 - DNA, 1651 bp, Zea Mays
atccttaaacaatggcagattgagcagcagcaaggtgctagcatctccaggcggacacggagagcagctccccgcgttgccaatgcaggacgagcgagccggcgcgcttctcgacgcggaagccccgcacgggcaccttcttgagcaacgcctccgcctgcgcctccgccaagctgcttgcctgcaccggcacgaagccggccgacacgagcattgcccgccagggcggcgtcttgtcgcccgccgccgcggcgcggtacctctccgccaggcacctctcgatcctcggctggatcaagaagcgctcgatcttggcggtgatgtcggggcccgtgccgacggcgtccagggactcgagcaggaacacgcaggactggaagtgcgcggcgaagggcagctcgccgcggtcacagctgcggtccacggagacgacaagcttggcgccaagccgcctgacgaggtgaaggacggacggcaccgcgggggcgtgcacggagccggccgggaggtggacggcgacggcgtcgccggcggcggtagcgagcagctccgcggggtccatggcgtcgaggttgaagaaggccagctggaacgggacgcgcgtctcggccgcgaagttggacaggttctcgtggacgagctgcagctccagcgggtggtgcgacgccgcggacaccaatgcggtgaccttgagcgcggcgcccgggcggcggctggccagctcctgcatgagcgacgcccactgctcgccgacgccgatgtccaagtccagcacgtggatgcaggcagcgccacccagctcgtcgagcatggcctggacgcaggtgaagtgcgcgaactggagcacggggcagagctcggagaagtccttgtaggcaccgagctttaggagcacgtccaccggcgcggcggcggcggcggcggttgcggaggcggtggtggacagggcagcgcgcagagcctccttgaagtagaaggcggagcggagcagtggcgtcgccgtcgcggcgccgggcgggagcaggtagttgagccgcgccagtatctcgcgggcgccgaaaacgtctccggcttcggcaagcttggcggcctcggcgagctggtccaccgccgtggaagcgtcgtcggtccccggcgcctccggcttgggtttcaggagcgtgtgcttgggaggcgacgcgggcaccacggggttttggtggtggtgcagcttgggcgggtagtgcacgtggggcgcgagaggctggaactgcggcggcggcacggaggaagagggtatgtggtcgaggtcatgaagtaccgagtgggagttgtggtcgtccatgacgcccgacatggcgacgtcgtcggcaataaaccagccgaggaaggtgctgtcgtgggtctgctgggcgtgcgagagggtgaggccgcccggacccggaggttgcgcgtggggctcccaggcctctgcggcgccgaggccgagcggcggcatgtgcatgtcaaggggcgggagatggtggacccagtcgtccctcccggcgacgtcgtcgtcgtcgtcgtccggccatgcgggcggggagacgctcttggcgtcggcgtcggcgagggccgccacgtcggcgatgccgagtggcgaagacagcgtggtgggcgggctggtacttgg

SEQ ID NO: 91326 - DNA, 3831 bp, Zea Mays
ggttccagtccactccatcgccaagggcccaaggcttctctatctagggattcatcttcctctcgtcttccctcttcctctccgaggatacaaggcgccgtcccaggtagaggtagggtcgccaccatgctggaggagctgctcatcttcacccggggcggcctcatcctgtggtcgtcctgccgggcgctcggcgccgcagccctcaagggctcccccatcgacgccctcatccgctcctgtctcctcgaggagcgatccgccgacgccagcttctcccaggacaattacgccctcaagtggaccttccacaacgacctcggccttgtcttcgtcgccgtataccagaagatactccacctcctctacgtcgacgatctcctcgccgccgtccgcaaggagttctcccagatctacgaccccaagcgcacctcctacgatgactttggggacatcttccgccagctccaccgcgaggccgaggcgcgcaccgaggaaatgaagaagtccaagcaggccctctcgtcccgtccgcagcctgctctcacccagaagaagcctggtcccaagggccgcggcggtgattcccgcggcggcgctgctaacaagggcggctctggtgccaaggatgactctgatggcgacggctatggcaaccaggaccaccgtactctggcaaatggtgccttcaagggccaagagaatggcgtccgcaaggagaattcttctcatggccgcactgttgttgtcaagggaaaggagaatggggcccccaaggatgaaggggccttcgatgtaagtaaactacagaagctacgggccaacaagaagaatggtgccactgacaatggaaccaagaagctgaccaaacctgacataaagaagaaagggaagcaagatagggtgtgggacgacaaaccttccaacaagaagctggattttacagacccggcagacgagagaggggacgaggtggcagacaatgtggcggtcatcgagggagaaagcatgatggataaggatgaggatctgagcagcgacagcgaggacgaagaggtggaagatggacccaaaaagaaaggatggttctcatcaatgttccagagtatttctggtaacaatgtattggagaagtctgatctgcagcctgcgctcaaagctctcaaagataggctgatggcaaagaacgtggcagaggaaattgcagagaagctttgcgaatctgtcgcagctagccttgagggcaagaagctaggatctttcactagaatatcatcaacagtccagacagctatggaggatgcgcttcttcgtattttgaccccaaggcgctctattgacatactgagggacgtgcacgctgccaaggagcgtgggaggccatatgttattgtttttgttggggtgaatggagttggcaaatccaccaatcttgcaaaggttgcttattggcttcttcagcataacctcagtgttacacttgcagcatgtgacaccttcagatctggtgctgttgagcagctgagaactcatgcaaggaggcttcagatacctatatttgagaagggttatgagaaagatccggcagttgtagcgagggaggctattcaggaagcaacccggaacaaatcagatgttgttctggttgacactgctggacgtatgcaggacaacgagccactcatgagggcactctccaagctaatcaatctcaatagcccagacctggttttatttgttggagaagcattggttggaaatgatgctgtggatcagctcactaaatttaaccagaaactagcagacctatctgctgttcccactgctagattgatcgatggtatcctgctcaccaagtttgacaccatcgacgacaaggttggagcagcgctttccatggtctacatatctggagctccagtcatgttcgttggctgtggtcagtcctacacggacctgaagaagctgaacgtgaaatccattgtgaagaccctcctgaagtgattgcaccaccgtgttgaagtgcagtctgttatctattgtatccccagtgacctttgtcatcctcatgttggacgtcgtcgtggatttgtaactgtcggagttgcaacaaaacttgtgtgcttgcgtcaacgtgtgccgtcttgctctaataatgcactatctgcattttgaatgggtaaaaaatggatgagtatgcgagtttgctatcatctggatgttaccagattattgctcctgcctctgagcatgcaagcgaaaccagtcacgagctcacttcatgtctggatgtgttggcaagctggaagctgcatgaatgtctgacatgatttcattcagcgtacacggttgcttgcaacattagtaatgagtagcgtgttgtcttgtggtgttggcctctgttcatacgtaagggttctgatccccttgtgtgcaagtctcacacatacaaaaacctgatacatacgcgtcccgcaaacatgtgcccttccgtattcagcttctttattttttgtggccttccttgtcatgtggaatgcaattatgcaggcaatacgtattgcatgtcattctccggtgcacctgcccagttgtggtggactggacctagcaaccctatcaatcaaacaaacaatgtgcatgtcttatatattacctttagccccattatctacagctttttctttgcctgagattcccatccttcaatatatctgtatataaatatattatctatttattatatctctctctctctctctatatatatatatatcagtatctgtacatatttaatatagatgggcaagcgattgccgtgcttaaaataggagaaaccttcgtcgccaaggtaaaagagcatctccttttctctcgtttgtcagatgcctcacggaagacatgtggtttagtgtagatatacagctgctgttacatcttttgagggatcccctatatattccccactccccatcctgctttactgatgtatactgctaaaatatggtcgcaatgcactgccgatcatttccatgaatcaaatgaaaccagaatttggttgctcaatcaggatgcgacattaagatacctatataaaaaaaatcatgagcctttctcttcttgtataaaactagtgctatatatatatatattttttttttcaaaaacaaagcaatatcttagtcgattccatggtacagttactgtacaggagagaatttatcatgtcggttcctggttctctcatctaacttttaagcaattggtatccttgtttagggaaggttcttcatgtattggcttaccaaagttttctcttttctttttttttagctttcttattatatataggcatgttcgttcagaccagatacgatagatcacatcatcactgtttgttatttttctttttgtcagatacagaaggtgagagggagaacctctgaagcttaggtctgcgatgccacctattccagttctatatagattgtagtgtattagaatggatcgggatggattttgaattgctattggaatggaattggtggtattgagtcggtttaaatatatagcaattcaaaatctatccagacctatttcaatacactccaatccatggaattggaacgtctgggtttccttctcttacttccatcgacctggagcctaagggcctgtttgtttacccccatggattatataatctggattatttttggaggattatataatctggattatataatctggattatataatctgagtagtcctgtttgtttacccagattatttgagttgttaataggattcttttgtatgaggaagacaag

SEQ ID NO: 91327 - DNA, 2316 bp, Zea Mays
ggttccagtccactccatcgccaagggcccaaggcttctctatctagggattcatcttcctctcgtcttccctcttcctctccgaggatacaaggcgccgtcccaggtagaggtagggtcgccaccatgctggaggagctgctcatcttcacccggggcggcctcatcctgtggtcgtcctgccgggcgctcggcgccgcagccctcaagggctcccccatcgacgccctcatccgctcctgtctcctcgaggagcgatccgccgacgccagcttctcccaggacaattacgccctcaagtggaccttccacaacgacctcggccttgtcttcgtcgccgtataccagaagatactccacctcctctacgtcgacgatctcctcgccgccgtccgcaaggagttctcccagatctacgaccccaagcgcacctcctacgatgactttggggacatcttccgccagctccaccgcgaggccgaggcgcgcaccgaggaaatgaagaagtccaagcaggccctctcgtcccgtccgcagcctgctctcacccagaagaagcctggtcccaagggccgcggcggtgattcccgcggcggcgctgctaacaagggcggctctggtgccaaggatgactctgatggcgacggctatggcaaccaggaccaccgtactctggcaaatggtgccttcaagggccaagagaatggcgtccgcaaggagaattcttctcatggccgcactgttgttgtcaagggaaaggagaatggggcccccaaggatgaaggggccttcgatgtaagtaaactacagaagctacgggccaacaagaagaatggtgccactgacaatggaaccaagaagctgaccaaacctgacataaagaagaaagggaagcaagatagggtgtgggacgacaaaccttccaacaagaagctggattttacagacccggcagacgagagaggggacgaggtggcagacaatgtggcggtcatcgagggagaaagcatgatggataaggatgaggatctgagcagcgacagcgaggacgaagaggtggaagatggacccaaaaagaaaggatggttctcatcaatgttccagagtatttctggtaacaatgtattggagaagtctgatctgcagcctgcgctcaaagctctcaaagataggctgatggcaaagaacgtggcagaggaaattgcagagaagctttgcgaatctgtcgcagctagccttgagggcaagaagctaggatctttcactagaatatcatcaacagtccagacagctatggaggatgcgcttcttcgtattttgaccccaaggcgctctattgacatactgagggacgtgcacgctgccaaggagcgtgggaggccatatgttattgtttttgttggggtgaatggagttggcaaatccaccaatcttgcaaaggttgcttattggcttcttcagcataacctcagtgttacacttgcagcatgtgacaccttcagatctggtgctgttgagcagctgagaactcatgcaaggaggcttcagatacctatatttgagaagggttatgagaaagatccggcagttgtagcgagggaggctattcaggaagcaacccggaacaaatcagatgttgttctggttgacactgctggacgtatgcaggacaacgagccactcatgagggcactctccaagctaatcaatctcaatagcccagacctggttttatttgttggagaagcattggttggaaatgatgctgtggatcagctcactaaatttaaccagaaactagcagacctatctgctgttcccactgctagattgatcgatggtatcctgctcaccaagtttgacaccatcgacgacaaggttggagcagcgctttccatggtctacatatctggagctccagtcatgttcgttggctgtggtcagtcctacacggacctgaagaagctgaacgtgaaatccattgtgaagaccctcctgaagtgattgcaccaccgtgttgaagtgcagtctgttatctattgtatccccagtgacctttgtcatcctcatgttggacgtcgtcgtggatttgtaactgtcggagttgcaacaaaacttgtgtgcttgcgtcaacgtgtgccgtcttgctctaataatgcactatctgcattttgaatgggtaaaaaatggatgagtatgcgagtttgctatcatctggatgttaccagattattgctcctgcctctgagcatgcaagcgaaaccagtcacgagctcacttcatgtctggatgtgttggcaagctggaagctgcatg

SEQ ID NO: 91328 - DNA, 2310 bp, Zea Mays
ggttccagtccactccatcgccaagggcccaaggcttctctatctagggattcatcttcctctcgtcttccctcttcctctccgaggatacaaggcgccgtcccagctgtaggcttggcgttgctgctcgatcgcgctcctgtctagatccaggggcaatcccccttatcaattacaactgggactggtagaggtagggtcgccaccatgctggaggagctgctcatcttcacccggggcggcctcatcctgtggtcgtcctgccgggcgctcggcgccgcagccctcaagggctcccccatcgacgccctcatccgctcctgtctcctcgaggagcgatccgccgacgccagcttctcccaggacaattacgccctcaagtggaccttccacaacgacctcggccttgtcttcgtcgccgtataccagaagatactccacctcctctacgtcgacgatctcctcgccgccgtccgcaaggagttctcccagatctacgaccccaagcgcacctcctacgatgactttggggacatcttccgccagctccaccgcgaggccgaggcgcgcaccgaggaaatgaagaagtccaagcaggccctctcgtcccgtccgcagcctgctctcacccagaagaagcctggtcccaagggccgcggcggtgattcccgcggcggcgctgctaacaagggcggctctggtgccaaggatgactctgatggcgacggctatggcaaccaggaccaccgtactctggcaaatggtgccttcaagggccaagagaatggcgtccgcaaggagaattcttctcatggccgcactgttgttgtcaagggaaaggagaatggggcccccaaggatgaaggggccttcgatgtaagtaaactacagaagctacgggccaacaagaagaatggtgccactgacaatggaaccaagaagctgaccaaacctgacataaagaagaaagggaagcaagatagggtgtgggacgacaaaccttccaacaagaagctggattttacagacccggcagacgagagaggggacgaggtggcagacaatgtggcggtcatcgagggagaaagcatgatggataaggatgaggatctgagcagcgacagcgaggacgaagaggtggaagatggacccaaaaagaaaggatggttctcatcaatgttccagagtatttctggtaacaatgtattggagaagtctgatctgcagcctgcgctcaaagctctcaaagataggctgatggcaaagaacgtggcagaggaaattgcagagaagctttgcgaatctgtcgcagctagccttgagggcaagaagctaggatctttcactagaatatcatcaacagtccagacagctatggaggatgcgcttcttcgtattttgaccccaaggcgctctattgacatactgagggacgtgcacgctgccaaggagcgtgggaggccatatgttattgtttttgttggggtgaatggagttggcaaatccaccaatcttgcaaaggttgcttattggcttcttcagcataacctcagtgttacacttgcagcatgtgacaccttcagatctggtgctgttgagcagctgagaactcatgcaaggaggcttcagatacctatatttgagaagggttatgagaaagatccggcagttgtagcgagggaggctattcaggaagcaacccggaacaaatcagatgttgttctggttgacactgctggacgtatgcaggacaacgagccactcatgagggcactctccaagctaatcaatctcaatagcccagacctggttttatttgttggagaagcattggttggaaatgatgctgtggatcagctcactaaatttaaccagaaactagcagacctatctgctgttcccactgctagattgatcgatggtatcctgctcaccaagtttgacaccatcgacgacaaggttggagcagcgctttccatggtctacatatctggagctccagtcatgttcgttggctgtggtcagtcctacacggacctgaagaagctgaacgtgaaatccattgtgaagaccctcctgaagtgattgcaccaccgtgttgaagtgcagtctgttatctattgtatccccagtgacctttgtcatcctcatgttggacgtcgtcgtggatttgtaactgtcggagttgcaacaaaacttgtgtgcttgcgtcaacgtgtgccgtcttgctctaataatgcactatctgcattttgaatgggtaaaaaatggatgagtatgcgagtttgctatcatctggatgttaccaga

SEQ ID NO: 91329 - DNA, 2322 bp, Zea Mays
ggttccagtccactccatcgccaagggcccaaggcttctctatctagggattcatcttcctctcgtcttccctcttcctctccgaggatacaaggcgccgtcccaggtagaggtagggtcgccaccatgctggaggagctgctcatcttcacccggggcggcctcatcctgtggtcgtcctgccgggcgctcggcgccgcagccctcaagggctcccccatcgacgccctcatccgctcctgtctcctcgaggagcgatccgccgacgccagcttctcccaggacaattacgccctcaagtggaccttccacaacgacctcggccttgtcttcgtcgccgtataccagaagatactccacctcctctacgtcgacgatctcctcgccgccgtccgcaaggagttctcccagatctacgaccccaagcgcacctcctacgatgactttggggacatcttccgccagctccaccgcgaggccgaggcgcgcaccgaggaaatgaagaagtccaagcaggccctctcgtcccgtccgcagcctgctctcacccagaagaagcctggtcccaagggccgcggcggtgattcccgcggcggcgctgctaacaagggcggctctggtgccaaggatgactctgatggcgacggctatggcaaccaggaccaccgtactctggcaaatggtgccttcaagggccaagagaatggcgtccgcaaggagaattcttctcatggccgcactgttgttgtcaagggaaaggagaatggggcccccaaggatgaaggggccttcgatgtaagtaaactacagaagctacgggccaacaagaagaatggtgccactgacaatggaaccaagaagctgaccaaacctgacataaagaagaaagggaagcaagatagggtgtgggacgacaaaccttccaacaagaagctggattttacagacccggcagacgagagaggggacgaggtggcagacaatgtggcggtcatcgagggagaaagcatgatggataaggatgaggatctgagcagcgacagcgaggacgaagaggtggaagatggacccaaaaagaaaggatggttctcatcaatgttccagagtatttctggtaacaatgtattggagaagtctgatctgcagcctgcgctcaaagctctcaaagataggctgatggcaaagaacgtggcagaggaaattgcagagaagctttgcgaatctgtcgcagctagccttgagggcaagaagctaggatctttcactagaatatcatcaacagtccagacagctatggaggatgcgcttcttcgtattttgaccccaaggcgctctattgacatactgagggacgtgcacgctgccaaggagcgtgggaggccatatgttattgtttttgttggggtgaatggagttggcaaatccaccaatcttgcaaaggttgcttattggcttcttcagcataacctcagtgttacacttgcagcatgtgacaccttcagatctggtgctgttgagcagctgagaactcatgcaaggaggcttcagatacctatatttgagaagggttatgagaaagatccggcagttgtagcgagggaggctattcaggaagcaacccggaacaaatcagatgttgttctggttgacactgctggacgtatgcaggttgactaagtggtttattttgaagtatctagtatctttctgtccttgtactggaggatataatctttacttggaagtttacgtgaaagtctctgtctaactgaatctgtcaggacaacgagccactcatgagggcactctccaagctaatcaatctcaatagcccagacctggttttatttgttggagaagcattggttggaaatgatgctgtggatcagctcactaaatttaaccagaaactagcagacctatctgctgttcccactgctagattgatcgatggtatcctgctcaccaagtttgacaccatcgacgacaaggttggagcagcgctttccatggtctacatatctggagctccagtcatgttcgttggctgtggtcagtcctacacggacctgaagaagctgaacgtgaaatccattgtgaagaccctcctgaagtgattgcaccaccgtgttgaagtgcagtctgttatctattgtatccccagtgacctttgtcatcctcatgttggacgtcgtcgtggatttgtaactgtcggagttgcaacaaaacttgtgtgcttgcgtcaacgtgtgccgtcttgctctaataatgcactatctgcattttgaatgggtaaaaaatggatgagtatgcgagtttgct

SEQ ID NO: 91330 - DNA, 1240 bp, Zea Mays
ggttccagtccactccatcgccaagggcccaaggcttctctatctagggattcatcttcctctcgtcttccctcttcctctccgaggatacaaggcgccgtcccaggtagaggtagggtcgccaccatgctggaggagctgctcatcttcacccggggcggcctcatcctgtggtcgtcctgccgggcgctcggcgccgcagccctcaagggctcccccatcgacgccctcatccgctcctgtctcctcgaggagcgatccgccgacgccagcttctcccaggacaattacgccctcaagtggaccttccacaacgacctcggccttgtcttcgtcgccgtataccagaagatactccacctcctctacgtcgacgatctcctcgccgccgtccgcaaggagttctcccagatctacgaccccaagcgcacctcctacgatgactttggggacatcttccgccagctccaccgcgaggccgaggcgcgcaccgaggaaatgaagaagtccaagcaggccctctcgtcccgtccgcagcctgctctcacccagaagaagcctggtcccaagggccgcggcggtgattcccgcggcggcgctgctaacaagggcggctctggtgccaaggatgactctgatggcgacggctatggcaaccaggaccaccgtactctggcaaatggtgccttcaagggccaagagaatggcgtccgcaaggagaattcttctcatggccgcactgttgttgtcaagggaaaggagaatggggcccccaaggatgaaggggccttcgatgtaagtaaactacagaagctacgggccaacaagaagaatggtgccactgacaatggaaccaagaagctgaccaaacctgacataaagaagaaagggaagcaagatagggtgtgggacgacaaaccttccaacaagaagctggattttacagacccggcagacgagagaggggacgaggtggcagacaatgtggcggtcatcgagggagaaagcatgatggataaggatgaggatctgagcagcgacagcgaggacgaagaggtggaagatggacccaaaaagaaaggatggttctcatcaatgttccagaggtaatccacacacatgctcccatgtctagtgttctatcatatgtagtagcttgtaaatatggataaggatatatagcctagactcaatcatgatgatgacaatagattatgtgatggctgctgtgttttcccca

SEQ ID NO: 91331 - DNA, 2310 bp, Zea Mays
atggatctactaggagatcgtgaagatgctcttagccttgtttcatggtgcaggagcgaggagaaagaagatccctggagacccggtgagagggtagagcggctcgtcactcttcccaaactgtccctgcctccatttcttttccttttgtttgtcgcctctcccttcgctcgccctgtctgcgctttcgctttcctttcgcctcccaccaccaaaaagaggagcagaggagaggtctcctgctgcactagtgaagaaaacgagagtcgaaacagaagataccatcagttgaaatgctcagagagcaactcgaggcagttgcacctggactacgtcccaaatttccactgcaggagcttgccaacgagaagccgcaagacgaatgctgagcaaagcaccgtggggaagcgtggttctatgtaccagagctccagcgaaataagcaggatcagaaagatccaggagggcaggaggaaaatagattctgcattcgatggggacgcgttcctgtcctttgatattgtcgatgcatcctctcgccctagcacaagtggagcttatctgcattcccatcagaatcggaggtcgggcgctaagccttctgtggacaccgctaagcgagcgtcaaaggacttcctggaccttcagttccgtgaacatcctgatgagaattttaagctagatcgaccacgcttggatagtaccttgttgaaaaacgatgatggtttcttggagatttctctcgagaaagagatagcaaagggtggcccgtgcagaaatgcagctcctatcctgctaaacactgggtcaggcaaatgcactgacctgcaaaagatgaatggatgccccagtgagaacaactgtggtgacaaggggagagattcagcaagcagttccaaatcaacgcctgtgaaagtaagctcctttgacggatcctgccaatctgacggtgctcaacaccatatcacagagaacaacactaaagctcgatcaagccccttcaagaagatgctggaccctattatgaagtccaaatctcctaggagcccatctatcatggaaagaggaggctccaactccgcaactgggccaggaagcaggaaaaactccgtgtctcgaaaatcactgctgggtgatttttcaagaagtgaacaagcatctaattgccagcccaatgggcaaacacagaagcgtgtaaacaaatctgctttgtcacctgctcatctccaagcggttcttagattggattccaagaacggtgtccaggtttttgaattctgtgttgacggcccaggagaatccatttccgccaggaattggaaaaacggtgatgagttgagctctatatacaccttccatagtggcgggaaacggtccagtgctgctggaaggatctccaaagatggaggctgggatttacccccaatcgttgggcaggtgcaggtttcatcatacttatgctctgaagttggaaaagacggtacggtgaataactctgtcgtcaccgagtttgtttcgtacgacattggtcatgcgaggcggattgttgaggagaagacaggggcacttcaacagccacagaggactagtctgacggaagagaacaagactgggagaaataactcagatgtatcgacatcttgcccgtggtccgaagaagaccttcatccttatttggagattgcggcgactgtgatagaggttccgtttagcagatacaagtccgaagaggtgaagaatggttcatctccttgtactgtcaaagttgttgcacctagtggactgcatggttcgccgagtgacgatgaagccggcggcccatctcccttgctagatagatggaggtacggtgggggttgcgactgtggcggatgggacatggcttgccccatcgacgttattggcaacacatatgataatagctgggctgagtctatagctaccaatgtgaaacatcccatggagctctttgttcagggtagcaaagaagagctccccgtcctttctatgaaggagaacgggagagggcagtttgtggtggatttccatgggcgactatcagcgttacaggcgttttcagtatgcatctctctgctgcactgttctgaagcttcgatcgccatcagcctcaagaaggggaagcagaagctgtattccagctcgctcaagttgctcctcgaggaggacgtgaggcacctgatcgaggcagtcacagctgaagagaagaagaagaagaagcggagtagagaaaaggcgcctcctccgtctgttctgcttgacccgcctttttctcccatcggaagagtgtag

SEQ ID NO: 91332 - DNA, 1979 bp, Zea Mays
cacgacatggctctcgtcccagcaggggacagggctgctcgcttggacccacctgtcaagcttgggctggagggtgggggctgatccgctcctccgcggctccgccacacactgacccacccatccaaccacttccacgaatggccctcgctctgtgaactcgtcgggttccatggcggcgccgtcgcctaaacccccgacaccacgcgggcgctgccaccacccgcccaacgccacccgccgcctccacgtggccacccgctgcttccccgacccaccaccaccacctgcctccatgccgccgatcccgagtccgaaccctgtgctgtcccttctctccgcggtgcccgactgggccgacgccatccaggagcgccgcgtccgcgaccgccgcccgctctacgaccacgccacctggcggcaccaccgcagctcccgccgccacctgcgccacctcctcacctcgctgtcctcccgcgccatcctctccctggcgcccccggtgtccgccttcaccgccttcgccgccgccatcgccacctacaacacgctcctaccggcctacgcgctcaccgcatcctcgctcccctacgagctcactgcgcccgcgctcgcgctcctcctcgtcttccgcaccgaggcttcctacgcgcgcttcgacgagggacgcaaggcgtggatgcgcgtgctcgccagcgcagccgacctcgccgggatgctcatgcgtcatccttttcctaacaatctgcatacgggtggcgctcccaatccgggaccgggaggacgacaggctgacgacgagccgctcaggcgcgcgctcgtcaactacgtcctcgccttccccgtcgcgctcaagtgccacataatttgcgactctgacgtaaaaggggaccttgagggcttgcttggcgaagatgacctgagcgttgttctagcatcgaaacatcggccacgctgtattatcgagttcatcgcacagagtctccaaatgctagatctcgacgagcagaagaggagcatcatggaatcggcgtttgcgagcagctcatggggatccctatccctctcgcatacactagacttacttcaaggttccttgttctgtggcatcttacactcccaatcatactctgggaagaatgtaaatggattgttgttccagctacctttatcagtgctgcatcgctattctgcattgaggaagtgggtgttctaatcgaagagccgttccccatgctagctcttgatgccctgtgcaagcagctccacgacggtattaaggatgtgatggagatgcagaactcggttcactcgcgactagttgccaagactgctacggaccacaggggcagtaggcgcgagaacaatggttggcctagctccaaaagagaaggagccaagattgattgagcacgcaaggtcggtcgggtcgttgtgaatttatttgaagatagcattgcaagcaatctgtggcaaccagatatccatgaacgaactggagaacttgtggaccccatttcctcctgcaatggtatgtacctgtcctatgtaaaatgcactcgctactgcttggatagctactaaagccgggagcgagcctgggattgggattgggattggtgtagggaggagttgcatcagcacgttggtgtacatgtggcgatgagtagagcagatttattatgtgttgtaaataataaagaagaaagagacacaaagctagcttatgttgttgtacgtagctgtgtgtgtctatagatagagataaattagatagtagatcgtagtcgatggaaacatacgtaacggtgtgatattttgtcgcccctgcaactgcaagattgcttgcccacttgcccctgtccatggtgatggttgctgccggtcctgaggatgtgtggcggacctaatgatggaggatgatgcatgcaatgcaatgcagccagcacttgggtcgcccaggttgctttgccggaatc

SEQ ID NO: 91333 - DNA, 1892 bp, Zea Mays
cacgacatggctctcgtcccagcaggggacagggctgctcgcttggacccacctgtcaagcttgggctggagggtgggggctgatccgctcctccgcggctccgccacacactgacccacccatccaaccacttccacgaatggccctcgctctgtgaactcgtcgggttccatggcggcgccgtcgcctaaacccccgacaccacgcgggcgctgccaccacccgcccaacgccacccgccgcctccacgtggccacccgctgcttccccgacccaccaccaccacctgcctccatgccgccgatcccgagtccgaaccctgtgctgtcccttctctccgcggtgcccgactgggccgacgccatccaggagcgccgcgtccgcgaccgccgcccgctctacgaccacgccacctggcggcaccaccgcagctcccgccgccacctgcgccacctcctcacctcgctgtcctcccgcgccatcctctccctggcgcccccggtgtccgccttcaccgccttcgccgccgccatcgccacctacaacacgctcctaccggcctacgcgctcaccgcatcctcgctcccctacgagctcactgcgcccgcgctcgcgctcctcctcgtcttccgcaccgaggcttcctacgcgcgcttcgacgagggacgcaaggcgtggatgcgcgtgctcgccagcgcagccgacctcgccgggatgctcatgcgtcatccttttcctaacaatctgcatacgggtggcgctcccaatccgggaccgggaggacgacaggctgacgacgagccgctcaggcgcgcgctcgtcaactacgtcctcgccttccccgtcgcgctcaagtgccacataatttgcgactctgacgtaaaaggggaccttgagggcttgcttggcgaagatgacctgagcgttgttctagcatcgaaacatcggccacgctgtattatcgagttcatcgcacagagtctccaaatgctagatctcgacgagcagaagaggagcatcatggtgtctaaactgtcttgttttcttgaaggaatcggcgtttgcgagcagctcatggggatccctatccctctcgcatacactagacttacttcaaggttccttgttctgtggcatcttacactcccaatcatactctgggaagaatgtaaatggattgttgttccagctacctttatcagtgctgcatcgctattctgcattgaggaagtgggtgttctaatcgaagagccgttccccatgctagctcttgatgccctgtgcaagcagctccacgacggtattaaggatgtgatggagatgcagaactcggttcactcgcgactagttgccaagactgctacggaccacaggggcagtaggcgcgagaacaatggttggcctagctccaaaagagaaggagccaagattgattgagcacgcaaggtcggtcgggtcgttgtgaatttatttgaagatagcattgcaagcaatctgtggcaaccagatatccatgaacgaactggagaacttgtggaccccatttcctcctgcaatggtatgtacctgtcctatgtaaaatgcactcgctactgcttggatagctactaaagccgggagcgagcctgggattgggattgggattggtgtagggaggagttgcatcagcacgttggtgtacatgtggcgatgagtagagcagatttattatgtgttgtaaataataaagaagaaagagacacaaagctagcttatgttgttgtacgtagctgtgtgtgtctatagatagagataaattagatagtagatcgtagtcgatggaaacatacgtaacggtgtgatattttgtcgcccctgcaactgcaagattgcttgcccacttgcccctgtc

SEQ ID NO: 91334 - DNA, 903 bp, Zea Mays
ctccgcggctccgccacacactgacccacccatccaaccacttccacgaatggccctcgctctgtgaactcgtcgggttccatggcggcgccgtcgcctaaacccccgacaccacgcgggcgctgccaccacccgcccaacgccacccgccgcctccacgtggccacccgctgcttccccgacccaccaccaccacctgcctccatgccgccgatcccgagtccgaaccctgtgctgtcccttctctccgcggtgcccgactgggccgacgccatccaggagcgccgcgtccgcgaccgccgcccgctctacgaccacgccacctggcggcaccaccgcagctcccgccgccacctgcgccacctcctcacctcgctgtcctcccgcgccatcctctccctggcgcccccggtgtccgccttcaccgccttcgccgccgccatcgccacctacaacacgctcctaccggcctacgcgctcaccgcatcctcgctcccctacgagctcactgcgcccgcgctcgcgctcctcctcgtcttccgcaccgaggcttcctacgcgcgcttcgacgagggacgcaaggcgtggatgcgcgtgctcgccagcgcagccgacctcgccgggatgctcatgcgtcatccttttcctaacaatctgcatacgggtggcgctcccaatccgggaccgggaggacgacaggctgacgacgagccgctcaggcgcgcgctcgtcaactacgtcctcgccttccccgtcgcgctcaaggtgcttggattggattggattggactgctctgctctactctactctgtggtgggtggatgtgctttacgctttacagtgactgttgcattttcagtgccacataatttgcgactctgacgtaaaaggggaccttgagg

SEQ ID NO: 91335 - DNA, 1618 bp, Zea Mays
cttaacgggaagaatatagacctttacagcagttcatatatggtggaaaaattagcacatttttatattatatagaagggtttgtttgaatattacagcacctcaatcatgcttgtctatttgtccgtggccgtttgatggactgcggactgctagccaaagcttgtcccgtatgggattatggatccttgtgttaacttgctataaatgcttaatgtggttttgtaataaagtcgactgagtaaaactacaaatttctgatgaccgatatgtgaatgtgaccatgtttctttccatttgtctggcttaatactactttcactacattagctgtgtgcttaaatagtgtaaactttctctttagcccttttccgttttggataattgattcctttgacagcaaatagtcacttattcttacacatactgactctgaaaattcacaggagcatgagacatacgcttgcttctgcaattctaggcctgcttgcaacgcgcatgatttatgaagatgcagatttgccccttcctcctaccaacgcaactgctttaaggcgggatgtggattccttgctggaacctcccctggatgtcctgcttgaccggcctggcgaaagcctttttgagaagcttttatgcgttctccatgcactgcttggtagctacaaaccaagttggctgaagtcaaggtcagcctctaggtcgtcaattaaaagccaacgagatttctcagcatttgataacgaagcagccgagggcttacagtccgcgttggaccacatggaattgcctgaaacaatcaggcggaggatccaagcagccatgcctcttcttccaccatccaggcgcccttgtatgcaatgccaacctccgcagttgtcgttggctgcattatcaccactccagagcagtacctctggtgtaggtcctcaacagaaaagttcttgtgtgagttgggtgcccactaacgtatcagtcagaagcaaggcagcattgccttctcatgaccctgaaacggaggtagatccatggagcttgctggaagatggcacaaactgccccccctccacagcatctggaagcaatggctcgagtggagtgacgggagaccatgctaatctgaaagcttccagctggcttaagggtgccgtgagggtgaggaggacagaactgacctacattgggtctgtagatgacgacagctgatacgtgtatgattatcttggtgaattggaggcaaagaatttggtctcacttgttggcatttgtgtcgtgtgcaagttaaaagcaccaactgcatcgaattctttgagagctctgtaccacaaggtggaatggaaaccatatggcttttggttggttgttgtagtgttagaatacatcgctgcccccgatttgttttagttagggcctgtgggggcggctgtatatagttggaatccatttctggattcaatgggggagcttatttgagaatcaggcaggaagccatgtagtagatttctagccaagagccctgtacttgttttttttttgggtctgagatgtaattgtcatgtcacatatattcttttgatctaaggctgacggaagttgcattgcctatttgctttagcta

SEQ ID NO: 91336 - DNA, 1783 bp, Zea Mays
ctactccccacagcagctgaaaaccaaagaaaccgttggcggacgcccaccaaccaaaaaaaaaaaaaacccacgcctttcctccccgccggggctctccactctcgctccaacgccgacggagaagccgcagctctgctccctcgctctctcttccgggagcgcgtggctctattccattcgcgcccgctcggctgacaacggaggataaaattttgatcctttcatttgttggacattggatcaactggtgctgttatacatagaaaggagttcattgtaatttctcatctatatttagtggtgccataatcatttttccactggtgttcggcaataatgtcggagagcgagttagcagtaataaaaccagaggcgttaaagacttatatctggcttcagtgctttgatggttccattcagcaagtggaggaggaggttgcaatgttctgccccatgatatgtcgtgaaattgtgaaaaatggcacagggtcgtccaaaaatcatgctattgcgctccctgaaagagttaatccagccagtttgagtttgattcttgactactgccggtttcatcaggttactgggcgctcaaacaaggagcggaagtcctttgatgaaaaatttgttaggatagaaacagaaagactctgcgaattgacttctgcagctgacagtctacagctaaagccacttgttgatcttactagtcgagctcttgctcgaattattgaaggaaagacacctgaggaaatccgtgacattttccacttaccagatgacttaacagaggaagagaagttggagcccctaaaaaatgtaaatgatgatcctaggattcgcctattgaaccggttgtacgcgaagaagcggaaagagctccaggagcgccagaagctgaaggatgtacaagtacaaaaggaggaaaaagatgagagatctttggatgagttactttgttttattaatggggatggaggttcaggaggtggggaaagtagtaccaagagtaagaaaaagaataaaagaaggaaggatcatgctaagaaccccgcaaaagctgactctgagtctgtaaatgtggagggagctgcttgtgtggttccgtgcaaagtggatagcagtaatgtttctagacttccatgccaaagtccagatatgcaagatgatgtcgagtacccctttgaagatgctgacctcgatgatggacttgatcctgcaatgaaagaagagcttgatagagaagttgaggactttgcgaggaggttgaattcagtttggagcgagtcacatattggtggtaatggttctgtgcagagatttcctgggtttaatcacaggtgagtgttaagctggcaagatctgaaggcagaagctgaggagatttgtgggcatacagcttggaagggattaaaggccaaacaggccaccttggctcctgtgtgttgtaaaaccttgataactcaggaaccaagcatgcagaaatgcgcaagttcccttggccattttcctgggaaggaggccacctagttgggatgacccttttttttctttgggaagggagggttagaggtctgtcttgactcaattttttgttccttaactgctgtgttgccagttttcctgaataggggaagagaggagtgttgcctgttagctctgttacagatgtccatggaattctgttgtaacactgtattgtggtgcacatagaaatgtgattccctgtattgccgatgtttggctggtttgttgaccgtaccttattattactgagcaaaga

SEQ ID NO: 91337 - DNA, 1807 bp, Zea Mays
ctactccccacagcagctgaaaaccaaagaaaccgttggcggacgcccaccaaccaaaaaaaaaaaaaacccacgcctttcctccccgccggggctctccactctcgctccaacgccgacggagaagccgcagctctgctccctcgctctctcttccgggagcgcgtggctctattccattcgcgcccgctcggctgacaacggagctgtaggttaacctggtaaaccaattaccttgaagctgaactgtgccgttgaagccaaaatttattacgataaaattttgatcctttcatttgttggacattggatcaactggtgctgttatacatagaaaggagttcattgtaatttctcatctatatttagtggtgccataatcatttttccactggtgttcggcaataatgtcggagagcgagttagcagtaataaaaccagaggcgttaaagacttatatctggcttcagtgctttgatggttccattcagcaagtggaggaggaggttgcaatgttctgccccatgatatgtcgtgaaattgtgaaaaatggcacagggtcgtccaaaaatcatgctattgcgctccctgaaagagttaatccagccagtttgagtttgattcttgactactgccggtttcatcaggttactgggcgctcaaacaaggagcggaagtcctttgatgaaaaatttgttaggatagaaacagaaagactctgcgaattgacttctgcagctgacagtctacagctaaagccacttgttgatcttactagtcgagctcttgctcgaattattgaaggaaagacacctgaggaaatccgtgacattttccacttaccagatgacttaacagaggaagagaagttggagcccctaaaaaatgtaaatgatgatcctaggattcgcctattgaaccggttgtacgcgaagaagcggaaagagctccaggagcgccagaagctgaaggatgtacaagtacaaaaggaggaaaaagatgagagatctttggatgagttactttgttttattaatggggatggaggttcaggaggtggggaaagtagtaccaagagtaagaaaaagaataaaagaaggaaggatcatgctaagaaccccgcaaaagctgactctgagtctgtaaatgtggagggagctgcttgtgtggttccgtgcaaagtggatagcagtaatgtttctagacttccatgccaaagtccagatatgcaagatgatgtcgagtacccctttgaagatgctgacctcgatgatggacttgatcctgcaatgaaagaagagcttgatagagaagttgaggactttgcgaggaggttgaattcagtttggagcgagtcacatattggtggtaatggttctgtgcagagatttcctgggtttaatcacaggtgagtgttaagctggcaagatctgaaggcagaagctgaggagatttgtgggcatacagcttggaagggattaaaggccaaacaggccaccttggctcctgtgtgttgtaaaaccttgataactcaggaaccaagcatgcagaaatgcgcaagttcccttggccattttcctgggaaggaggccacctagttgggatgacccttttttttctttgggaagggagggttagaggtctgtcttgactcaattttttgttccttaactgctgtgttgccagttttcctgaataggggaagagaggagtgttgcctgttagctctgttacagatgtccatggaattctgttgtaacactgtattgtggtgcacatagaaatgtgattccctgtattgccgatg

SEQ ID NO: 91338 - DNA, 1542 bp, Zea Mays
ctactccccacagcagctgaaaaccaaagaaaccgttggcggacgcccaccaaccaaaaaaaaaaaaaacccacgcctttcctccccgccggggctctccactctcgctccaacgccgacggagaagccgcagctctgctccctcgctctctcttccgggagcgcgtggctctattccattcgcgcccgctcggctgacaacggagctgtaggttaacctggtaaaccaattaccttgaagctgaactgtgccgttgaagccaaaatttattacgataaaattttgatcctttcatttgttggacattggatcaactggtgctgttatacatagaaaggagttcattgtaatttctcatctatatttagtggtgccataatcatttttccactggtgttcggcaataatgtcggagagcgagttagcagtaataaaaccagaggtacaatcccctgcagcccccctctccggcgttaaagacttatatctggcttcagtgctttgatggttccattcagcaagtggaggaggaggttgcaatgttctgccccatgatatgtcgtgaaattgtgaaaaatggcacagggtcgtccaaaaatcatgctattgcgctccctgaaagagttaatccagccagtttgagtttgattcttgactactgccggtttcatcaggttactgggcgctcaaacaaggagcggaagtcctttgatgaaaaatttgttaggatagaaacagaaagactctgcgaattgacttctgcagctgacagtctacagctaaagccacttgttgatcttactagtcgagctcttgctcgaattattgaaggaaagacacctgaggaaatccgtgacattttccacttaccagatgacttaacagaggaagagaagttggagcccctaaaaaatgtaaatgatgatcctaggattcgcctattgaaccggttgtacgcgaagaagcggaaagagctccaggagcgccagaagctgaaggatgtacaagtacaaaaggaggaaaaagatgagagatctttggatgagttactttgttttattaatggggatggaggttcaggaggtggggaaagtagtaccaagagtaagaaaaagaataaaagaaggaaggatcatgctaagaaccccgcaaaagctgactctgagtctgtaaatgtggagggagctgcttgtgtggttccgtgcaaagtggatagcagtaatgtttctagacttccatgccaaagtccagatatgcaagatgatgtcgagtacccctttgaagatgctgacctcgatgatggacttgatcctgcaatgaaagaagagcttgatagagaagttgaggactttgcgaggaggttgaattcagtttggagcgagtcacatattggtggtaatggttctgtgcagagatttcctggcattgacatacttaaaaatcttgtttgactatttgcagggtttaatcacaggtgagtgttaagctggcaagatctgaaggcagaagctgaggagatttgtgggcatacagcttggaag

SEQ ID NO: 91339 - DNA, 1517 bp, Zea Mays
agtgactatcgatcgatcatggctcttgcttctgtggccaaggtggtgctgggctccatcgccttctgtgtgttctgggtgctggccgtgttcccgtccgtgcccttcatgcccatcggccgcacggcgggcgccctgctcagcgccgtcctgatgatcgtgttccacgtgatcagccccgacgacgcgtacgcgtccgtggacctccccatcctgggcctcctctttgccaccatggtggtgggcagttacctcaagaacgccggcatgttcaagcacctgggcacgctgctggcgtggcggagccagggcggccgcgacctgctgtgccgcgtctgcgtcgtcacggcgctggccagcgcgctcttcaccaacgacacctgctgcgtcgtgctcaccgagttcgtgctggagctcgccgccgagcgcaacctccccgccaagcccttcctgctggcgctggcctccagcgccaacatcggctccagcgccacgcccatcggcaacccgcagaacctggtgatcgccttcaacagcaagatctccttccccaagttcctgctcggcatcctgcccgccatgctcgccggcatggccgtcaacatggtcatgctcctctgcatgtactggaaggacctagacggcagcggcagcggcatggacctggacggcaagcggatggaggccgtcgaggagggggccgtcgtcgtcgtcgagccgagccccaagcagcagcagcagcagctgggcggcagcaacgggtacatgtcgccgctgatgacggagaacatctccaccaagcacccctggttcatgcagtgcacggagcagcggcggaagctgttcatcaagagtttcgcctacgtggtgacggtgggcatggtgatcgcctacatggtggggctcaacatgtcgtggacggccatcaccaccgccatcgccctggtggtcgtggacttccgcgacgccgagccgtgcctcaacaccgtctcctactcgctgctcgtcttcttctccggcatgttcatcaccgtcagcggcttcaacaagacggggctgccggcggccatatggaacttcatggcgccatactccaaggtcaacagcgtgggcggcatatccgtgctctctgtcatcatcctgctgctgtccaacctcgcgtcaaacgtgccaacagtgcttcttatgggcggcgaggtggcctcggcggcggccctgatctcgccggcggctgtggtgcggtcgtggctgctgctggcgtgggtgagcacggtggcgggcaacctgtcgctgctgggatcggcggcgaacctgatcgtgtgcgagcaggctcgacgggcgcagcgcaacgcctacgacctcaccttctggaaccacatcgtcttcggcgtgccctccaccctcatcgtcaccgccatcggcatccccctcatcggaaagatcaacatctgaactcgatcgtagctcatatatactacactacatgcataattgtatgcctcgatcgtatatgtacg

SEQ ID NO: 91340 - DNA, 2010 bp, Zea Mays
atggacgacaacgtccgcgccaagactcgatcttgcgccggcggcgagacctcgtcgcacgcggcgtcgagggtcgtcatcgcgcagcagagggccgccgcgcggcgccggcagcagcaggcgtgcgagcagatggtgctcaccacgctggacctcgaccgccgcgaccgcgagtccgagctcctcgcgctcgcgcgcctccacgccgtctccatgctcgacgcctccttcctccacggcggggacggcggcaggcggcgcccgcggtctcccgagcgcgcgctcgtcaggcggatcgccagggagtgggcggcggcgtccaccacgtcgccctcgcgcggcgccggcgccggcgccgaggagtggctgggtgagagcgagcgcgagcgggtgcgctccgtgcgcgagcgcgtccgcatggcctgccagggctaccatagggatgaggaggacgaggaggaggagccggcgcccagcaggctgcgcggccggccgcaggcgcgcgccgacgtcgtcgtgacgcgcatggccgtggaacgccagcgagagctgcagggcctctccgagcaccgcgccgtctccgccttcgctcaccgcggccgcattcagtcttttctacgaggtcgatccttgcgtagcggaaggtctatgaatgatgagaggccgatctcaggacagcttaggcagagtcatcctgtctctacagtgagggaagaagttcgctctggagcagaaagaagcatcactagtagccatcagtcagctttggtggtggcattgtctactccaaccaatcctaccgataatgagtatgacgacgccagtgcaacacctcagcagttcgcaatcagtgaggatgagaacgcaaccgttgggtatgaaatcctgacacaagaatccgtgcaacaagatgaaggttcacgtaccgaagacaacgtggctgatagatctcacgactttgctcaagaacagacaggtcgatattcagggtcctcctcggaacaggacagtcaccattattctagtagctacgccttccctagcaacaacgcgttgcagcgggaagctgaaactcgcagaggaggacaagaacagattggtttggcatggtcaagcagggatgcatccggcatcgaggatggagatggagatggcaacacctttgtacatggagatgacgacgaagaatggctcgttattgattctcaggagcctagaccaaactggcagccagctggacacggtttcgcttcgagcagaaacacgaacaggcttcgtccagcagacggtgatgtctatggagttgaactcagagagctcttgagcaggcgaagcgtgtcaaatcttctcagcagtggcttccgggaaagtcttgaccagctcattcggtcttatgtccagaggcaagaacatgagtggaatttggaggggcagataccagcaaccactggacctggttcatcacgcaacgaagatcatattgaaatcagaataatagacgaacagaatcgaggtgacagtgacactgcacctcagtcgtcgtcttcagctttgtcgccagcagaccgaacacagcaacgtcagtgggctcagcaaaccatgcaccaccgttctgaatttgtagactgggacgctatccacattctccgagatgagctgagtggcgtgcagagagggatgagcagcgtgcagcagatgctggaagcatgcatggagatgcagatagagatgcagcggtccatcaggcaagaagtgtctgccgctctgaaccgctctctaacgatgcgagatgatgaagaagaaacattagagggtggatcacagtggaagctagcaaggaaagggacctgctgcatctgctgcgacagccagatcgactcccttctctacagatgtgggcatatgtgcacctgctcaaaatgcgcaagcgagttgcttcatggggctggaagatgcccgctttgtcgcgcgcccatcatcgaggccatccgggcatactgcatactgtga

SEQ ID NO: 91341 - DNA, 929 bp, Zea Mays
atgttaggaaccatctaaaagtttatggaatgttgatagtttcattgtggaacgtaggcagctcttgaccatacctggtacatgtagaccatatctgtgtgcgacatcctgcttgatcatttatgatattacattcgaataacctcctcttagggaattttgaaagcccagaaagattgtaagccagtatggctatatcttacacctttgggatatctgtttcctgaaggaaggacggtatgaatacaaatacgtagtggatggcaaatggctatgcaacgagcatgagctgataacgaaaccgaatgctgacggccacgtgaacaactatgttcaggtctccagagacggcacgagcgatgaagagaaggagcttagggagcggttgactggtccggaccctgatctcacggaccaggagaggctgatgatcagagagtacttggaacagtacgcggatgccgccgagcgctaggaggtccagttgagaacaactaaccctattcctatgtgctggtgtataaacaaacaagctcattgggatgatcactcaggtggtactgggtactaacaagtatatgcgtatgacatgaactgcagaagaatgatgatgactgaggaagagaagagacacaccatgagacgacggaccgaagccgacctgaccgcaccttcctttacggagaggtcgggcttcccctctcttgtcaatcaaatactcgtagcttaaccgtgcaaaagggcacgttctgctcgcatacttggagaatgatgatgaaggagcaaactgtacgtattgttgaacagcagctgtgcagaaataacaaaggtagtagcgtaaaactactgtactgaccataatgttactactgtatgctccttcttggctatgaataataataataataataaaagagtaaataaacctc

SEQ ID NO: 91342 - DNA, 1563 bp, Zea Mays
atggtccgcggcggcagtcgccgatcaaacaccgtcaaaactgcccctggggcgtccacttccggtgccgagagcagcgccgtggagatgggcaccgagaagtccgaagtgtacagcactaacatgacgcaggctatgggagcagttgtttcacctaaacacgcttcctgcatgtttaacttaccacggcccagtctgcaaacacctgttcaacaacaaatatcccaatttcatgcttcaacattgtgcttgccatctaatttttgtgattgcgttatgcttttagtaagtttggtctattaacttatctgatatgtgtttcttttccccccatgttattatagcgttgacatatagacatgaactcgggatgaactacaatttcatacgcccagacttgattgtaggatcctgcttacagagtccacttgatgttgataagcttcggaagattggtgtcaaaactgtattctgcttgcagcaagattcagatcttgaatattttggagtcgacatccgtgccattcaagattattctctacaattcaaagatattgtgcactgccgtgcggaaattagggattttgatgcttttgatttgcgattgaggcttcctgctgtggttagcaaattgcacaaacttatcaactgtaatggtggtgtaacatatatacattgtactgctggacttggaagagctcctgctgttgcattggcttatatgttctggattcttgggtacagtctcaatgaaggacatcggctgctacagagtaaaagggcttgctttccgaagttggaagccattaagttggcaactgctgacattctgacaggattatccaaaaacacaatcactttgaagtgggaagctgatggttcttcctctgttgaaatttctgggctcgacattggctggggtcagagaattcctttgacatatgatgaggagaaaggagcttggtttcttgagaaagagttgcctgaaggacggtatgaatacaaatacgtagtggatggcaaatggctatgcaacgagcatgagctgataacgaaaccgaatgctgacggccacgtgaacaactatgttcaggtctccagagacggcacgagcgatgaagagaaggagcttagggagcggttgactggtccggaccctgatctcacggaccaggagaggctgatgatcagagagtacttggaacagtacgcggatgccgccgagcgctaggagaagaatgatgatgactgaggaagagaagagacacaccatgagacgacggaccgaagccgacctgaccgcaccttcctttacggagaggtcgggcttcccctctcttgtcaatcaaatactcgtagcttaaccgtgcaaaagggcacgttctgctcgcatacttggagaatgatgatgaaggagcaaactgtacgtattgttgaacagcagctgtgcagaaataacaaaggtagtagcgtaaaactactgtactgaccataatgttactactgtatgctccttcttggctatgaataataataataataataaaagagtaaataaacctc

SEQ ID NO: 91343 - DNA, 1745 bp, Zea Mays
gtccctctccctagtccctcccctcgtccgtcgtccacctctgccactacgagctcgtccccgtcttgtttcgtctcctctcgtctcgtcacgcgagatatttctacgggacgggacccgcgttgcttccccgcctcgccgtcccgcgcgcgccagccgggcccggggaagccatgaactgcctccagaacctgctcaaggagcctccaatcgtggggtccaggtcgatgaggcggccctctccgctgaatctggcgatggtccgcggcggcagtcgccgatcaaacaccgtcaaaactttgcaggcccctggggcgtccacttccggtgccgagagcagcgccgtggagatgggcaccgagaagtccgaagtgtacagcactaacatgacgcaggctatgggagcagcgttgacatatagacatgaactcgggatgaactacaatttcatacgcccagacttgattgtaggatcctgcttacagagtccacttgatgttgataagcttcggaagattggtgtcaaaactgtattctgcttgcagcaagattcagatcttgaatattttggagtcgacatccgtgccattcaagattattctctacaattcaaagatattgtgcactgccgtgcggaaattagggattttgatgcttttgatttgcgattgaggcttcctgctgtggttagcaaattgcacaaacttatcaactgtaatggtggtgtaacatatatacattgtactgctggacttggaagagctcctgctgttgcattggcttatatgttctggattcttgggtacagtctcaatgaaggacatcggctgctacagagtaaaagggcttgctttccgaagttggaagccattaagttggcaactgctgacattctgacaggattatccaaaaacacaatcactttgaagtgggaagctgatggttcttcctctgttgaaatttctgggctcgacattggctggggtcagagaattcctttgacatatgatgaggagaaaggagcttggtttcttgagaaagagttgcctgacggtatgaatacaaatacgtagtggatggcaaatggctatgcaacgagcatgagctgataacgaaaccgaatgctgacggccacgtgaacaactatgttcaggtctccagagacggcacgagcgatgaagagaaggagcttagggagcggttgactggtccggaccctgatctcacggaccaggagaggctgatgatcagagagtacttggaacagtacgcggatgccgccgagcgctaggaggtccagttgagaacaactaaccctattcctatgtgctggtgtataaacaaacaagctcattgggatgatcactcaggtggtactgggtactaacaagtatatgcgtatgacatgaactgcagaagaatgatgatgactgaggaagagaagagacacaccatgagacgacggaccgaagccgacctgaccgcaccttcctttacggagaggtcgggcttcccctctcttgtcaatcaaatactcgtagcttaaccgtgcaaaagggcacgttctgctcgcatacttggagaatgatgatgaaggagcaaactgtacgtattgttgaacagcagctgtgcagaaataacaaaggtagtagcgtaaaactactgtactgaccataatgttactactgtatgctccttcttggctatgaataataataataataataaaagagtaaataaacctc

SEQ ID NO: 91344 - DNA, 1627 bp, Zea Mays
gtccctctccctagtccctcccctcgtccgtcgtccacctctgccactacgagctcgtccccgtcttgtttcgtctcctctcgtctcgtcacgcgagatatttctacgggacgggacccgcgttgcttccccgcctcgccgtcccgcgcgcgccagccgggcccggggaagccatgaactgcctccagaacctgctcaaggagcctccaatcgtggggtccaggtcgatgaggcggccctctccgctgaatctggcgatggtccgcggcggcagtcgccgatcaaacaccgtcaaaactttgcaggcccctggggcgtccacttccggtgccgagagcagcgccgtggagatgggcaccgagaagtccgaagtgtacagcactaacatgacgcaggctatgggagcagcgttgacatatagacatgaactcgggatgaactacaatttcatacgcccagacttgattgtaggatcctgcttacagagtccacttgatgttgataagcttcggaagattggtgtcaaaactgtattctgcttgcagcaagattcagatcttgaatattttggagtcgacatccgtgccattcaagattattctctacaattcaaagatattgtgcactgccgtgcggaaattagggattttgatgcttttgatttgcgattgaggcttcctgctgtggttagcaaattgcacaaacttatcaactgtaatggtggtgtaacatatatacattgtactgctggacttggaagagctcctgctgttgcattggcttatatgttctggattcttgggtacagtctcaatgaaggacatcggctgctacagagtaaaagggcttgctttccgaagttggaagccattaagttggcaactgctgacattctgacaggattatccaaaaacacaatcactttgaagtgggaagctgatggttcttcctctgttgaaatttctgggctcgacattggctggggtcagagaattcctttgacatatgatgaggagaaaggagcttggtttcttgagaaagagttgcctgaaggacggtatgaatacaaatacgtagtggatggcaaatggctatgcaacgagcatgagctgataacgaaaccgaatgctgacggccacgtgaacaactatgttcaggtctccagagacggcacgagcgatgaagagaaggagcttagggagcggttgactggtccggaccctgatctcacggaccaggagaggctgatgatcagagagtacttggaacagtacgcggatgccgccgagcgctaggagaagaatgatgatgactgaggaagagaagagacacaccatgagacgacggaccgaagccgacctgaccgcaccttcctttacggagaggtcgggcttcccctctcttgtcaatcaaatactcgtagcttaaccgtgcaaaagggcacgttctgctcgcatacttggagaatgatgatgaaggagcaaactgtacgtattgttgaacagcagctgtgcagaaataacaaaggtagtagcgtaaaactactgtactgaccataatgttactactgtatgctccttcttggctatgaataataataataataataaaagagtaaataaacctc

SEQ ID NO: 91345 - DNA, 1566 bp, Zea Mays
cccgtcttgtttcgtctcctctcgtctcgtcacgcgagatatttctacgggacgggacccgcgttgcttccccgcctcgccgtcccgcgcgcgccagccgggcccggggaagccatgaactgcctccagaacctgctcaaggagcctccaatcgtggggtccaggtcgatgaggcggccctctccgctgaatctggcgatggtccgcggcggcagtcgccgatcaaacaccgtcaaaactttgcaggcccctggggcgtccacttccggtgccgagagcagcgccgtggagatgggcaccgagaagtccgaagtgtacagcactaacatgacgcaggctatgggagcagcgttgacatatagacatgaactcgggatgaactacaatttcatacgcccagacttgattgtaggatcctgcttacagagtccacttgatgttgataagcttcggaagattggtgtcaaaactgtattctgcttgcagcaagattcagatcttgaatattttggagtcgacatccgtgccattcaagattattctctacaattcaaagatattgtgcactgccgtgcggaaattagggattttgatgcttttgatttgcgattgaggcttcctgctgtggttagcaaattgcacaaacttatcaactgtaatggtggtgtaacatatatacattgtactgctggacttggaagagctcctgctgttgcattggcttatatgttctggattcttgggtacagtctcaatgaaggacatcggctgctacagagtaaaagggcttgctttccgaagttggaagccattaagttggcaactgctgacattctgacaggattatccaaaaacacaatcactttgaagtgggaagctgatggttcttcctctgttgaaatttctgggctcgacattggctggggtcagagaattcctttgacatatgatgaggagaaaggagcttggtttcttgagaaagagttgcctgaaggacggtatgaatacaaatacgtagtggatggcaaatggctatgcaacgagcatgagctgataacgaaaccgaatgctgacggccacgtgaacaactatgttcaggtctccagagacggcacgagcgatgaagagaaggagcttagggagcggttgactggtccggaccctgatctcacggaccaggagaggctgatgatcagagagtacttggaacagtacgcggatgccgccgagcgctaggaggtccaaagaatgatgatgactgaggaagagaagagacacaccatgagacgacggaccgaagccgacctgaccgcaccttcctttacggagaggtcgggcttcccctctcttgtcaatcaaatactcgtagcttaaccgtgcaaaagggcacgttctgctcgcatacttggagaatgatgatgaaggagcaaactgtacgtattgttgaacagcagctgtgcagaaataacaaaggtagtagcgtaaaactactgtactgaccataatgttactactgtatgctccttcttggctatgaataataataataataataaaagagtaaat

SEQ ID NO: 91346 - DNA, 840 bp, Zea Mays
atggcgggatccgcggacgcgctgccaccaaccccatcaccaagctcgccgccgggtatcccgccccacaccaaaccgcgccccctgccctcgtcctcgccctcgacggcaccttcatggaaggccagatacgcggacgcgccccattccttacctggcagcgacgacaatcacgatgccccttccttgcctcaatcgaccgctattaaaaggatggacagagtgcggtcctttggaaccgaagggcggaagaaagacggagtgcagattcctgctagcgacaaagtttacgagtatatcctcttctggggaactgatatcaaggatttgcaagttaagtcatcaccaccacagccgtcaccaccacaagcagcttccctgcacaatgatcctgccataatccagtcacattattctcaacctgcatcaacgtcatcaagtttgccttcaactgggggtgcagttttaccagacttcagctcccaggcagttcaatatgggcttcagaggccaaacttccagagtaaccttcctctctaccaaccagggaatactccgtggggctctttagtggcacctccagcaggaaatgctccatggggctcttcagtggcgcctccagcaggaaatgcttcaacacttttggttccctcaatgtactggcaagggtactatgcaccttcaagtgggctaccgcatcatttgcagccacctcctttgcttcatccaacaccaggattgtcggttccccagaatctccaatatccaggactaaatccttctttgcaatctgggccgcaaaagctgtcagaactccaaccctcattgatgcaacactga

SEQ ID NO: 91347 - DNA, 267 bp, Zea Mays
gatttcttcatgcccttttcctcgccatgtgactgtggaatactaggcctagatgtgatcgacagtgagagaaggcctaggggagaagatggctgcagaaatggtgaaggcggcgatgagtggcaagctcaaggagatggattgggaaaagaagatcaaaatctgcgagctcgtggagcaagatcctgggaaagcgaaggatgtgataaagtctataaataagtctatatggagcatgagcaagagcacttaactatttgctattat

SEQ ID NO: 91348 - DNA, 94 bp, Zea Mays
aaaaaataccgatcatggagatacatggagccaaatgttatctgatataccagcttccatcacttgggttttgcttgttgggctacctgtaatg

SEQ ID NO: 91349 - DNA, 1285 bp, Zea Mays
tcaattaacggtcaccaaccgcttcttctctctctgtgggctgcctgtgcatgcctctctttacgcctgtgttatatagctctgcttcacgatcgagatggacgacactgcattcagcgtgcgaccgaagctagctagcagctcttcttgctttgcattaattattgcgagatgacgatgtccattgttgctgccgtgctgctgttgctgctcgtccatgtccatccacgggcggcagcggcgcaaccttcgccgggctacttcccgagctccacagtgaggcccatggccttctcggatggatacgacaacctgtgggggccgcagcaccagacgctgtcgcaggacaggatggcgctgacgctcttgatggaccgcacctcaggcagcgggttcaagtccaagcgctcgtaccggaacggctacttcggcgtctccatcaaggtgcagccgggctacaccgccggcgtcaacaccgccttctacctgtccaacaacgagctgtaccctgggaggcacgacgagatcgacatggagctgctgggcaccgtgccgggggagccctacacgctgcagaccaacgtgtacgtgcggggcaccggcgacggcgcgcgcctcgtggggcgggagatgcgcttccacctctggttcgacccggccgccgacttccaccactacgccatcctctggaaccccgaccagatcgtcttcctcgtcgacgacgtccccatcaggcgctacgccgccgccagtgcgccgttcttccccgaccgccagatgtgggcgtacggctccatctgggacgcctccgactgggccaccgacggaggccgctacagggccgactacagctaccagcccttcctggcaggattccgggggttcaggaccgccggatgcgaggccgccgcgcccgcccagtgccgtcccgtgccggcgtcccccgccggcgccggacttagcgtgcagcagcgggacgccatgcgctgggcgcagcagacctccatggtctactactactgccaggattacaccaaggatcgctccttgtacccagagtgctcgctcgctagctagcctagctagcactaccactaccagagcatgcatggaggaggcgtgcgagtgaagaagcgccgccctacgtacgtaccgttctaaaattgtatgtacaattaagtctccatccacatccatatatacaacatatgtaatgtataattaagtccattattaatttaatcatcaaaaatggaacatgcctatatatttcctactatatata

SEQ ID NO: 91350 - DNA, 293 bp, Zea Mays
attgcgcttatattcatcactgtaggacttgggttcaagctttcactagccccttttcatcaatggactcctgacgtctacgaaggagtgtggttcgttcgacaaattcctacttctatctgaggtgtttgggttttgcaaaactccatagacatgcagaagagaaatgctatccccactccgaccaagacagaacttttaccaaaagtttattgtgatctttttgttcaaataacaattaaggtgaagcagggtcaggaacaacaaatctctttatgataaatagatccatt

SEQ ID NO: 91351 - DNA, 378 bp, Zea Mays
aagtatctaggtgctcacgatgtccaacataacgacatctgacttgagcactatgctagttagtacaagctagtgctgaaaaagaggggcgaaaaaaaccaacaccttgaaacttgaaagtcaagcatatgtgaggatatatttgaagttatctactacataccttatccatgtctctttgtctgataataagggtgcctggagctttagggttgtatgaattattaaccctaactggaatatcaccttctctagcaggtctcatcgattgtggatgcaaaacttgcattggagtgcacaatcctaatgaacctaaatttctcgtttctattcaatagagtgactaagactgacatcatgagctatatgttcaattca

SEQ ID NO: 91352 - DNA, 1830 bp, Zea Mays
atgaccttcatgagctgttccgcggccatctccgacggcattccgctgcgcttccccatagagggaagcaggaccctctgcggcggccttggaggtgtctgcgcgcgaggggtgctcgctctcggttcccacaggagtaacaggagtaggagggcgaggcacaggcacgcgacggtcttcgcgaggaggaggaggaggcggcggcccagcaagtggcagcggccgtggtggaagaccttcttctcggactggaacgaagacgacgagagtctggacgggtggagggaggaggacgagctgcttcaggagattggcagcgacaaggggctgtcggaggatgaaaagttcaagacgtggacgagaaaggccgaagcgattgttgatctgcgcgaggcccagcaggatgcggtgaacgccgaggagcggtcgtgggaaaattggatcggtggtggcggcggcacgtcggggactggaggcggtggggaggccagcttgttggaccagatcactgatgaccctgcagagattgtgagggataagagcgtttttgaggttttcagaggttccatcgatgaggattatgaggacatgttgttcgaagatcgagtgttcatgtacgcctcaacaaactcggctaaatttctagcattgctgattgtggttccgtgggtcatagattttatagtccatgactatgttatgatgccctttctagagaggtatgtccagaaagtgccacttgcagcggagttacttgatgtaaggcgcacccagaagctgcagatggttaaagccctaaagattgaaaaggcaagataccgtcttgaagtagagattggcaaatctcctccactttctgatgaggaggtctggtatgagctgcgggaaaaagcgatagagttgagggatgattggaggctagagaatcgaaatgctttcgcaaatatatggtctgatacggtttatgggattgttctatttcttcttatgtgcttcaatcagagcaaagtcgcaatgctgaagttcacaggatataagttgctaaataacatttcagacagtgggaaggcctttcttattattttagtatctgacatccttctagggtaccattcagagtcaggttggcatacattggtagaagttattctcgagcattacggttttgaagctgatgaagcggcggtcacattttttgtttgtctggttccagttgctttggatgtgtacataaaattttgggtatacaaataccttccaaggttatcacccagtgtgggcaacgttctggatgaaataaagcgtcattagagattttttgccttagaaattcactatgatctgcagcaattcactcctcgtttgtccctttcagtcttgggatgtccagagctgttagaactgaaacctgtcaacatcttgaaggcttcagaaaatagaggcaaacagagttgcagggtcctgaaaccgagacgtcctatcaatttatgttgataggcctagggtggtattatatagtgatgggtatttttcaccgactccaccggtggagtttactagcagcaacttgaggcaaaaatatctcttgtttacatggttttatctcttgtaaaataagaagttggatgattttgcgcgaaatgagacggaacgtgctgacggtcgtctgttctgatgaccaaccaagcaaatggcaggacagggacaactcccagcaatgtttcccttccctatcactgattatggtgtttgttctactatgtagtgacaagttttttttttgtttgttatttcttttagttgccttcttgtatgattgagactttgctt

SEQ ID NO: 91353 - DNA, 2134 bp, Zea Mays
gccgtagtagctagcaagccgaaggctggagctgcctgcctgaattctctcgtttctctgcttcttcctcctctcccgcccagaaccagaaccaggaagcatcgcgagccaccggcgagccctcgtcgccgccaggacgtgcaccgacgaccgggtctctgccggccgctggcctttctacaggtcttcgccgtccgctggggctaagcaagctagcttgcgagggagcatatatggtcctccgcgtttcatgaccttcatgaggtgttccgcggccgtctccgacggcattgcgctgcgcttccccgccgagggcagggccctccgcggaggcgtctgcgcgcgcgggcgcgggctgctcgctctgggttcccacaggagcagcagtaggagggcgaggcgcaggcacgtggcggtcttcgcgaggcggcggctcggcaagtggcagcggccgtggtggaggaccttcttcgcggactggaacgacgacgaggagagcctggccgggttcagggaggacgacgagctgctggaggagattggggccgaccaggagctgtcggagaaggccaagttcgaggagtggaggcggaaggccgaggccattgttgagctgcgcgaggcccagcaggacgcgttcaacgccgaggagcggtcgtgggaggactggaccggcggtggcggcggtggtggcgcgccggagaatggtggaggtggggactggggcggggaggccagcttgtcggagcagataaccgatgatcctgcggagatcgtctgggataagggcgtcgttgaggttttcagaggtactatcgatgaggattacgaggatatgctgttcgaagatcgagtttttatgtatgcctccacgaactcggccaaattcctagcattgctgatcgtggttccgtgggtgatagattttctagtgcacgactatgccatgatgccctttttagagaggtatgtccagaaggtgccgcttgcagctgagttacttgatgtgaggcgcagccagaagctgcagatggttaaggacctgaacatcgagaaggcaagataccgtcttgaagtagagatcggcaaatctcccccgctctctgatgaggaggtctggtttgagctgcgggaaaaagcgcttgagttgagggacgattggaggctagaaaaccgacaagcttttgcaaatgtatggtccgatatggtttatggggttgttctattcctgcttatctgcttcaaccagagcaaagttgcgatgctcaagttcacaggatataagttgctaaataacatctcagacactggaaaggccttccttattattctagtatcagacatccttctagggtaccattcagagtcaggttggcatacaatggtagaagttattctcgagcattacgggcttgaatccgatgaagcggcggtcacattttttgtttgtctggttccagttgctttggatgtgtacataaagttttgggtatacaaataccttccaagattatcacccagtgtgggcaacgttctggatgaaataaagcgccactaaggaatcatttggataaattattgccttggaggtattcgatgggtatatttgcttggcatattaagttttcatcaaatctgaagggcgtccttcgtctggaaaggccttgcctagaatgcctgcctggccacgccatcaatcagagtgtccggctgttcgggaggactgggaattggagaagtaatctgagctagtccttatgtatattctaaaacaatatcttgtggatagataaccatagaggaaacttgaggcttttggtctgagatttatcattggcggcaaagcatttttgccttagaaattcttttgcatgatggaggccacaggttggttggaatctgtaaggttattgtttcaggatgatgtccagagctgcaaccttcgttggtgctcctattttagaaccgaaacgtatcgacatcttgatgtccagagtttgcagggttcagaaaccgaaatatgatatgcaagttttaaacttcgttactaagtcgtaaagttcaattgtaaactgtttcggttcgaacctttatctttcgataaagcaagtttctttttgattaatttaaccaa

SEQ ID NO: 91354 - DNA, 518 bp, Zea Mays
cctctgttccaccacgctgctggctgctgaggatggaggcggggagggagagctccaaggccaagcgcgcgcgcgccgccatgagcaacgaggacgacacgacgagccagggtaacgcaggaggtggcgcggcggcgtccgccgcggagacggagggggacgagatggccgtggtggcggcagaggcggaggcggaggcggacgagcaggtggggtcggcggagacggaggagcacatccagcgcatcctcctcgccatcgacaactacacccgccaggtgtctgacatgctggatgccgggcgcgcgctgttcaaggacctcgccgccgacttcgaggaccgcctctgctcgatccacaaggagagggtggagcggtgggaggaggagatccgggagctgcgcgcccgcgacgtcgccaacgagcaggcccgcgccctcctccacaacgcccagctgcacctcctccacaccgtccgcgactaaccgatcgcccaatccatccagacctcagtagca

SEQ ID NO: 91355 - DNA, 993 bp, Zea Mays
ctttctctcactgctctccccactccccaccccactattcctttctgctgagctcaggaaatcccctctggtctccccgtcccccattccacccgccgccgccgacgcgccgcgcctgttcaagatgaatgtggagaagctcaagaagatggcgggtgctgtgcgcactggaggaaagggcagcatgcgcaggaagaagaaggcagtccacaagaccgcaaccaccgatgacaagcggcttcagagcacgttgaaaagaattggagtgaacactattcctggtattgaggaggtcaacatcttcaaggatgatattgttatccaattccagaaccctaaagtgcaagcatccattcctgcaaatacatgggtagtcagtggagtaccccagacaaaaagtctacaagaccttctgccaacaattatcaaccaactgggccctgataacctggagaacctcaagaggcttgctgagcatttccagaagcaggtacctggtgccgaagccagcgccagtgcagctgcacaggatgatgacgatgtccctgagcttgtcccaggagagacatttgaggaggctgcggaggtgaaggaggtgcctgaagcggaaccggaagagaagaaagagtcgtaattttgttgcgtgtcatatccattgtttgtgaagggtcgttatgtgttaccatacaccatgggagagacctggtcatctatgaaccccctgatgttcctcattcgtttacatgtcctccagtttttcagtttcttatttacctgggttttggtccaaacctgacaactcagcatttggtttggcgtcaattgtgcttcaggttccaaaaaaaacattactgcagtatgattatgttgagggtgtaggccagaccggcacatattttcatcgagccagagtttcagccaatgtttgttttctcggttggcgtccacagcagttccatatacagaccaaattttgcaaaagcaaaaaagata

SEQ ID NO: 91356 - DNA, 1597 bp, Zea Mays
ctttctctcactgctctccccactccccaccccactattcctttctgctgagctcaggaaatcccctctggtctccccgtcccccattccacccgccgccgccgacgcgccgcgcctgttcaagatgaatgtggagaagctcaagaagatggcgggtgctgtgcgcactggaggaaagggcagcatgcgcaggaagaagaaggcagtccacaagaccgcaaccaccgatgacaagcggcttcagagcacgttgaaaagaattggagtgaacactattcctggtattgaggaggtcaacatcttcaaggatgatattgttatccaattccagaaccctaaagtgcaagcatccattcctgcaaatacatgggtagtcagtggagtaccccagacaaaaagtgagtggattatttgcttttgaacccgtgtgtgcctgattgtcgctcaagaaccctgttttttgtgcagtaacacagatacttagctgatgtttgacacagtttgctgctttactatcatccagccttggttctcatgtcattcgtagccccatgggcaaatagtatttattgatattcaatggttaaatgctgggccttgcttacctttgtatctttaattattcttgacatgctgtaaaagcaagggttgcaagttttagaacttactactgatggcgtgaattcgaatggcttctattctctaaatggtagttccttttatatatgttccatgatccttacaacattgaattgtgtagtatgaaaaaaactttctgtaaagcaacatttattaacgtttaacacaagctatgatttttttgttactcccgttatgattccctgacatgctgtaactggtttctctctttatgtttttttaggagaaaaggctgtagggtaaacggtaaacccctacagcgcgattttgtttaatataaaaattacccgggaggaaacatggataaaaaagaaagaaaataaagaaaaaagcaagctatcgagagtttagccataaaaccactatagaaaaaagcaagctatagagagtttctctctttatgttagataagaaactcatttctcattggctttcttacttgaacaggtctacaagaccttctgccaacaattatcaaccaactgggccctgataacctggagaacctcaagaggcttgctgagcatttccagaagcaggtacctggtgccgaagccagcgccagtgcagctgcacaggatgatgacgatgtccctgagcttgtcccaggagagacatttgaggaggctgcggaggtgaaggaggtgcctgaagcggaaccggaagagaagaaagagtcgtaattttgttgcgtgtcatatccattgtttgtgaagggtcgttatgtgttaccatacaccatgggagagacctggtcatctatgaaccccctgatgttcctcattcgtttacatgtcctccagtttttcagtttcttatttacctgggttttggtccaaacctgacaactcagcatttggtttggcgtcaattgtgcttcaggttccaaaaaaaacattactgcagtatgattatgttgagggtgtaggccagaccg

SEQ ID NO: 91357 - DNA, 1788 bp, Zea Mays
agaccccctctcgcttcgcccctcctcatcctctctcctctctcccccgccccgttcgtctccggcgagctagggtttgcccccccgccttgccaccccacggttcccgccatccttggatctccagccatgtacggcggagacgaggtttcggcaatcgtcatagatgtgggctcttacagctgcaaggcgggctacgcaggcgacgacacccccaaggccgtcttcccatcggttgttggttcaattgaacaaactgaagacacagatgaccccaagccagagaaggaagctgactctgcatcagattctaagaacggtgccaagcccatggatgtggacaaagccaagacaaaacgcagactttatgtaggccaagagttagagttcaggagggatcacatggaggtgatttcatctatgaaagatggaacggtaactgactgggatattgttgataatatatggaatcatgctttcagacggaggttgttgatcaatcctgaagagcatcctatgctcattgctgaaccatctacaaacactgcacagcaaagagagaaagcagcggaacttatgtttgagaactacaaagtgccagcgctgtttctagccaaaaatgcagtgctcacatcttttgcgtctggacgagctacatctttggtggttgacagtggtggtgggtctactgtggtttctgctgtacacgatggttttgttttacagaagtctgtgtcgacttctccagttggcggtgaatttttaactgactgtatgatgaaaagcttggagagcaagggcatcgtcattaggcccagatattcatttaagaagaaggaaatcagtcctggagaatataagattgtagatcttgatcttccaaacacaactgagagttacaggttgtactgcatgagagctattgctagtgacgtcaaggagtctgtttgcagagttccagacactgcttttgatgaagtggcatatgcaaatgttcctacaacttcatatgagcttcctgatggacaaactattgaagttggtgctgatagattcaaggttcctgatattctatttaatccatctctatcccagactattcctgggattgatggatttgcagattcaataccagtccgtggccttcaacgaatggtcattgatagcgtaaataagtgcgacgttgacatacgaaaagagctattcagtaacatcttgctctctggtgggtcatcatcaattctgcagttaaaggagcgcctggagaaagaagtattggaggagtctcctcaagctgctcgtgtcaaggttatggcaagcggaaactcagtagagagacgtttcagtgtttggattggagggagcattctagcatctcttgggtcgttccagcagatgtggttctccaaagcagagtatgaagagcatggggtttcctatattcagagaaagtgcccttgaagcaggggaaggaatatgtacaaccaatattatgctttacgagccttattgttgccaaagggttccttgtgtacaacagcctggtgccttgccatgttggccaatgaatactcgagactcttttcaagtgacgtttgttgtcttcatggctagttaattttaggtgatgtaagaatgagacgggaccccatcttgttctgtaccggggctaattctttgccagcacacaaagagccaagacgattgttgtaactcgggttatttaaatcccagctgcagagcaaatacacaactttaaacgtgtagcgagcaggcagaacaacgatg

SEQ ID NO: 91358 - DNA, 1832 bp, Zea Mays
agaccccctctcgcttcgcccctcctcatcctctctcctctctcccccgccccgttcgtctccggcgagctagggtttgcccccccgccttgccaccccacggttcccgccatccttggatctccagccatgtacggcggagacgaggtttcggcaatcgtcatagatgtgggctcttacagctgcaaggcgggctacgcaggcgacgacacccccaaggccgtcttcccatcggttgttggttcaattgaacaaactgaagacacagatgaccccaagccagagaaggaagctgactctgcatcagattctaagaacggtgccaagcccatggatgtggacaaagccaagacaaaacgcagactttatgtaggccaagagttagagttcaggagggatcacatggaggtgatttcatctatgaaagatggaacggtaactgactgggatattgttgataatatatggaatcatgctttcagacggaggttgttgatcaatcctgaagagcatcctatgctcattgctgaaccatctacaaacactgcacagcaaagagagaaagcagcggaacttatgtttgagaactacaaagtgccagcgctgtttctagccaaaaatgcagtgctcacatcttttgcgtctggacgagctacatctttggtggttgacagtggtggtgggtctactgtggtttctgctgtacacgatggttttgttttacagaagtctgtgtcgacttctccagttggcggtgaatttttaactgactgtatgatgaaaagcttggagagcaagggcatcgtcattaggcccagatattcatttaagaagaaggaaatcagtcctggagaatataagattgtagatcttgatcttccaaacacaactgagagttacaggttgtactgcatgagagctattgctagtgacgtcaaggagtctgtttgcagagttccagacactgcttttgatgaagtggcatatgcaaatgttcctacaacttcatatgagcttcctgatggacaaactattgaagttggtgctgatagattcaaggttcctgatattctatttaatccatctctatcccagactattcctgggattgatggatttgcagattcaataccagtccgtggccttcaacgaatggtcattgatagcgtaaataagtgcgacgttgacatacgaaaagagctattcagtaacatcttgctctctggtgggtcatcatcaattctgcagttaaaggagcgcctggagaaagaagtattggaggagtctcctcaagctgctcgtgtcaaggttatggcaagcggaaactcagtagagagacgtttcagtgtttggattggagggagcattctagcatctcttgggtcgttccagcagatgtggttctccaaagcagagtatgaagagcatggggtttcctatattcagagaaagtgcccttgaagcaggggaaggaatatgtacaaccaatattatgctttacgagccttattgttgccaaagggttccttgtgtacaacagcctggtgccttgccatgttggccaatgaatactcgagactcttttcaagtgacgtttgttgtcttcatggctagttaattttaggtgatgtaaggtgaacgtaagaactaggtcaactaaaatatttatcattgacagtatgctgaatctgtctccccttctgtagaatgagacgggaccccatcttgttctgtaccggggctaattctttgccagcacacaaagagccaagacgattgttgtaactcgggttatttaaatcccagctgcagagcaaatacacaactttaaa

SEQ ID NO: 91359 - DNA, 2380 bp, Zea Mays
agaccccctctcgcttcgcccctcctcatcctctctcctctctcccccgccccgttcgtctccggcgagctagggtttgcccccccgccttgccaccccacggttcccgccatccttggatctccagccatgtacggcggagacgaggtttcggcaatcgtcatagatgtgggctcttacagctgcaaggcgggctacgcaggcgacgacacccccaaggccgtcttcccatcggttgttggttcaattgaacaaactgaagacacagatgaccccaagccagagaaggaagctgactctgcatcagattctaagaacggtgccaagcccatggatgtggacaaagccaagacaaaacgcagactttatgtaggccaagagttagagttcaggagggatcacatggaggtgatttcatctatgaaagatggaacggtaactgactgggatattgttgataatatatggaatcatgctttcagacggaggttgttgatcaatcctgaagagcatcctatgctcattgctgaaccatctacaaacactgcacagcaaagagagaaagcagcggaacttatgtttgagaactacaaagtgccagcgctgtttctagccaaaaatgcagtgctcacatcttttgcgtctggacgagctacatctttggtggttgacaggtgatcattttcttcgcttcattccactaagaagatacttttttctcttatgaaacaatagtccgctttgcccatgttagattggtgaatgcatctttttatgctgcctgcttccattggttcctcctctttattcaatatagaatatacaaactatatttttgcttcattagtcagacacagttgcataggtactattagtccatcattcactccatgggaataaaatgatttgagaaactgaaagttgatgctcttgcccttgttttgtgacaagattctataccgttctatgcccttaccatgattgtcatattggtttaacgtgctagagcatgattgagttaatctgtgcttttgagcttttaggtgtagccatctctgttattttataattttggactgtctcaatttttaactctgccatgtgtttttgggatcacttctcgccttagcagccatttagcccatttaaacggtacacgtaggccagccatgcttgttaaccagcagtctagcctgtttagccatctaaataaggtggccaactatttgacgtttttggttgacaattgtttgggactctgttggtgtaacaaataacaatattatcactggttcagtttgttttattcccgatggcttttgggacctcttcatgagaaacatagctggaatatgataatatggctagttttggtgcagtggtggtgggtctactgtggtttctgctgtacacgatggttttgttttacagaagtctgtgtcgacttctccagttggcggtgaatttttaactgactgtatgatgaaaagcttggagagcaagggcatcgtcattaggcccagatattcatttaagaagaaggaaatcagtcctggagaatataagattgtagatcttgatcttccaaacacaactgagagttacaggttgtactgcatgagagctattgctagtgacgtcaaggagtctgtttgcagagttccagacactgcttttgatgaagtggcatatgcaaatgttcctacaacttcatatgagcttcctgatggacaaactattgaagttggtgctgatagattcaaggttcctgatattctatttaatccatctctatcccagactattcctgggattgatggatttgcagattcaataccagtccgtggccttcaacgaatggtcattgatagcgtaaataagtgcgacgttgacatacgaaaagagctattcagtaacatcttgctctctggtgggtcatcatcaattctgcagttaaaggagcgcctggagaaagaagtattggaggagtctcctcaagctgctcgtgtcaaggttatggcaagcggaaactcagtagagagacgtttcagtgtttggattggagggagcattctagcatctcttgggtcgttccagcagatgtggttctccaaagcagagtaagctcgatatttgataggccctctgttttttctatacttgccctggacacctgatgaggcgtgccatgtgtctcgcgccaggtatgaagagcatggggtttcctatattcagagaaagtgcccttgaagcaggggaaggaatatgtacaaccaatattatgctttacgagccttattgttgccaaagggttccttgtgtacaacagcctggtgccttgccatgttggccaatgaatactcgagactcttttcaagtg

SEQ ID NO: 91360 - DNA, 2582 bp, Zea Mays
aatagtaagctgatattctaccacactatgagcaaaacacatttaacagaacagaagttttccgacttcgccctgcatccgaaggttgtagaagcccttgaaaaaaaagggtttcataactgtacgcccattcaggcactggcccttccgctgacgctggcgggtcgtgacgtagccgggcaggcgcaaaccggtaccgggaaaacgatggcgtttcttacgtcaacgtttcattatcttctctctcatcctgcgattgccgatcgcaaggtgaatcagccgcgtgccttaattatggcaccgacgcgtgaacttgccgtgcagatccatgccgacgcagaaccgctggcggaagctactggcctgaagctgggtctggcttacggtggtgatggctacgacaaacagctgaaagtgctggaaagcggcgttgacattctgattggcaccacggggcgtttaattgactacgccaagcagaaccacattaacctcggtgccattcaggtggtggtactggacgaagccgatcgcatgtacgatctgggctttattaaagatatccgctggctgttccgccgtatgccgcctgcaaaccagcgcctcaacatgctgttctccgccacgctttcgtaccgggtacgtgaactggcgttcgagcagatgacaatgccgaatatattgaagtggaaccggaacataaaacgggccaccgtattaaagaagagcttttctacccttctaacgaagaaaaaatgcgtttgctgcaaacgctgatcgaataagagtggccagacagagcgattattttcgccaacaccaaacaccgttgtgaagagatctggggccacctgacagcagatggtcatcgagtcggtttattgacaggcgatgtcgcgcagaaaaaacgtctgcgtattcttgatgaatttacccgtggcgatctggatattctggttgccaccgacgttgccgcgcgtggtttgcatattccggcagtgacgcacgtctttaactacgatttacccgatgactgtgaagattacgttcaccgtattggtcgtacaggtcgcgcaggcgcaagcggtcactctatcagcctggcgtgtgaagagtatgcattgaatttgcctgctattgagacctatattggtcactcaattccggtaagcaaatacaatccggacgcattgatgaccgatctgccaaaaccgctgcgcctcacgcgcccgcgcacaggcaatggtccgcgtcgtactggcgctccgcgtaatcgtcgtcgttcaggttaaataaaaaatgtcatactcaaaatcattcaaactgtatcaagatggcaagagaatgaatcccgatgagcttactgtagtaagtgattcaggtgaaagaatgcagccaacacagagacagattgaaggatgaagagtatgggttccacctcgtcgctgtatgcagccattgatctcggttcgaatagttttcatatgctggttgtgcgcgaggtggctggaagcatccagacgctgacgcgaataaaacgcaaagtgcgtctggctgctggcctgaatagcgaaaatgccctctccaatgaagcaatggagcgcggttggcaatgtttgcgcctgtttgctgaacgtctgcaagatattcctccctcgcaaattcgcgttgtcgctacggcgacgttacgccttgccgtcaatgcgggtgattttattgccaaagcgcaggaaattctcggttgtccggtacaggtgatcagcggtgaagaggaagcacgtctgatttatcagggcgttgctcacaccactggtggtgccgatcagcgcctggtggtggatataggcggagccagtactgaactggtaaccggcacgggtgcacaaaccacctcgttgttcagcctgtcgatgggctgcgtcacctggctggaacgctattttgccgatcgtaatctggggcaggaaaattttgatgctgcagaaaaagcggcacgcgaagtgttacgtccggttgccgatgaattacggtatcacggctggaaagtgtgcgttggtgcttccggcaccgtgcaggcgttacaggaaatcatgatggcacaggggatggatgaacgcattaccctggaaaagttgcagcaattgaaacagcgagccattcattgcggtcggctggaggaactggagattgacgggctgacgctggaacgtgcgttagtgttcccgagtggtctggcgatcctgatcgccatttttaccgaactgaatattcagtgtatgaccctggcgggcggtgcgctgcgtgaaggcctggtctacggcatgttgcatctggccgtcgagcaggatattcgcagccgtacgctgcgtaatattcaacgccgctttatgatcgatattgatcaggcacagcgcgtagccaaagttgcggctaacttcttcgatcaggtggaaaacgaatggcatcttgaagcaataagccgcgatttgctcatcagcgcctgtcagcttcatgaaatcggcctgagcgttgacttcaaacaagcgccgcaacacgctgcttatctggtgcgtaatctggat

SEQ ID NO: 91361 - DNA, 103 bp, Zea Mays
tctttgttgtttagtgcatgttagcagtggtttagagaatttggtggatgctagcagtggtttagataattgtttgaactcagcagacctgctttatctcacc

SEQ ID NO: 91362 - DNA, 1023 bp, Zea Mays
atggcagttgttaaatgtaaaccgacatctccgggtcgtcgccacgtagttaaagtggttaaccctgagctgcacaagggcaaaccttttgctccgttgctggaaaaaaacagcaaatccggtggtcgtaacaacaatggccgtatcaccactcgtcatatcggtggtggccacaagcaggcttaccgtattgttgacttcaaacgcaacaaagacggtatcccggcagttgttgaacgtcttgagtacgatccgaaccgttccgcgaacatcgcgctggttctgtacaaagacggtgaacgccgttacatcctggcccctaaaggcctgaaagctggcgaccagattcagtctggcgttgatgctgcaatcaaaccaggtaaaggcggtcagctggcacgttccgctggtacttacgttcagatcgttgctcgtgatggtgcttatgtcaccctgcgtctgcgttctggtgaaatgcgtaaagtagaagcagactgccgtgcaactctgggcgaagttggcaatgctgagcatatgctgcgcgttctgggtaaagcaggtgctgcacgctggcgtggtgttcgtccgaccgttcgcggtaccgcgatgaacccggtagaccacccacatggtggtggtgaaggtcgtaactttggtaagcacccggtaactccgtggggcgttcagaccaaaggtaagaagacccgcagcaacaagcgtactgataaattcatcaaggttcgccttgttgctgacctgattcgcggtaagaaagtgtcgcaggctctggatattttgacctacaccaacaagaaagcggctgtactggtcaagaaagttctggaatctgccattgctaacgctgaacacaacgatggcgctgacattgacgatctgaaagttacgaaaattttcgtagacgaaggcccgagcatgaagcgcattatgccgcgtgcaaaaggtcgtgcagatcgcatcctgaagcgcaccagccacatcactgtggttgtgtccgatcgctga

SEQ ID NO: 91363 - DNA, 724 bp, Zea Mays
agctccgaccaccaccacaccaacaccaactcgaccggtctgctagtgttggagagaagagaatacactacagtactacatggcgaagcagcagcagcagggcatggcggcagtggcgctggtagtgctggtggtgctggcgacggcggcggccgagacggcgtcggcggcttcgtgcaacgccgggcagctggcggcttgcgcgccggcgatcacggccggcgcgaggccctccgcgtcgtgctgctccaacctcaaggcgcagcaggggtgcttctgccagttcgtgaagaaccccacctacgggcgctacatcaacagccccaacgcgcgcaaggtcgtcgcctcctgcggcgtctccgtgccgcgctgctagtacgtgtacgtgtgtgcaatgtgcatgcatgtacgtgcgcacgtgggctgatcttcctgcttgtttcgtgccttgccgcgcgctatcaggtggttgtgtcacttttctgtttagtctctctacatgtgtactggtctcgtgtaccgctcctctatagtcgtgtcgtgttgtcgtgtacgggctaattaatatatatatatacgaggaataaaggatgagttcggccacttcgcatcaatcgcaggctatagctgctacgatatcaacaaaggttctggaaaggagccggatggaggaatgtaattcctaccaagtgtcaatgtgaacttgactatgaagccgagcaaa

SEQ ID NO: 91364 - DNA, 255 bp, Zea Mays
tttttgcaattttttataagacaagtcggtcaaacttgaagtaaaaagataaacgagttataaattagagcagatggagtattatggacaatataatacagacaaacttgcgatcaatgcacaataatttgatgaacaaaaacatttatagcaccgtctatttgaacatagacttcgggtacaataagctcgagcaatcataaacaaaaatctaacaccattttatgatcataataatttgtatccaattataaa

SEQ ID NO: 91365 - DNA, 2977 bp, Zea Mays
atgcagcagccggccatgccgcctccattctcgcctgccgcggcgggccagcacgccacgcccatcagcagccgcccgccggagccacacccacacccacacccacagcagcaaggcgacgagctcggcggtgggtcggcggcttttttccggaggcagcagcttggtcgtcgtcttggaccacgacggcggcgcacccgcgggcgacggcgggccttccggcggcaaccggtggccgcggcaggagacgctggcgctgctcaagatccgctccgagatggacgccgcgttccgggaggccgccctcaagggacccctctgggaccaagtctccaggaggctggaggccatgggctacaagcggagcgccaagaagtgccgcgagaagttcgagaacgtcgataagtactacaagcgcaccaaggacggccgcgcgggccgtggcgacggcaaggcataccgcttcttctccgagctcgaggccctccacggcgccgcgccggcggtggcgtcgctcgcgcgtcggcctgtggccatggcgcccgcgccaccaccaccggtcacggccctcgtgggcgcgtccaccggcatggcgccgaccgccttgcatgccgagccaccgccgatgccgcagcctgcagctccggctccaacggggacggggacggggactgggactggcagtgtcactgctaccatcgcgccccctgcaggcgccgccgccagcgacgcggcggcggcggcggcatgcatgatgacgcctggtgacgtcagcttctcctcgggctcggacggggaggacacggatgagaccggcggcggcagcgggaagcggaagcgggacggcggggaggacgaggacggcttcggcggcagcatcagcagcaagatgatgcggttcttcgagggcctgatgcggcaggtgatggagcggcaggaggagatgcagcggcggttcatcgaggccatcgagcggcgggagcaggaccggatgatccgcgaggaggcgtggcggcgccaggaggtggcgcgcctcgcccgcgagcaggacgcgctcgcccaggaacgcgccatggccgtgtcccgcgacgccgccgtcgtctccttcatacagcgggtcaccggccagaacatccccatgcccgtgccctcgcccgtcgcgcctccgccggccttcatcaccgcgctcacgcatgcgccgccgctgcagcccacgccggtcgcttccgctgcaccggcagcgccagccccggcgcaagcgcaacaccaaccgccgccgccagctcatcagctgtcgccgaagaaaccgcaaactgtaatgccgttgacaccacaggcgccccaacaaccgcaggtacagccacgccaggcgccgtcgccgtcgccgtcgccggcgacgcatccgcagggcaataaggagatcgtcgtccgcgctccgccgccggcggagtcgcaggacacggcggggttcggtggcggcgcgccgtcgccgtcgaggtggcccaaggcggaagtgcacgcgctgatccagctgcgcacggagatggagacgcggtaccaggactccgggcccaagggcccgctgtgggaggacatctcgtcggggatgcggcggctcgggtacaaccggagcgccaagcgctgcaaggagaagtgggagaacatcaacaagtacttcaagaaggtgaaggagagcaacaagaagcgccccgaggactccaaaacctgcccctactaccaccagctcgacgcgctctaccgcagcaaggcgctcgcgtcgtcgtcgtccgggcccggtgcagctccggcgctgccgccgccgccgccgccgccgcagcgcccagatcagcaggctgctgctgcggcgccgcccgtcaccgtcgtgctagccccggtgccactgtcccagacggggcctcacggcaacggaaacggcaacggcaatgggtgcgcgggcaggggcagctcggacaatggcggcggcggctccgggggcatgcagaagcagcaggcgagcaacggcggggttgctgccgccaggttctccgccgtggatggcgccggtggcaatggcgttgcgacgaacaagcgagaagaaggcatcgtcaggaaggaggaggcggtggcggcggagacgaggccacagccggtgtcgatgaacgacagctacgtggacagcgacagcagcatggacgacgacgaggaggacgacttttacgatgacgatgatgagggcgacgttggcgacggcgggaacaataagatgcagtacgagatccagttccagcagcagcatcagcatgttcagccgcagcagcagcagaaccagagcggcggcggagtccggccgaacgcgagcggcagcgccggcgctggcgccgggccggcagcgacaacaagtgggtctttcttgaccatggtccatcactagctgcatgcatgcatagatgccaaagcgtacagagcttgctgtacgtacgtgtcctcgatcttgcacaggtaaaaagaaaatggacacaccgaacagcatcaaaaccatgcatttttactcttttcgatccatggacaacaccgagctctttccttgttcatcttttcatatctctggatccaatctaatcctgcacatacacatgcatatgcatgcatagaggacacgtacgtgagattcaccgtacatatacgtatagatggtggtgctatattggaggagaaagctgatgagggtgtggggggtacatatcgtgtgttactgcaatacactacacagtttgttgtatggtacgtacaacaaagactcaaagagacatcttgagctgatggaaacatatacatgtgctcatgcatgcgggaatttctttctttcttcttcttttttcttttttgcacccccttttaagaagagttgttaccgaactgtccattctgtaatttattataaattcgttaattattacaaatactgtggttatattaa

SEQ ID NO: 91366 - DNA, 3603 bp, Zea Mays
cgccgatggatgcccatgctcaccggtcttcccccgccccctcaccgccctattctagctatttagtgctgctagcctagctctactgctacaactacagtaccagtagtacgctactagcctgccctctcctttccgctcgctcgtggtcgcgggcatctcatctccctccctcctcttcctcttctcccctgtgccagccttgtacaactgcctgctcctgtgccactcccaatcccccccttccatccaccaccaccacctcctcccccctccgcccttttctttccccttttcctcacgcccctctttccagtttgtgctgtctgctgtgctgtgctgtgctgtgctcgccggccggctggcctgatctttccaactccccccctctcccccctcctaacctcaccacgcctccagtagcgctagccagcagccacctccatgcgcgctagctagctcctggcacagctccagcttctccgatccacctccataattctgccgtgcggccaccagcagcagctccggccgggaaaggcgcaagattccgccttgggttccttgcgcgcgcgcgggtaattaagctaccttgctagctagcaagctcgctccacgcgccggccggccggcatgcagcagccggccatgccgcctccattctcgcctgccgcggcgggccagcacgccacgcccatcagcagccgcccgccggagccacacccacacccacacccacagcagcaaggcgacgagctcggcggtgggtcggcggcttttttccggaggcagcagcttggtcgtcgtcttggaccacgacggcggcgcacccgcgggcgacggcgggccttccggcggcaaccggtggccgcggcaggagacgctggcgctgctcaagatccgctccgagatggacgccgcgttccgggaggccgccctcaagggacccctctgggaccaagtctccaggaggctggaggccatgggctacaagcggagcgccaagaagtgccgcgagaagttcgagaacgtcgataagtactacaagcgcaccaaggacggccgcgcgggccgtggcgacggcaaggcataccgcttcttctccgagctcgaggccctccacggcgccgcgccggcggtggcgtcgctcgcgcgtcggcctgtggccatggcgcccgcgccaccaccaccggtcacggccctcgtgggcgcgtccaccggcatggcgccgaccgccttgcatgccgagccaccgccgatgccgcagcctgcagctccggctccaacggggacggggacggggactgggactggcagtgtcactgctaccatcgcgccccctgcaggcgccgccgccagcgacgcggcggcggcggcggcatgcatgatgacgcctggtgacgtcagcttctcctcgggctcggacggggaggacacggatgagaccggcggcggcagcgggaagcggaagcgggacggcggggaggacgaggacggcttcggcggcagcatcagcagcaagatgatgcggttcttcgagggcctgatgcggcaggtgatggagcggcaggaggagatgcagcggcggttcatcgaggccatcgagcggcgggagcaggaccggatgatccgcgaggaggcgtggcggcgccaggaggtggcgcgcctcgcccgcgagcaggacgcgctcgcccaggaacgcgccatggccgtgtcccgcgacgccgccgtcgtctccttcatacagcgggtcaccggccagaacatccccatgcccgtgccctcgcccgtcgcgcctccgccggccttcatcaccgcgctcacgcatgcgccgccgctgcagcccacgccggtcgcttccgctgcaccggcagcgccagccccggcgcaagcgcaacaccaaccgccgccgccagctcatcagctgtcgccgaagaaaccgcaaactgtaatgccgttgacaccacaggcgccccaacaaccgcaggtacagccacgccaggcgccgtcgccgtcgccgtcgccggcgacgcatccgcagggcaataaggagatcgtcgtccgcgctccgccgccggcggagtcgcaggacacggcggggttcggtggcggcgcgccgtcgccgtcgaggtggcccaaggcggaagtgcacgcgctgatccagctgcgcacggagatggagacgcggtaccaggactccgggcccaagggcccgctgtgggaggacatctcgtcggggatgcggcggctcgggtacaaccggagcgccaagcgctgcaaggagaagtgggagaacatcaacaagtacttcaagaaggtgaaggagagcaacaagaagcgccccgaggactccaaaacctgcccctactaccaccagctcgacgcgctctaccgcagcaaggcgctcgcgtcgtcgtcgtccgggcccggtgcagctccggcgctgccgccgccgccgccgccgccgcagcgcccagatcagcaggctgctgctgcggcgccgcccgtcaccgtcgtgctagccccggtgccactgtcccagacggggcctcacggcaacggaaacggcaacggcaatgggtgcgcgggcaggggcagctcggacaatggcggcggcggctccgggggcatgcagaagcagcaggcgagcaacggcggggttgctgccgccaggttctccgccgtggatggcgccggtggcaatggcgttgcgacgaacaaggtaatcgatcgatcaagtagcgtgcatgaagaaggcatcgtcaggaaggaggaggcggtggcggcggagacgaggccacagccggtgtcgatgaacgacagctacgtggacagcgacagcagcatggacgacgacgaggaggacgacttttacgatgacgatgatgagggcgacgttggcgacggcgggaacaataagatgcagtacgagatccagttccagcagcagcatcagcatgttcagccgcagcagcagcagaaccagagcggcggcggagtccggccgaacgcgagcggcagcgccggcgctggcgccgggccggcagcgacaacaagtgggtctttcttgaccatggtccatcactagctgcatgcatgcatagatgccaaagcgtacagagcttgctgtacgtacgtgtcctcgatcttgcacaggtaaaaagaaaatggacacaccgaacagcatcaaaaccatgcatttttactcttttcgatccatggacaacaccgagctctttccttgttcatcttttcatatctctggatccaatctaatcctgcacatacacatgcatatgcatgcatagaggacacgtacgtgagattcaccgtacatatacgtatagatggtggtgctatattggaggagaaagctgatgagggtgtggggggtacatatcgtgtgttactgcaatacactacacagtttgttgtatggtacgtacaacaaagactcaaagagacatcttgagctgatggaaacatatacatgtgctcatgcatgcgggaatttctttctttcttcttcttttttcttttttgcacccccttttaagaagagttgttaccgaactgtccattctgtaatttattataaattcg

SEQ ID NO: 91367 - DNA, 559 bp, Zea Mays
atctcgtctacctaacccaccctctggtcttgttcccgccgcccggttgctgcttggcgccgccggctctggagctcggagccgccgccgccgccgccttggcagccgccctggacgacgccgtcgacctcaccagattcttcacctggggaggaggctccgtcgacttcctcttcagcctcgcctcgcgctcggctggcaggctcctcttcctcccaccgttgttagtgttctcttgctcgccgccgccgatggacgcgttcctcgcctcgcctttcctcttcctctcgttgcaagccgcttcaggggcctcaggagtgttctccacgtgagccagctgcttgttcagggagtttgagatcctcaggacgtggttctccttctcgctcatcaccttcgcgtttacaggagtcgcgacgacgacgcgggactccaccactgccgtcatgtttgtgtcctgctctttcgccttgctttcaagttctcttagctgacatgcggagacgccaagctccgggttattcaagatctcttaaataaacgcactactcaattgtag

SEQ ID NO: 91368 - DNA, 909 bp, Zea Mays
atttgatcatctctggaaacaaagaaaaaagcacgcccgtgaaatctccgcgaaacatgtacaaaatttccgaaactacacgacagccgaagcaaagaaggcgccggcggtcaccagaaggcgcgcttccgccggaaacgcctggccgtggcgaggaggccaacgccgaggcacacggcccacacgcccacctccatcgcccaccgcaccgtctccatctcgacctcctgctcctcctcctcctccgcgtccccgaccacctcccacccgtcgtcgtcgcactcgcagcggcaccagccgccgaggcccgtggtggcgtcctcctccggtatcccctccagccgggtggctccgcaccgcatccggccccggccggccgcgcgggccctgtcccgcatcagcacgccgccctccgcgagcaccaccacctccgcgacgcacacctccggcgaggccggcgcccggcggcactccacgcgccaccccccctcgcgccgcgcggagaagacgccctccgccgcgacctcctccccggcggcggcggcgagcacctcgaaccgcgcgccctcggcggcggcgacgcggtcggcgctcgcgtacgcgtcggcggcgacccggcggagcgtgaccttggcgggcgcggctggcgggagcgcgcggccgttgagtcccagcgccgcgcccccgatggccgggtggtaggccagcgtgagctccgcgggcgtcgtggcggagcaggaggagaggcggaggtagaaagcgcggatgtcgaggcgccgggacgggggcgggcggaggaagccgccctctatcgccgtggcgcggcacatcgcggaaaccggtcgctgaaccagtgaacctgcgtcgtcttggtggtgtcctcgtgatcaccgaagcgcaaggcagctt

SEQ ID NO: 91369 - DNA, 887 bp, Zea Mays
cacgagcccaacttgcacccgcaccaccaggctcacagccttacctgatccttgacaattctgctccctcgccgccgccgccgccgccgccgcccgcccgtcgtcgctgcgcttcggtacccgcgaagcaaggccccgcctcccgtgtacccgccgccgaagaagggagaggagcagatgaaagcggggaggaagaacctgcggcgggcgtgcgacgagggcgccgccgtcacgctcgccgagggagagagcatcatgcaggtcctcacgctgcgcggctccaacgtcatcgaggtgatggacggcgtgggcgtcaggtccctggccttgttccccgccaagttccagaagagcttctggatcaagaacgggagtttcgtggtcgtggatgccagcgggagggaccaggcgctggaatcggggagcaagatcgcgtgcgttgtttcgcgagtcctcttccacgaacaagttcgggccctgcagaagtctggtaactggccggccattttcaactcagctccgactccgaatgaagcttcagaggcgggagcagaagcacaggctgcccaggttgacgaggaaccagattccgatgaagaagacgacgatcttccaccacttgaggcgaacacgaacaggaataggccgtatgaattgtattctgattcagacagtggttctgacgcttgaaaagtaccaaggccatccatcctgtgcgttttgtctccaaggtattcgtgatgtgtgaatggaatggctggacctggatggctggattcatatgtgccatgtcatgtatgttagttagcatgctgttattctgcaatggaatctgtgttttctgatactagtcattaagctagatcaaggaagctgggtttgtttcc

SEQ ID NO: 91370 - DNA, 1819 bp, Zea Mays
cgataataaagccctacctctcacatcggcaacaggacgaggccagggcatccacgaccacgacacggacacagggagccgcccgccatgccaccgcacggcggcatgctcgcgtacgccgccctcgcgctcgcggcgctgcggctgctgctgtcctacaagtcggcgctctacgcgctgcgccgcctgtggcggtgcgccgacgagtgggcgcaggcgtaccagtaccacgaggtgccgcgcttcgccggggcccagtgcgggtgcgacggcgcagagaacccgctgttccgcaaggtcgccgcgtacgtggcggcgctgccgtcgctggaggacgccgacgctgcgtgcgtggtgtcgtcggcgtcaaggaccaacggcgggctgtccctgcagctcggcccgggccacaccgcgagggacacgtaccttggcgcgcgcctcgcgtggaccagcgcgggcggcgagcgcctggtgctgcgcgtgcgccgccacgaccgctcccgcgtgctgcgaccttacctgcagcacgtggagtccgtggcagaggagatggagcagcgccgccgcgagctgcgcctcttcgccaacaccgccgtggacgcgaccacgggcgcgccgcgctgggcgtcggcgcccttcacccacccggccacgctcgacgccgtggccatggacccggacctcaaggcccgcgtccgcgccgacctcgagagcttcctcaagggccgcgcctactaccaccgcctcggccgcgtctggcgccggagctacctcctctacggcccgccgggcaccggcaagtccacgttcgcggcggccatggccaggttcctgggctacgacgtctacgacgtcgacctgtctcgcgccgacgccgccggcgacgacctccgcgcgctgctcctgcacaccaccccgcgctcgctcgtcctcgtcgaggacctggaccggtacctgcagggcggcggcggggacgcggaggcgcgcgcggccagggtgctgagcttcatggacggcatcgcgtcgtgctgcggcgaggagcgtgtcatggtgttcaccatgcgcgggggcaaggacgccgtggacgccgcggtggtgcgcccgggccggctggacgtgcacatccagttcacgctctgcgacttcgaggccttcaaggcgctggccagcaactacctggggctcaaggaccacaagctgtacccgcaggtggaggaggggttccacgccgccggcgcccgcctcagcccggccgagcttggcgagatcatgctggccaaccgcgcgtccccgagccgcgcgctccgcagcgtgatcaccaagctccagcgcgtcgcgtccggaggcgccgcgccgccgcggaacccggcgcacaggcggaacacgagctggtccggcgcctggaccggacagcagtgggaggaccaggcccagccggcgcgagccagcgcggtctccgtggaggtcgacgagacggccgccggggcaccggcgacgtgcggcggggtgttcggaaaggaggcgcccatgagggagttcaagaagctgtacgggctgatcaaggtcaggagccggagggagggcgccggcgccgtgccactggaaggcgacgcgcacgggccgccgacgccgggcaaccatgacagggagcggtgatcgccgtggatggtagaattgtagtggtgtgcaaaaagaaagcatttttatttctttctctttttttttcttgttattgttacagtttatcacactactctactaatgtgtcagtgactgcaagtaggaatggcaatagatgaattggatggatcaaaaa

SEQ ID NO: 91371 - DNA, 902 bp, Zea Mays
aaacaccagtatctaacccacacggcccacctgcaccgagcggttgccgccgttaaaccctaccgctgctctcgtcaccatctctccgactcacccctctgtcctcgcaagccgccgccggccaagtcctgtccctctcccttgtctggttcggatcgtcgttgctagccaggtaaatctgactgattcttctccttacctgcttctcccggtgtggatctcggctctcgacgagtttcagaggggttgttcgtaacatctgctaagatccgtggcggctgtttaggtgctggatccgtagcggcggcggcggccatggacaagagcatgctcggcgacctggacggcctccccgaggaggacaagatgcggatggccgccatgatcgaccagctccagatccgcgacagcctgagaatgtacaattcgctggtggagaggtgcttcacggactgcgtggacacgttccggcgcaagaacctggacaagcaagaggagtcgtgcgtccgccggtgcgcggagaagttcctgaagcactccatgagggtcggcatgaggttcgccgagcttaaccagggtgtggccacgccggactaagaaacacgctgccgctggctggctgctctcgttgcgcgcccgccgccaggtttctggctttcgctggcacagatttgtagccgacaaaaggatttcagcacttcccctgcctgagatatatgcgttttagagccgaacgctgggtgtcagattgaataaaaactgccttgagaagtgttgtatttcgtttcatacttgtgtcaacgatttcttcttttttttacgagccacataagtgcggtttttttatatataagctgtttgtttttttttctctcttataagcagcgagcaggcatcctgga

SEQ ID NO: 91372 - DNA, 788 bp, Zea Mays
aaacaccagtatctaacccacacggcccacctgcaccgagcggttgccgccgttaaaccctaccgctgctctcgtcaccatctctccgactcacccctctgtcctcgcaagccgccgccggccaagtcctgtccctctcccttgtctggttcggatcgtcgttgctagccaggtgctggatccgtagcggcggcggcggccatggacaagagcatgctcggcgacctggacggcctccccgaggaggacaagatgcggatggccgccatgatcgaccagctccagatccgcgacagcctgagaatgtacaattcgctggtggagaggtgcttcacggactgcgtggacacgttccggcgcaagaacctggacaagcaagaggagtcgtgcgtccgccggtgcgcggagaagttcctgaagcactccatgagggtcggcatgaggttcgccgagcttaaccagggtgtggccacgccggactaagaaacacgctgccgctggctggctgctctcgttgcgcgcccgccgccaggtttctggctttcgctggcacagatttgtagccgacaaaaggatttcagcacttcccctgcctgagatatatgcgttttagagccgaacgctgggtgtcagattgaataaaaactgccttgagaagtgttgtatttcgtttcatacttgtgtcaacgatttcttcttttttttacgagccacataagtgcggtttttttatatataagctgtttgtttttttttctctcttataagcagcgagcaggcatcctgga

SEQ ID NO: 91373 - DNA, 742 bp, Zea Mays
gtatgtgaagttctgacacattggatttgttggttggtgattctagtcccaaaccaaaaacctttttatcagtgattcgcaactgctgcacccaaaactgctcattgattggttttacagcattttttagatacctaaaaagtgctgacttttggtcaaggcacagatactggagccagaaatgcaagtgttgttatcttgttgcttaaaaagcgtgagaaattattgaatgatcacgtctctgcttgtatcactgtgcgcagcctgagaatgtacaattcgctggtggagaggtgcttcacggactgcgtggacacgttccggcgcaagaacctggacaagcaagaggagtcgtgcgtccgccggtgcgcggagaagttcctgaagcactccatgagggtcggcatgaggttcgccgagcttaaccagggtgtggccacgccggactaagaaacacgctgccgctggctggctgctctcgttgcgcgcccgccgccaggtttctggctttcgctggcacagatttgtagccgacaaaaggatttcagcacttcccctgcctgagatatatgcgttttagagccgaacgctgggtgtcagattgaataaaaactgccttgagaagtgttgtatttcgtttcatacttgtgtcaacgatttcttcttttttttacgagccacataagtgcggtttttttatatataagctgtttgtttttttttctctcttataagcagcgag

SEQ ID NO: 91374 - DNA, 1252 bp, Zea Mays
aaaaataatattaataatatctcatgcagcgtcctcgttctcgctcatttgggcccaactattataacgcaggcctccaaatatccgagaagtccggcccatagtccctctcagaccattggtcgaagctgttggtcggcggcgccagaaatatcagacgcgaggggggacctcttcgcaaaatatatagcccgcaccgaggccaagcctgccgtgccgtgccgtgccgtgcgcgacccaaaccctgtgcagtgctcccatcggattcttgcctcccacgccgccgccgccgccgccgccaccgccggattccgcgatggccgacccgcggccgtactccacgatgtacgggaccgacgaccgacgcgacgccgccatcccggcctccgcctccgagcgccgcctttacaacccgtaccaggacctcaacatgccctaccggcagctctacgacctccccacctccccggagttcctcttccaggaggaggcggccgcgcagcgccggtcctggggcgagaacctcacctactacacgggcgtcggctacctcggcggcgccgtggctggggccacgctggggctccgcgacgccgcccgcggcgccgagcccggcgagcccgccaagatccgcgccaaccgcgtcctcaactcctgcggctcctcgggccgccgcgtcggtaacacgctcggggtcatcggcctcatgtacgccgggatcgagagcgccatggtcgccgcgcgcgaccgcgacgactggatcaacagcgtcgcggccggcctaggcaccggcgcgctcttccgggccgccaacgggccgcgctcggcggtcgtcgccggggccgttggtggcgttctagctggcgccgccgcggccgccaagcaggttgggaagagatacgtccctgcgctctgaatcccattgcggtactctccctgctcttgctgccgtgatcaaagtcaaaaccaattcgtcgcttggatgtcgtttctttaattatttgggaggaggcatgttcttctcaacactcctatatattgttgacagccatatgcttgtactacttatgtcaacgatctgctctcatcagatcacgaaagttttgatctgccttgcaatgtaacattagctgctagctggtagcgacacagtaatactgccttttgcattatgctggagaattcatgacattgtgaaatgtgtcgctagattgtcgccagtgttctatcactatgttttttgccttatatc

SEQ ID NO: 91375 - DNA, 2842 bp, Zea Mays
gggactgccacatctgtttccgtttctaattgcccgtagatgaccaggtgggatcttcataatgaccggggatgttctcccgtgctttgatgcctccaatctatatcttcctgacgatgctgcttgtattgtgacggtgcccaccactctggatgtggctgctaatcatggagtggttgtagcatcaaaggacgctgggatcgatcaggagacctactctctttgcttggttgatgatctcctgcagaagccgacagtgagcgagcttgcagagggccatgccatcctagatgacgggagagcattgcttgacacaggaataatagccgcaacgggtaaagcatggcaggaccttgttacccttgcacattcatctagccattccgtggttaaggagctcatgacttgtaacaaagagctaagcttatatgaggatcttgtggcagcatgggtaccagccaagcatgtatggttgcggaaccgtccattgggcaaggaactgatttctgctttaggaaaacaaaggcttttcagcttttgttcatatgacttttcatttctacattttggcacatccgcggaggttcttgatcacctggcgggttcctattctggacttgtaggtcgaaggcatatgtgttcactaccagagaccactgcttgtgatattgcagcgacagctattattttgtgtacaaagatttcttctggagtctcaataggagaggatacattggtttatgattcagtactttccggtagaatacggatcggctcgcaatgtattattgtctcggtgaatatacgtgagtttgatggtagcgcttgtttcacattacctgatcgacattgcctctgggaagtacctttggcaaactctgcggggagggttttggtttactgtggtcttcacgataatccaaaagtttctattcagaaggatgggacgttctgtggcaagccatggataaatgtcttggaagatcttagaatccaggatacggatctgtggggttcaactagccaggacaaatgcttatggactgcaaagctttttcctgtcatgtctctcccagaaatgcttaatgtgggcatgtggcttatgggatcagaatgcgacccagatgggagaatagcttccttgtggcaaaaatcacagaggatcagcctggaagagctgcatcgtgctattgattacagacaactttgcaccgattcgagcaagcatcaggcaaatcttgcagctgacatagccaaggcttgcatgaactatggcttactcggtcgtaatctgtttcaactttgtgaggaaatgttacaaaaagatacatgtttagcagtctatgaagaattactttcattttttccaagtcacagtgaacagtatcctggggttcttcctcagagcagagaatatcaggtcaagatggatctgcttagagcttctggagatctttccactgcatgtacggtggaagagaaagtgtgggcttccattgcaagcgaaactgcgtcggcgataaaatatggatccaaagagccatctagcggcaagatgtcttcaaaccatgaaagcttgcatccaaggaagactgttgtagaattaccagtccgtgtggactttgttgggggttggagtgatacacctccgtggagcttggagcgtccaggttgtgttttgaatatggcgataagtttgcaaggaagccttccagtcggtgctatgatagagacaacagaggaccaccttggagtaaggatcgaagacgacgctggtagacatgtttatatcgataatctggcatctatttcttctccattcaaagaaagtgatccattccgtctcgtcaagtccgctcttattgttactggaatccttggccacgagatattgtcgaaatcaggcctgaacatcaggacatggtcgaatgttcctcgtggaagtggactgggaacttctagtatattatcagctgctgttgttaagggactgttccaagtgatggaggacgacgaaagtgacgacagtgttgctagagccgtgctagtggtggaacaaataatgggcacaggtggtgggtggcaggaccaaattgggggcctatatcctgggatcaagtgcacccagagttttccaggacaaccgttacggttgcaagttgttccagtgctgaccactcctcagctgatccaggaattagaagaacgtctcctgattgtattcactggccaagtaaggctcgcccaccaagtcctgcagaaagtcgtgactcggtacctccgccgcgacagcatcctgatatccagcatcaagaggctagcggaactagccaagatcgggagagaggcgctgatgaacggtgagctggacgagctcggcggcatcctgctggaggcctggaggttgcaccaggagctggaccctttctgcagcaacaggcccgtggacgagctgttcgccttcgccgacccttactgctgcgggtacaaactggtcggagctggtggcggtggcttcgcgttgctgcttgccaagaacccgagctgcgccagagagcttcgacgggcgcttgaagagtccgacaccttcgatgtgaaggtgtacgattggaacgtcgccatgccacggtgaagagtagctggctcaaagggattgtgtacactgtattgctaccatagacgctgttatcattttttgtgtgtcagacgacctagggtggtggggtggttgtgtgactctgatccaaaagtcggctgttatcaagtgagcaggctgtcggtttggttggcttttccaacgcggtcatgccaaaaaaatcgctgatccaatgtctcgtcaaac

SEQ ID NO: 91376 - DNA, 2814 bp, Zea Mays
gggactgccacatctgtttccgtttctaattgcccgtagatgaccaggtgggatcttcataatgaccggggatgttctcccgtgctttgatgcctccaatctatatcttcctgacgatgctgcttgtattgtgacggtgcccaccactctggatgtggctgctaatcatggagtggttgtagcatcaaaggacgctgggatcgatcaggagacctactctctttgcttggttgatgatctcctgcagaagccgacagtgagcgagcttgcagagggccatgccatcctagatgacgggagagcattgcttgacacaggaataatagccgcaacgggtaaagcatggcaggaccttgttacccttgcacattcatctagccattccgtggttaaggagctcatgacttgtaacaaagagcatgggtaccagccaagcatgtatggttgcggaaccgtccattgggcaaggaactgatttctgctttaggaaaacaaaggcttttcagcttttgttcatatgacttttcatttctacattttggcacatccgcggaggttcttgatcacctggcgggttcctattctggacttgtaggtcgaaggcatatgtgttcactaccagagaccactgcttgtgatattgcagcgacagctattattttgtgtacaaagatttcttctggagtctcaataggagaggatacattggtttatgattcagtactttccggtagaatacggatcggctcgcaatgtattattgtctcggtgaatatacgtgagtttgatggtagcgcttgtttcacattacctgatcgacattgcctctgggaagtacctttggcaaactctgcggggagggttttggtttactgtggtcttcacgataatccaaaagtttctattcagaaggatgggacgttctgtggcaagccatggataaatgtcttggaagatcttagaatccaggatacggatctgtggggttcaactagccaggacaaatgcttatggactgcaaagctttttcctgtcatgtctctcccagaaatgcttaatgtgggcatgtggcttatgggatcagaatgcgacccagatgggagaatagcttccttgtggcaaaaatcacagaggatcagcctggaagagctgcatcgtgctattgattacagacaactttgcaccgattcgagcaagcatcaggcaaatcttgcagctgacatagccaaggcttgcatgaactatggcttactcggtcgtaatctgtttcaactttgtgaggaaatgttacaaaaagatacatgtttagcagtctatgaagaattactttcattttttccaagtcacagtgaacagtatcctggggttcttcctcagagcagagaatatcaggtcaagatggatctgcttagagcttctggagatctttccactgcatgtacggtggaagagaaagtgtgggcttccattgcaagcgaaactgcgtcggcgataaaatatggatccaaagagccatctagcggcaagatgtcttcaaaccatgaaagcttgcatccaaggaagactgttgtagaattaccagtccgtgtggactttgttgggggttggagtgatacacctccgtggagcttggagcgtccaggttgtgttttgaatatggcgataagtttgcaaggaagccttccagtcggtgctatgatagagacaacagaggaccaccttggagtaaggatcgaagacgacgctggtagacatgtttatatcgataatctggcatctatttcttctccattcaaagaaagtgatccattccgtctcgtcaagtccgctcttattgttactggaatccttggccacgagatattgtcgaaatcaggcctgaacatcaggacatggtcgaatgttcctcgtggaagtggactgggaacttctagtatattatcagctgctgttgttaagggactgttccaagtgatggaggacgacgaaagtgacgacagtgttgctagagccgtgctagtggtggaacaaataatgggcacaggtggtgggtggcaggaccaaattgggggcctatatcctgggatcaagtgcacccagagttttccaggacaaccgttacggttgcaagttgttccagtgctgaccactcctcagctgatccaggaattagaagaacgtctcctgattgtattcactggccaagtaaggctcgcccaccaagtcctgcagaaagtcgtgactcggtacctccgccgcgacagcatcctgatatccagcatcaagaggctagcggaactagccaagatcgggagagaggcgctgatgaacggtgagctggacgagctcggcggcatcctgctggaggcctggaggttgcaccaggagctggaccctttctgcagcaacaggcccgtggacgagctgttcgccttcgccgacccttactgctgcgggtacaaactggtcggagctggtggcggtggcttcgcgttgctgcttgccaagaacccgagctgcgccagagagcttcgacgggcgcttgaagagtccgacaccttcgatgtgaaggtgtacgattggaacgtcgccatgccacggtgaagagtagctggctcaaagggattgtgtacactgtattgctaccatagacgctgttatcattttttgtgtgtcagacgacctagggtggtggggtggttgtgtgactctgatccaaaagtcggctgttatcaagtgagcaggctgtcggtttggttggcttttccaacgcggtcatgccaaaaaaatcgctgatccaatgtctcgtcaaac

SEQ ID NO: 91377 - DNA, 3477 bp, Zea Mays
ctccggtagaactagaagagagactaacccagctgcggcccgatccgagtccgggggcccaaggcgcgggaggcgacggcgatggacgcgcgcccgcgacggcggagggcgcgcacggcggaggaggcggcggcgacgctgcgaaaggcgtggtgccggctgcggctgtccgcgcgcgacccggcgcgcgtgccgccctgggacgccgtcgtgctcacggccgccagccctaagcaggccgcgctctacaaccgccagctcgagcgcgcccgcgccctcggccgcttcccggcctccaccgcggccatcgccgtccccgaccccgacggcgcccgcatcggctccggcgccgccacgctccacgccgtcgctgcccttgttcgccacctcgccgcccaggcttccaaggaagagatcggcgaattccttctcgaaggcggaaatggtggttcgggggatgaggccacgatcgccgcggcagcgggattcatggcgaagaagcacgtgctcttgcttcacgccgggggcgacagcaagagggttccgtgggcgaaccccatggggaaggcgtttctccctctgccttacctggccggggacaatcccgatggacctgttccgctcctgttcgatcacattcttgccatctcctccagtgcaaggcaagctttcaacaaccaaggtgggatcttcataatgaccggggatgttctcccgtgctttgatgcctccaatctatatcttcctgacgatgctgcttgtattgtgacggtgcccaccactctggatgtggctgctaatcatggagtggttgtagcatcaaaggacgctgggatcgatcaggagacctactctctttgcttggttgatgatctcctgcagaagccgacagtgagcgagcttgcagagggccatgccatcctagatgacgggagagcattgcttgacacaggaataatagccgcaacgggtaaagcatggcaggaccttgttacccttgcacattcatctagccattccgtggttaaggagctcatgacttgtaacaaagagctaagcttatatgaggatcttgtggcagcatgggtaccagccaagcatgtatggttgcggaaccgtccattgggcaaggaactgatttctgctttaggaaaacaaaggcttttcagcttttgttcatatgacttttcatttctacattttggcacatccgcggaggttcttgatcacctggcgggttcctattctggacttgtaggtcgaaggcatatgtgttcactaccagagaccactgcttgtgatattgcagcgacagctattattttgtgtacaaagatttcttctggagtctcaataggagaggatacattggtttatgattcagtactttccggtagaatacggatcggctcgcaatgtattattgtctcggtgaatatacgtgagtttgatggtagcgcttgtttcacattacctgatcgacattgcctctgggaagtacctttggcaaactctgcggggagggttttggtttactgtggtcttcacgataatccaaaagtttctattcagaaggatgggacgttctgtggcaagccatggataaatgtcttggaagatcttagaatccaggatacggatctgtggggttcaactagccaggacaaatgcttatggactgcaaagctttttcctgtcatgtctctcccagaaatgcttaatgtgggcatgtggcttatgggatcagaatgcgacccagatgggagaatagcttccttgtggcaaaaatcacagaggatcagcctggaagagctgcatcgtgctattgattacagacaactttgcaccgattcgagcaagcatcaggcaaatcttgcagctgacatagccaaggcttgcatgaactatggcttactcggtcgtaatctgtttcaactttgtgaggaaatgttacaaaaagatacatgtttagcagtctatgaagaattactttcattttttccaagtcacagtgaacagtatcctggggttcttcctcagagcagagaatatcaggtcaagatggatctgcttagagcttctggagatctttccactgcatgtacggtggaagagaaagtgtgggcttccattgcaagcgaaactgcgtcggcgataaaatatggatccaaagagccatctagcggcaagatgtcttcaaaccatgaaagcttgcatccaaggaagactgttgtagaattaccagtccgtgtggactttgttgggggttggagtgatacacctccgtggagcttggagcgtccaggttgtgttttgaatatggcgataagtttgcaaggaagccttccagtcggtgctatgatagagacaacagaggaccaccttggagtaaggatcgaagacgacgctggtagacatgtttatatcgataatctggcatctatttcttctccattcaaagaaagtgatccattccgtctcgtcaagtccgctcttattgttactggaatccttggccacgagatattgtcgaaatcaggcctgaacatcaggacatggtcgaatgttcctcgtggaagtggactgggaacttctagtatattatcagctgctgttgttaagggactgttccaagtgatggaggacgacgaaagtgacgacagtgttgctagagccgtgctagtggtggaacaaataatgggcacaggtggtgggtggcaggaccaaattgggggcctatatcctgggatcaagtgcacccagagttttccaggacaaccgttacggttgcaagttgttccagtgctgaccactcctcagctgatccaggaattagaagaacgtctcctgattgtattcactggccaagtaaggctcgcccaccaagtcctgcagaaagtcgtgactcggtacctccgccgcgacagcatcctgatatccagcatcaagaggctagcggaactagccaagatcgggagagaggcgctgatgaacggtgagctggacgagctcggcggcatcctgctggaggcctggaggttgcaccaggagctggaccctttctgcagcaacaggcccgtggacgagctgttcgccttcgccgacccttactgctgcgggtacaaactggtcggagctggtggcggtggcttcgcgttgctgcttgccaagaacccgagctgcgccagagagcttcgacgggcgcttgaagagtccgacaccttcgatgtgaaggtgtacgattggaacgtcgccatgccacggtgaagagtagctggctcaaagggattgtgtacactgtattgctaccatagacgctgttatcattttttgtgtgtcagacgacctagggtggtggggtggttgtgtgactctgatccaaaagtcggctgttatcaagtgagcaggctgtcggtttggttggcttttccaacgcggtcatgccaaaaaaatcgctgatccaatgtctcgtcaaac

SEQ ID NO: 91378 - DNA, 952 bp, Zea Mays
agcgaatcgggtccgttaatctgcaccggcctctccctcccatccggcgttggcgaagccgcgcgtcgacgagaggggcggagtcggcgacgagcagatggccggaggcggccccgccgcgtcggcgctttcaagcccctggagggctctgctccagcgagcgctggacgccaacgcccacctcaggcactccacctacttccaactcgctacggtgggcgccgccggcaggccggcgaaccgcaccgtcgtgttcaggggttttcaggaactctgtgataagattcagattaacacggacgcccgaaccaacaagattggtgagatcaagagctgcccctttggtgagatttgttggtacttcacagatagctgggagcaattccgtatcagtggcagcatagatgtgattgatgcttctactacagaccctgccaagctccagcacaaggagaaagcatggttttcaagttcagtgaagtcgagatcgcagtacttaggaccacagccaggcattccggttctagatgatgagcatgttaaggacgttcatctcgatcctttagctggcccagtagatgccttttgccttctggttcttgatccggaaaaggttgattatttgaatctgaaaagcaatcaaaggttgatctttacaagaagacaaaaggatgatggatccaatgattggatggcagtaaaagttagtccttaagctgctgcaaaaactttatttgtgagcttctcttggtaactagactatcatgattcttctgtgttttcatatcatttgaaatgttaggtgcatatcattatgtatatttgagaggccttttcatagtcatacatttatatattgggaatgctttgtaatctcagggatttgttattttttgttaccctcaaatatagaagataaagactgtaaggtatttaggaaggagtcaaagca

SEQ ID NO: 91379 - DNA, 3594 bp, Zea Mays
ctcccaccatcatcacccatccgccatcgcccggccccgcctctctctctctcctccgtccccctcgtcgtcctctgctttttattactcttctccactcattagcttttggttgttgttggttggttcccttcttgcgagttgcgagaacccaccccacccccaaggcgacgacacacacacagagagaggcaagggacggagagggcgaggacgccagccgcagtgggcgcgccacaagcggagcggggggcgcacgcacgcacgcgactctcccgagatccaagacccgcgagatccgcttgccctcgtcgccagccagagcccggagcggatacgtgtccatggcggccggagaggagcaagaagagttctttgactccagggaggtgctgtcgccggcgtccgtctcgtcgtcgccgtcgagttccggtcgccacgacgacggcgggtggctcttcgcccagcagctgctcgaggtctgggtccgggacccgggcagcgtccacgagcgccgccagaggttcgtcaagtccctgggcctcatggatccgagcccccacggcgcgcggcccggcgaggagacgtgctcgaggcctgaggccagagaagaaatcctaccggcaagccccagcaccgagctgttctcggccgtccctacctttgcgagcatgggaggggagccgacagcctccggcggcgacggcgctggcacggaagaggagccggagtgcgtgttcaagaacctggacgatggcacagtgttcgtggtcgacgagatgggaaaggacgggagcttccggagcctcagggagaggctctccaaccggacagtaacagctgcagaattcgagcaggcctttggctcatcacctttcatccgtgagctgatgaggagggtggacgattccgacgaaccctccaccccggagaagactgtgctgaggagaaggaggcggcggcggattgggtggctacgaaggctgggcatcggtgtctgtgttgtcgacgccgacgcagaggaggaagacgatgaggtcaattcgacatcatccacttcttcccggggttgctctaggaaggttgatagggtcaaggtgagaccttacaagaagcggtcaaaggaattatctgcagtgtacaagggccaagtcatcaaggcacatgaaggtgctattgtgaccatgaagttcagctccgatggccagttgctggctactggaggtgaggatggggttgtccgcgtttggcgggtggtggaaggcaagaggcctgatgaccgtcattttgttgacgatgatccttcatgtgtgttcttcactgtcaatgaaaattctgaattggctcccatcaattcctgcgaagggggtaagggcaagcacaataacagctcaaaggtggctactgatccagcttgtgttgtgattcctcaccagacctttgcgctatccgaggaccctgtgcatgaattccgtgggcaccatgatgccatcttggatctttcatggtcaaaaaatagggaattgctttctgcgtccaaggacaaaactgttcgattatggaaagttgggtgcgatagctgcctgaaggttttctcccataataactatgtgacatgtgtacagtttaaacctaccaatgacaattatttcatcagtggttgtattgacgggatggtacgtatttgggatgttcctagatgcctagttgtggactgggctgacagcaaagagataattacagcagtttgttaccgtcctgatggaaagggtgcagtggttgggacaataacaggaaactgccattgctatgaagcatcagaaaaccatctagcactggagtcacaagtccccctgtatggcagaaagaaatctccacttaaaagaatagttggattccagtattgcccatctgatccaaagaaactgatggtgacatctggtgactcacaagttcgcattctcgatggggctcatgtcgtttccagctacaaaggattacgaagtccaagtcaagtccctgcagcatttacaccagatggagatcacattattgctgctagcgatgactctagtatctatatgtggaattatgcaaaccaacttgccccagtcacgagccgtgtgaaaaccgtatggtcatatgagcacttcttctgcaatgacgtgtccgttgcaataccatggaacgccttgcctgcaaggagttctatttctcttgcttgcaacatccccctttcacggcaagaggtctctgaggagctccacaactcgcaagagtctgtgtcatgctgcagtgctgaaggctcacctaaagctgatagctcgtgccggctgccatccggcaatttcactcttagcaatgcattctccgcggagttggcaccaagggggaaagcaacatggccagaagagcagctgccatcatctgattcagtgacaccgtcgtcgtcgtctgctttgcgtaaatctcagtataagttcctgaagacttcttgccagagtgccgccacgcatgcctggggccaggtcatagtcactgcaggttgggatggaaacatcaggtcgttccagaactatggtttacctatgcaagtgtgacacatggtacaagacatgcatctctttgctaattgcttggtcagtggggtatcccaggaatggcagacgagaagtcgcttgcggaacttttacgcctccaggaacttggtttgctgaagggcgacgccccgtccagattatggttacagtacaaagagtttacatgggtgtgtggctgtgctgtgttgctcgtggaccagaagttgtatgtagtccagtggtcctgcgagatctcggcggcacattgcgagagaagggccggggaagatggatcccctcgcagacccaactaactttgcgcgaagagtggttgtatggctgcaatttcattgcattgctgtttgctgcttttctttgttttggcctccctttggggggatctgcagtaaatatatatagagtggatggatgaacatattttgtttgctcgattgagttcccctcgccctgatgcaaggcgagcgggggaggtagttgagatcactgttggatagggatgcacatactggattcatttcatttgttcatcacatcacatgccgccgccaccattcatatcatggcctgcctgcctgcctgcctttatggcagcggagctgtgcgcagctgatgcttccgttttccctgtgttgagactcacgccattgcccattgctgctttgccttgcggtggagggcatctggacatggggtcaggtggctgtggcctgtgggggacctctgtgcagcgcaggcctttctggatagggctggtgcagttggtcctgatgggttttcctcctagcgccagggagcgtagcggcctgggcgtgggaacatggggggactcatggccatggctgtttcagagctggctgggggccatgtgcccagatcttggccttttacgctcctgcgtcgttctgttccttttcttagatcctccgcatctttggtgtgatctgcgtcggccaagaagttgacattgtataatttcactctttctttccctttt

SEQ ID NO: 91380 - DNA, 219 bp, Zea Mays
tgcgtcggtgcgtgcaggaggtcgaaacgagagcccgtccggcccaggttacttgccctcggtcagtaaggcccacacgtgttcttgttccgggccttacagctcggcaggctctgggcgagattcaagaggttgaactcgaaccaagctaaacccagtctttagggctccttcagaccagacatctcctcttcacgtttcttcaaaaaaaaaaaaaaa

SEQ ID NO: 91381 - DNA, 2405 bp, Zea Mays
gctagcggcggtacggtagagtttggccgcttggcatttgcccatgggagacggagacggagggagacgcaccacgtgaccttgttttgcaccagctgtaccaaacaatccccttctccgctgccgtcggtggtgtggttcgcctcccactcacgctaccagctgggctgggagggactgggccaaaccaagaccatcccatacctcttctcccctgccggtggtgtggttcacctcccacttactcactcactcactcgcggacactgccacaaacttccgccccagatctccgtatataacacgccggcggcccgtccgtccgggctcctgactccggatccaccgccgccgcgccgcactctccctctcactccaccgccgaagtactccccgcctgccactgccagcctgtgcctgcacaaaagcaaaaatggcgccttggccgcggcggcccgtgctgacgctggtgctgctcctgctgctcgcgctcctgtgctcccatgtcgcgctctgctcctccgccgaaccggggaaacccaagcccaagcccaaggtctccggcagccgcaaggcgctgcttgcggacaacgacggcgacgaggtgcccgccgccaagccgggcaagtcggccgcggcggggaagaccaaaaagaagctgctcgccggcgacgccacttccaagaaccagaccaaggttgccaaggctaagaagccagagtcagctgccgcggcgaaaggggccgccaagaagcccgctggcaaagcggctgcggctgcgggtggtgacgccgccattgccaaggtctccaaggcccccaagacccccaaggcggacaaggccaaggtgccgaagccggacaaggcggcgactgcggcggcggctggtgccaagaccaagggcgccgattcggccaagcctgccaaggtttccaagacgggcgccaaggcggtgaagccgcccaagacggccaaatctgaggctgccaccgcggttgggaaggcaaagaaaccgccgccggcaaattcgaccgtggatgccggtgccaagacggccaaatccggcaagaaggctccggtggtcgtcgacgccgaggtgaaggcgaatgcgaccgtcgtgagcaaggagaagtcagcggcgacggagacggtggagatggaggatgaggaggaggtggtgttggccaaggaggcgggggagggcacggacgatctcatctccgaattccgggacctacccagtcggctgcaggagacgctgatgccggacctggcgcgcctctcgcaccactccaaggcgtacctgtccgcggcgaacgccgggatcgccgacggcgtgcgcccgatcctgggcggccggtgggcggcggtggccgcctccgcggcgtcggtggcggtgctgctgctgccgctcttcatgctcaccgcgctggtgcgccggatgggcccgtacctgccgctcctccaccgcgcgctgctgctggcgcaggcgtacctcgccatctactttgccacgctcgcgctcgccgcggccgccacggggctggagccgctgcgcttcttccacgcggcctcccccgccgcctacgcctggacgcaggccgcgcagtccctcggcttcatgggctacctcgtgctccagatggtggacctcgttgctgtcttctcggacgccgcctcccccgaggacgaaggcaacggggacgctgccaaggcgctcggccttgcgcagatggtggtgggcctcgccgtcggtctgcactactacgccgccgtcttccaccgcgcggcggcgggagaggcgccccgcgccaactggcgcgtctacgccgtgtacgccgcctgcttcgccatcgtgtgcgcctgcgcgcgtgccgagaggaggaagaaggcctacctcgcgggcaccgacggcgccgcggaggagtggaagaagagctgagctgcttatctcaggatacacgactagatcagaattcgggactcaggttttaccacttctgcggccattgaagatctatatagttcgtttcacttggaccaagcctgcaacgcaaatcccatgacctgcgagtgcctccaccagcgatttgttcgtgagctgacagcgtcatccatgctgcttgcttcatgctctcgatccccagcctcccagtctcacttggaggctgctacaactggcaataggatcagcacagtggcatgtgtggccttttggtgacaacgtagtgaccaaactcggtgacgacatgcttaccggcaacagaattcggtttgccaataagaaatatatccagcacatcagtggtgacaacatagtgaccaaactgaccagatgtcttgttgaacagtgatcctaaatatgagccccaaacagatggattacctgagcatggaactaatta

SEQ ID NO: 91382 - DNA, 2505 bp, Zea Mays
gggaggatcaccacttcaccagaccaataccaaaagtcacattacaacttcagctctcgaaaattgacaacatcgcaaatgtacagaaacagttatcactcatttgagctttcagcatgaagcaaatattagacaaacatgtcgtgtgccgctcaatagcaacaatatgcttaatccaaggaacatcatggctaatgttagctagtagtacaaggttatatcataccgtgcaacgattttacaagccaatatactacaccaatttattcacggaaacatggtgggccgttatatttcgaaaaaccgcggactcttcaaaattatacctcgctactgggtatcctttgctcccaacaaaaaaaaaagtaccagaaacccccaaaggagatgtgcttgcttacttccatgtggacaaatcacgaatttactctcgagattcacccgttgctttagccctgatctcaagatctctgatacggtcacataacacagaactcgactgctcactttccttgtccaccataggagaattgacttcaggactcaccgcaggactcgactgctcacattccttgtctgctataggagaatcgactccaggacttagcacagaactcgactgctcagtttccttatctgtgataggagaatcgactccaggacttggctctggtccgcccgataggtttaagggctggacttctgcagttgtgggctgagattccaagcgaggaagatttaagaagagtcttacagccggattccggagaacagcaccgtaaacaagtgagaaaaagtttgatgtgacccagtaaaagaaaattgcctgccaaagaaatgaaagattaatggcagcgcaaatgcatgagttgtggtgttatagttccacaagacatcaaagctgagcatatttgacatgagatgaatagtagattttggattgccctcagcataagcataaatttatttggaagtgagaacaacaggcacactcggcactacaaagtatgaactgcccttaaggttaccaccagcatttcattcagcgcagcatattttgacaccattttggagtaaaacaattggccatagttcctagagcagtagcaaaacaaaaatacatgcgccaaatctaaaatacaaaagagacttgttcgaggaaaaaaacaaaaaagactacctctctaactctcagatgattttaaggattcaatacacctcaccttaagttcaggtgtcgtgcatcttaattttgaatgtattaacaaaagtaggcagccacaacttcctgtcatggtgtctgatagtagataactatagacaaccctaattcagattagtactgagtacattttcccaggcaaggtataacctagtcagtttccgaaaccaaactgtctgcacaagaataggttatggaagtacataatcaaagaagcccatagaatgttcatttatttagtttgagaaggccacatctagcgtttaggagggggtagccagaatgagaacttgatgttattcaaaaaaaaatgaacccttaaatgtaatttcttataagggcctgtttggatcctttcattttggaacaaatggaatctacttcatagactaggctatttggcttggaatttgacatttcacaacttttcatagtttagataataagcttgtcttaaattcatgggatgagtatgtttctattctgtaacttatagcatgctctttggcttgctcctctacaacagaactgcaggacataagtatctcccccatgtggctaatgacagtacacaagtatattccgcatgtggccatattaacttaattggtctgtgtctaaattgtgtttattagaatggatgtcaattccaaggatccaaatggggccaagtgttttcagagttttgtacctctggaaagttcattgtaaataaagggaaacataacagtgaattgatgcttacttaaaaacctgagtagtttcacggttacgtacctttggaaagcctattgtaaatggaacaaacaaaactccaaaaaaccgggagaactttttcattggttttaacatatgattcccttccatgccatcttgcatattaagctgaaacatatatttttaggaaaaaaacactaatatcttgacaacaaaataacagataaacacagtgaataaaatgcaaacctctactgtagccaaaaaggtcagtgatgttaacactgggaggattaataaattatcaggagttgtcaaatcagtaaaccaatacacaccacctcctttcatagaagggactttctcaaccatatttgatatctaaaattgaaatagaaaacatatagattagaaataagaaataaggttaattctactgctacatgaaataataagtcggtgacaatgcaattgctgattagtattttagatgcaacaatgatgtggtgtaaactataaacttacagcaaagaaaaagctcataaatataggtccctgtatgaata

SEQ ID NO: 91383 - DNA, 1171 bp, Zea Mays
tttcagcatgaagcaaatattagacaaacatgtcgtgtgccgctcaatagcaacaatatgcttaatccaaggaacatcatggctaatgttagctagtagtacaaggttatatcataccgtgcaacgattttacaagccaatatactacaccaatttattcacggaaacatggtgggccgttatatttcgaaaaaccgcggactcttcaaaattatacctcgctactgggtatcctttgctcccaacaaaaaaaaaagtaccagaaacccccaaaggagatgtgcttgcttacttccatgtggacaaatcacgaatttactctcgagattcacccgttgctttagccctgatctcaagatctctgatacggtcacataacacagaactcgactgctcactttccttgtccaccataggagaattgacttcaggactcaccgcaggactcgactgctcacattccttgtctgctataggagaatcgactccaggacttagcacagaactcgactgctcagtttccttatctgtgataggagaatcgactccaggacttggctctggtccgcccgataggtttaagggctggacttctgcagttgtgggctgagattccaagcgaggaagatttaagaagagtcttacagccggattccggagaacagcaccgtaaacaagtgagaaaaagtttgatgtgacccagtaaaagaaaattgcctgccaaagaaatgaaagattaatggcagcgcaaatgcatgagttgtggtgttatagttccacaagacatcaaagctgagcatatttgacatgagatgaatagtagattttggattgccctcagcataagcataaatttatttggaagtgagaacaacaggcacactcggcactacaaagtatgaactgcccttaaggttaccaccagcatttcattcagcgcagcatattttgacaccattttggagtaaaacaattggccatagttcctagagcagtagcaaaacaaaaatacatgcgccaaatctaaaatacaaaagagacttgttcgaggaaaaaaacaaaaaagactacctctctaactctcagatgattttaaggattcaatacacctcaccttaagttcaggtgtcgtgcatcttaattttgaatgtattaacaaaagtaggcagcc

SEQ ID NO: 91384 - DNA, 210 bp, Zea Mays
atggtgggccgttatatttcgaaaaaccgcggactcttcaaaattatacctcgctactgggtatcctttgctcccaacaaaaaaaaaagtaccagaaacccccaaaggagatgtgcttgcttacttccatgtggacaaatcacgaatttactctcgagattcacccgttgctttagccctgatctcaagatctctgatacggtcacataa

SEQ ID NO: 91385 - DNA, 170 bp, Zea Mays
ttgccagcggtccaccatggatgaccatgcaacagtggagcacaacaagcgtgcatccgagtaaagaaacaatcaaacgatgctgcgagagaaactcaagtcctagaagtaccacctagcaatcttgtatggactcatatgtaccacctccaagcatttaagagttatgt

SEQ ID NO: 91386 - DNA, 1824 bp, Zea Mays
gcaagccacggcccacggcatcgtcgcctccctccctcccttctcggcgtctcctctgattccttcctctcctctcgccccacgcccctctccatctgctcccgctccgcctcgcctagggttttgcccccaaacctagcctcccccgaatctcccacgccatggacgtcgagggcgaggtccccgccgccgccgcggcggcggtggcgaacggcctgggcggcgcgggcgcggaggaggcctctccggcgccggtctcggctgagcagctcgacgtggaggcgtacgcggcgcagtactcggggcggacccgcctcgtgcgcctcctctttgtcgccgaccggtgcggggtggaggcgatgcagctcgaggcgctgcggatggcttacgacgagatcaagcgcggggaggacgtgcagctccaccgcgacgtcgtcaccaagatcggcggccgcctcggtccgcgctacggcctcgaccaggcgtgggtcttcagcgtctcccgccgcgccgaccagcgcaaggagaagctcgagagcgagctcaatggatacaggactaacttaatcaaagagagcatcagaatgggctacaatgacattggtgatttcttctatgcccatggccaactttcagatgctttcaaaagctacatcaggactcgggactattgcaccacttccaaacatatagttcagatgtgcatgaatgtgattctggttagcattgagctggggcaatatgcacatgtttcaaactatgtcagcaaagcagagcaaacccccgactctctggatcctaccattgttgcaaagctgaaggcagctgcaggattagccaacttggaaacaaagaaatacaaatttgctgctcgtaagtttgttgagacaggaattgaactaggaaacaacttctctgaagtcatagctcctcaagacgtggcagtctatggtgccctttgtgcacttgcttcttttgaccgttcagacctgaagagcaaagtcattgacaatatcaacttccgtaactttctggagctggtgcctgaagtaagggagctggttaatgatttttatgcaagtcgctatggatcttgcttgggtcatcttgagaagctaaagcctaacctgctcctggatatccatttgcatcagcatgtagagactctgtatatggagattcgccacaaagcgatcatacagtacacacttccttttatatctgttgacctcaacacgatggcagccgcctttaagacttcggtctccatgctgcagaaggagctggccgcactgattactgaggacaaaatacaggcccggatagactcccacaacaagatcctttacgcaaggcatgctgaccagagaaatgcaactttccagcgtgtccttcaaaccggcaatgactttgagagagatgtcaagtccatgcttctgcgtgccaacctcctcaagcatgattacattcagaagacaagcggaccaaggaagatgtaaagattgcgggcgtcgctgctaggcaaggcttcctgctgcatgcctctccacttttttttttgaagaattgttctgtgacataaaagggaccgaagtctgtctaaatgccctccccctctttctttttattggttgatgaaagttattgtcgaagtaatgtatggttgagcatctggatgtgattatttgtcatgctcgttttctaggcaagatttagttttgaacttgccgggtacctaggaaaggggtacccaaggcgaggcccataaacctctctctggcctatttaccgaccaagttcttgtcgagcaagtcttcgaggcgg

SEQ ID NO: 91387 - DNA, 1798 bp, Zea Mays
gcaagccacggcccacggcatcgtcgcctccctccctcccttctcggcgtctcctctgattccttcctctcctctcgccccacgcccctctccatctgctcccgctccgcctcgcctagggttttgcccccaaacctagcctcccccgaatctcccacgccatggacgtcgagggcgaggtccccgccgccgccgcggcggcggtggcgaacggcctgggcggcgcgggcgcggaggaggcctctccggcgccggtctcggctgagcagctcgacgtggaggcgtacgcggcgcagtactcggggcggacccgcctcgtgcgcctcctctttgtcgccgaccggtgcggggtggaggcgatgcagctcgaggcgctgcggatggcttacgacgagatcaagcgcggggaggacgtgcagctccaccgcgacgtcgtcaccaagatcggcggccgcctcggtccgcgctacggcctcgaccaggcgtgggtcttcagcgtctcccgccgcgccgaccagcgcaaggagaagctcgagagcgagctcaatggatacaggactaacttaatcaaagagagcatcagaatgggctacaatgacattggtgatttcttctatgcccatggccaactttcagatgctttcaaaagctacatcaggactcgggactattgcaccacttccaaacatatagttcagatgtgcatgaatgtgattctggttagcattgagctggggcaatatgcacatgtttcaaactatgtcagcaaagcagagcaaacccccgactctctggatcctaccattgttgcaaagctgaaggcagctgcaggattagccaacttggaaacaaagaaatacaaatttgctgctcgtaagtttgttgagacaggaattgaactaggaaacaacttctctgaagtcatagctcctcaagacgtggcagtctatggtgccctttgtgcacttgcttcttttgaccgttcagacctgaaggtttgccatttcagtacttatttgtcttgtggaatgtgttccattttatgccactgttctcgaaatgtgattgcttgcgcattttgcatagagcaaagtcattgacaatatcaacttccgtaactttctggagctggtgcctgaagtaagggagctggttaatgatttttatgcaagcatgtagagactctgtatatggagattcgccacaaagcgatcatacagtacacacttccttttatatctgttgacctcaacacgatggcagccgcctttaagacttcggtctccatgctgcagaaggagctggccgcactgattactgaggacaaaatacaggcccggatagactcccacaacaagatcctttacgcaaggcatgctgaccagagaaatgcaactttccagcgtgtccttcaaaccggcaatgactttgagagagatgtcaagtccatgcttctgcgtgccaacctcctcaagcatgattacattcagaagacaagcggaccaaggaagatgtaaagattgcgggcgtcgctgctaggcaaggcttcctgctgcatgcctctccacttttttttttgaagaattgttctgtgacataaaagggaccgaagtctgtctaaatgccctccccctctttctttttattggttgatgaaagttattgtcgaagtaatgtatggttgagcatctggatgtgattatttgtcatgctcgttttctaggcaagatttagttttgaacttgccgggtacctaggaaaggggtacccaaggcgaggcccataaacctctctctgg

SEQ ID NO: 91388 - DNA, 1551 bp, Zea Mays
agacaagataagataagcccaggacaagctatcaccaaacgggagggcgaggggcaacaggacacacacactgacctagcaccagctcgatctcacaggatggttacgctatgccatccgattcggatccgagcaagcgggagcaccgcgagctggcggaggagaaatgcggcggcggcggcgaaggtcctctgctccgtgcagcaaatgccgccgccgccgccggcggccacggctgcccagagcacgatcaaggtcgttatcgttggggcaacgaaagagatcgggaggacggccgtcgttgcggtgagcaaggccaggggaatggagctcgcgggcgcgatcgactcgcagtgcattggcgaggacgcgggacagataagtggcatggacgagccgctggagatccctgtgctgaacgacctcaccatggttctgggctccatagcgcagtcgagagcaaccggcgtggtggtcgacttcagcgagccttcagctgtttacgacaatgtcaagcaggcagcggcgtttggtctgagcagcgtcgtctacgttccgaaaatcgagctagagacagtgactgaactgtcagcgttctgcgagaaggcaagcgtgggctgcttggttgcgccaacgctgtcgattgggtccgtgctccttcagcaagcggctatacaggcctcgttccactacagcaacgttgagattgtggaatcgagaccaaacccatcggatcttccatcgcaagatgcaatccagattgcaaacaacatatcagaccttggtcagatatacaacagggaagatatggattccagcagtccagccagaggccagctgctcggggaagacggagtgcgcgtgcacagcatggttctccctggtctcgtctccagcacgtcgatcaacttctctggcccaggagagatgtacaccttacggcatgacgttgcgaatgttcagtgcctgatgccaggactgatcctggcgatacggaaggtggtgcggttcaagaacttgatttatgggctagagaagttcttgtagtgaacaacaaacaaccaatgcaaaacatcgacaggcaacaggcaaggcagatatcatctgacgtcgcaacaaccaaaacgacagagatttggaaaataaaggctgcacagaagacgtctggggttttgtgtgcaccaggctgcgcagagaacgtctgtcattttgtgtgcaccactacggcactacctgctgagcgcgatttttataaaaaaggcatgggagggagatcatacacaggaaaagtcacgaaggaaaaaggggtcacatggacatacaggtattggtagcataaccaaaacaatggatctgattctgcgattcggttccatcggcatatgcttgttcagaagaaagttgcatcgggacttgaagaaaaggagggtctagtttgcgttttgtaaccgagactgcgtaattcggcatgcgtatggcaatccaaattgcgccagactaatccagattcaattttataaaatggataaaacataaaaaagacatataaca

SEQ ID NO: 91389 - DNA, 811 bp, Zea Mays
agtccatcgtggcggcacctaagaaacacgttccactccactgcatacctgcagcaaatctggtggttcgaggtggtgggagaggtggacttctgcttcccggcggggacggcctacagcctctacttcaggctccacctcggcaagtcctccacgcgcttcggccgccgggtctgcagctcggagcaggtccacggctgggacaagaagcccgtgcggttccagctctccacgtcggacggccagcacgccgtgtcccagtgctacctggacgagcctggacgctggatcctgtaccacgtcggcgatttcgacgcgccgccgagctctggtcagccgaccaggctcaagttttcgttagcgcagatcgactgcacccacacgaaaggtggcctctgtgtcgattcggtgctcgtgtatcccaaggggtttcagccggaacgggtggtcagggctcggaaatgaccgtgtgtgggcatttggtagctatagaggcactgcgcattagagcgagctgtcgagagatatgagtagcctgccatttttttttagcttgggctaattgtattctgaaagcgtttatacatagcatagtagcacactggactttttttttgtttgatagcattagtgtgtgcgcgttactttgccatttctcatgaaggccatggcaaataaggaacctttgtacgtgtacctagctccggtacatcgcgtttgcatcggcacacaatgaagccaggaaggtctcctgttttatttccaaacaaaaactgggtcgtttttttttcgtgacctaccaaacatcgag

SEQ ID NO: 91390 - DNA, 831 bp, Zea Mays
cttgtgtatggcgaaaccaatctgagccatggcctttctctgttcttgaccctgcactgcactgcactgcaggttccactccactgcatacctgcagcaaatctggtggttcgaggtggtgggagaggtggacttctgcttcccggcggggacggcctacagcctctacttcaggctccacctcggcaagtcctccacgcgcttcggccgccgggtctgcagctcggagcaggtccacggctgggacaagaagcccgtgcggttccagctctccacgtcggacggccagcacgccgtgtcccagtgctacctggacgagcctggacgctggatcctgtaccacgtcggcgatttcgacgcgccgccgagctctggtcagccgaccaggctcaagttttcgttagcgcagatcgactgcacccacacgaaaggtggcctctgtgtcgattcggtgctcgtgtatcccaaggggtttcagccggaacgggtggtcagggctcggaaatgaccgtgtgtgggcatttggtagctatagaggcactgcgcattagagcgagctgtcgagagatatgagtagcctgccatttttttttagcttgggctaattgtattctgaaagcgtttatacatagcatagtagcacactggactttttttttgtttgatagcattagtgtgtgcgcgttactttgccatttctcatgaaggccatggcaaataaggaacctttgtacgtgtacctagctccggtacatcgcgtttgcatcggcacacaatgaagccaggaaggtctcctgttttatttccaaacaaaaactgggtcgttttttt

SEQ ID NO: 91391 - DNA, 1613 bp, Zea Mays
ataaatgcgcccccacttgtcccttttccctcctcctcctgactcctccagctcctctcgtacaccacgtccctctctgggctgtggtggctcccaagcacacggcccgcacgagcagttggaacagattcctcgaccgcgtcgccccggaacccagttcttggcatccggtgcctagcttcgtcgcccctccggcaaggaccacctccagccctccacctcgcgaggttgcacttgctgctagtgagctagtatatttctgaaaccggaaacccgcgacacgggaccgagttcttgggagcggattcggctcgctgcagcaggctgaggctaccggcccgctcttctccacggcggcggagagccagccagtagttgcgactggaggcgggcatgggcgcgggcgcgtcgggcctggcgggcgcggagcccggcggcaaggtggcgcgcggcgccgggctgggcgacctcccggagctgtgcaccgcggaggtgctgctccgcctcggcgcgccggacatatgccggctcgcgcggctcaacctagcgttccgcggcgccgcgggcgcggacttcgtgtgggaggccaagctgccggggaactacgcccggctcctgcgcttcgtggacgaggccgaggaggagggagggagtgggcgggattggagcgcggtggggaggaaggacgtctttgcgaggctcgccagacctgtgccgttcgacggtggcaaaagggaattctggctggagaagaacgaaggtgggatctgcatggccttgtcgtcgaaagcgctggtcattactgggattgacgatagaagatactggattaacatgccaacatctgaatctaggttccactccactgcatacctgcagcaaatctggtggttcgaggtggtgggagaggtggacttctgcttcccggcggggacggcctacagcctctacttcaggctccacctcggcaagtcctccacgcgcttcggccgccgggtctgcagctcggagcaggtccacggctgggacaagaagcccgtgcggttccagctctccacgtcggacggccagcacgccgtgtcccagtgctacctggacgagcctggacgctggatcctgtaccacgtcggcgatttcgacgcgccgccgagctctggtcagccgaccaggctcaagttttcgttagcgcagatcgactgcacccacacgaaaggtggcctctgtgtcgattcggtgctcgtgtatcccaaggggtttcagccggaacgggtggtcagggctcggaaatgaccgtgtgtgggcatttggtagctatagaggcactgcgcattagagcgagctgtcgagagatatgagtagcctgccatttttttttagcttgggctaattgtattctgaaagcgtttatacatagcatagtagcacactggactttttttttgtttgatagcattagtgtgtgcgcgttactttgccatttctcatgaaggccatggcaaataaggaacctttgtacgtgtacctagctccggtacatcgcgtttgcatcggcacacaatgaagccaggaaggtctcctgttttatttccaaacaaaaactgggtcgttttttt

SEQ ID NO: 91392 - DNA, 117 bp, Zea Mays
cgggcgggctcgagcctcctaccgctctggaggccatagagtctcactaaattcccttcttaaatttaaaacttatataatataatgaagtagggacactataataatgacggtttc

SEQ ID NO: 91393 - DNA, 498 bp, Zea Mays
ctttcgtttctgccactgactgtttgagaacgagcagtaccaggacaaaatgaggcagtcagatgaacggctcctggccctggtcaaggcggccatggacgtggtcgtggccgtcgggcttcttcagctggcgcccaagaaggtcactccgagagtgacaggagcctttgggttcgtcacctcgcttatctcctgctatcagcaacttccttcccgcgctcctgttgccaaagtcaaagtttgagaggtgtcgccgtcctagtaaaaaaaaaagaggcgacgctggaaatcgatctctgcttcaacaatggatcgtaatataattttattatgcgaatataaggcaggctagctatgtattttttttattaaaaaaatagtacaacaaaatagaacaccagtgattgcacgtatgggcttatcactatcttctctttttgcctagcaatggacaagtaatgttcacgtgattatgtctttggatatgctttgcttgta

SEQ ID NO: 91394 - DNA, 1405 bp, Zea Mays
aggactttgctcggctgacaccaggtagccgcccctcctctatccaccccttcacttgcttggtcttccactcacccctctctcgttattcacccggtctcctctcctgcaaagaggtacgtaactgcactttcctgctcagtcttttgatcggtttcagtgatgcactgatgctgtagagtttcgtttctgttagtactctaatcaacggacaacggtttctgttagtattcttgggttcatggctgtctgcagattgtcgcccttgctctgcctgctctattcggcctcagttcattctgtcgtaaacctcacctcgtaactgaaataagccatatgcgccgcgcgtcgaagcttagtgtctgatcgatacgctatccctacaattttctgagctgttgaactcctgcgcccgtctcctcgtcgaggacaggaagatgagctcgctacacgccacacgagcggagcttggcctggttgtcctgtacctgaacaaagccgaggcccgggacaagatctgcagggcgatccagtacggctccaagttcgtaagcaacgggcagcctggcactgcgcaggaggtcgacagatcgaccaccttggctcgcaaagtcttccggctcctcaagtgggtcaatgatctgcatgctcttatcagcccgccggccaaagggactccgctcaccctcgttctgcttggcaaatccaaaaacgcgctgctttcgacgttcttgttcttggatcagtttgtgtggctcggacgaacggggatcgtcaagaacaaggaggcgacggaccgcgttgccaggttatccctgtactgctggatggcttcttctgcctgtgcaggtctagttgagcttggagagcttaaaaggctatcgagatcgatgaggaagcttgcaagagagctgagggacacagataaatatgagaacgagcagtaccaggacaaaatgaggcagtcagatgaacggctcctggccctggtcaaggcggccatggacgtggtcgtggccgtcgggcttcttcagctggcgcccaagaaggtcactccgagagtgacaggagcctttgggttcgtcacctcgcttatctcctgctatcagcaacttccttcccgcgctcctgttgccaaagtcaaagtttgagaggtgtcgccgtcctagtaaaaaaaaaagaggcgacgctggaaatcgatctctgcttcaacaatggatcgtaatataattttattatgcgaatataaggcaggctagctatgtattttttttattaaaaaaatagtacaacaaaatagaacaccagtgattgcacgtatgggcttatcactatcttctctttttgcctagcaatggacaagtaatgttcacgtgattatgtctttggatatgctttgcttgta

SEQ ID NO: 91395 - DNA, 1536 bp, Zea Mays
gccaagcctagctccgtcaccctccacgcacgctgctccaccgccgctgccggctcccgtgctgcgctgccctgtgccctcttcgttggctgctgccggcttccgcggttcctccccttcgtcccaaccgccggccgccgcgccggcctctctctccctctcgccccgccttcggccttcttgctcgacgctgtactaattgagttggctcgccgcgtgcgccgccggccggccaccatatcctatcccgccggtccgccgttggctcagccagtggggagcggttgacacgtgggccggtgtcgtcacgaccctgggcccgtgtcagcccattacgcttacaccacttgttcgattccggcccggacagtacacgtcgcctccacgtacctgtcatctcatctcaatcgaatggcgcagtgaagtagcagaccgaggaagccactccaggactttgctcggctgacaccaggtagccgcccctcctctatccaccccttcacttgcttggtcttccactcacccctctctcgttattcacccggtctcctctcctgcaaagaggaagatgagctcgctacacgccacacgagcggagcttggcctggttgtcctgtacctgaacaaagccgaggcccgggacaagatctgcagggcgatccagtacggctccaagttcgtaagcaacgggcagcctggcactgcgcaggaggtcgacagatcgaccaccttggctcgcaaagtcttccggctcctcaagtgggtcaatgatctgcatgctcttatcagcccgccggccaaagggactccgctcaccctcgttctgcttggcaaatccaaaaacgcgctgctttcgacgttcttgttcttggatcagtttgtgtggctcggacgaacggggatcgtcaagaacaaggaggcgacggaccgcgttgccaggttatccctgtactgctggatggcttcttctgcctgtgcaggtctagttgagcttggagagcttaaaaggctatcgagatcgatgaggaagcttgcaagagagctgagggacacagataaatatgagaacgagcagtaccaggacaaaatgaggcagtcagatgaacggctcctggccctggtcaaggcggccatggacgtggtcgtggccgtcgggcttcttcagctggcgcccaagaaggtcactccgagagtgacaggagcctttgggttcgtcacctcgcttatctcctgctatcagcaacttccttcccgcgctcctgttgccaaagtcaaagtttgagaggtgtcgccgtcctagtaaaaaaaaaagaggcgacgctggaaatcgatctctgcttcaacaatggatcgtaatataattttattatgcgaatataaggcaggctagctatgtattttttttattaaaaaaatagtacaacaaaatagaacaccagtgattgcacgtatgggcttatcactatcttctctttttgcctagcaatggacaagtaatgttcacgtgattatgtctttggatatgctttgcttgta

SEQ ID NO: 91396 - DNA, 1479 bp, Zea Mays
cgcaccaagtttcaaccagtagcgagcctgtgcgagccaagcctagctccgtcaccctccacgcacgctgctccaccgccgctgccggctcccgtgctgcgctgccctgtgccctcttcgttggctgctgccggcttccgcggttcctccccttcgtcccaaccgccggccgccgcgccggcctctctctccctctcgccccgccttcggccttcttgctcgacgctgtactaattgagttggctcgccgcgtgcgccgccggccggccaccatatcctatcccgccggtccgccgttggctcagccagtggggagcggttgacacgtgggccggtgtcgtcacgaccctgggcccgtgtcagcccattacgcttacaccacttgttcgattccggcccggacagtacacgtcgcctccacgtacctgtcatctcatctcaatcgaatggcgcagtgaagtagcagaccgaggaagccactccaggactttgctcggctgacaccaggaagatgagctcgctacacgccacacgagcggagcttggcctggttgtcctgtacctgaacaaagccgaggcccgggacaagatctgcagggcgatccagtacggctccaagttcgtaagcaacgggcagcctggcactgcgcaggaggtcgacagatcgaccaccttggctcgcaaagtcttccggctcctcaagtgggtcaatgatctgcatgctcttatcagcccgccggccaaagggactccgctcaccctcgttctgcttggcaaatccaaaaacgcgctgctttcgacgttcttgttcttggatcagtttgtgtggctcggacgaacggggatcgtcaagaacaaggaggcgacggaccgcgttgccaggttatccctgtactgctggatggcttcttctgcctgtgcaggtctagttgagcttggagagcttaaaaggctatcgagatcgatgaggaagcttgcaagagagctgagggacacagataaatatgagaacgagcagtaccaggacaaaatgaggcagtcagatgaacggctcctggccctggtcaaggcggccatggacgtggtcgtggccgtcgggcttcttcagctggcgcccaagaaggtcactccgagagtgacaggagcctttgggttcgtcacctcgcttatctcctgctatcagcaacttccttcccgcgctcctgttgccaaagtcaaagtttgagaggtgtcgccgtcctagtaaaaaaaaaagaggcgacgctggaaatcgatctctgcttcaacaatggatcgtaatataattttattatgcgaatataaggcaggctagctatgtattttttttattaaaaaaatagtacaacaaaatagaacaccagtgattgcacgtatgggcttatcactatcttctctttttgcctagcaatggacaagtaatgttcacgtgattatgtctttggatatgctttgcttgta

SEQ ID NO: 91397 - DNA, 1614 bp, Zea Mays
gccaagcctagctccgtcaccctccacgcacgctgctccaccgccgctgccggctcccgtgctgcgctgccctgtgccctcttcgttggctgctgccggcttccgcggttcctccccttcgtcccaaccgccggccgccgcgccggcctctctctccctctcgccccgccttcggccttcttgctcgacgctgtactaattgagttggctcgccgcgtgcgccgccggccggccaccatatcctatcccgccggtccgccgttggctcagccagtggggagcggttgacacgtgggccggtgtcgtcacgaccctgggcccgtgtcagcccattacgcttacaccacttgttcgattccggcccggacagtacacgtcgcctccacgtacctgtcatctcatctcaatcgaatggcgcagtgaagtagcagaccgaggaagccactccaggactttgctcggctgacaccaggtagccgcccctcctctatccaccccttcacttgcttggtcttccactcacccctctctcgttattcacccggtctcctctcctgcaaagaggaagatgagctcgctacacgccacacgagcggagcttggcctggttgtcctgtacctgaacaaagccgaggcccgggacaagatctgcagggcgatccagtacggctccaagttcgtaagcaacgggcagcctggcactgcgcaggaggtcgacagatcgaccaccttggctcgcaaagtcttccggctcctcaagtgggtcaatgatctgcatgctcttatcagcccgccggccaaagggactccgctcaccctcgttctgcttggcaaatccaaaaacgcgctgctttcgacgttcttgttcttggatcagtttgtgtggctcggacgaacggggatcgtcaagaacaaggaggcgacggaccgcgttgccaggttatccctgtactgctggatggcttcttctgcctgtgcaggtctagttgagcttggagagcttaaaaggctatcgagatcgatgaggaagcttgcaagagagctgagggacacagataaatatgagaacgagcagtaccaggacaaaatgaggcagtcagatgaacggctcctggccctggtcaaggcggccatggacgtggtcgtggccgtcgggcttcttcagctggcgcccaagaaggtcactccgagagtgacaggagcctttgggttcgtcacctcgcttatctcctgctatcaggtatgacttctgcctcgagtctgtgctgttgtgcgtgtgttttctcagtaatggaagctgcaatgcaacgctaatgttgtgtgtgcctgtgctctgcctgcagcaacttccttcccgcgctcctgttgccaaagtcaaagtttgagaggtgtcgccgtcctagtaaaaaaaaaagaggcgacgctggaaatcgatctctgcttcaacaatggatcgtaatataattttattatgcgaatataaggcaggctagctatgtattttttttattaaaaaaatagtacaacaaaatagaacaccagtgattgcacgtatgggcttatcactatcttctctttttgcctagcaatggacaagtaatgttcacgtgatta

SEQ ID NO: 91398 - DNA, 108 bp, Zea Mays
gatgattttctgcaaaaagaaattaataatatacaaatagtctcagaaattcacgaaatttggcgtatgagtaacatatgtccatatagcatcctcaaaaatgtttga

SEQ ID NO: 91399 - DNA, 2014 bp, Zea Mays
cggacgcacacgcgcgcgcgcagggaatcaatcacgcacacgcgcacgcaccgccacccttcccgaaaagtctcctcacctcccggtcccggcctcccttcctctctctccccccctctcaaacatccccgcgccgatggatctccgcctcgcccactaggcctccggcgcgaccgagggtgggcagggggatggggctcctcgggcggaggacgttgctgcggctcctcgccctcgcttccgcggccgtcgccgtcgccgtcaccgtggaagcctacgagggcgacgctgatccgctctacaggtgcgagatccccccaccctgcctcctccgctgcttaccttcgcacgctgcttggtctcgcagcctcgcttccgctccgctcccacgggcggcctttcccttctatccctaatccaatctctagttatattcgcgatcgctactcgccgaaccttggacggctcacctctcagtctgatgaaacttagcggattatgttcgtctgtctatgtgcgaaggcgaaccttcggggttactccgttttaggcctcgctggacatcccagtgctgtccgtctcggtgcctctggtggtttcagcgaaggcgagcggttccggaaaggaataaaaatggtgctgtctgtcttcgcctcttggctactggcattgggggtgtataagttctgattacgctacatgattcagagttatatattatcaccttttcatggtacggtcccaaaggttgagctagcacaactacctcattttcccatatttttaccagagcttgtgtggaaggatgccaaaagacaggctccctgaaggagacttctattaaacattgtatggtgccaaccgatggccaacctgttgacaagtcatggtacacgcatgagccactgtacttgcaatggaaggactggaactgcaagagtgaatgcagataccactgtatgatggaaagggagaatgaaagggcaaagcttggcctccagcctgttaagtatcatggaaaatggcctttgaagcgtgcctctgtgtttcaggaacctttatctgcagctctctctgcgcttactcttgttgtgcaatttaatgggtggctatcatttttcctcttgctttattataaacttcctctgcggccagaaactcacaagacatactatgaatacactggcttgtggcacatctatgggctccttgccatgaattcatggttctggagtgccatatatcacagttgtgacacaatttggacagaaaaactatatttttcatcagatgctgcctttctggggtattccctcattttggcgatactgcggactttaaatttaagagacgaagcatctagagttatggttgccgctcctattctagcatttgtgacaacccacattctgtacctcaacttctacgaacttgacaaaggcctgaacatgaaggtttgtactgtgataatcattgctcagtgtctcctatgggcactgtgggctgtcatgactcggcatccttcacggctgaagatcatatttgttgccatcggaggtgcggctgcggtacttctggaagcttctgacattcctccgcgatggggatatgtggatggccgtgctatatgccttgctgtggctatccccctttcgtacctttggtggagctttgccaaggaagatgcggagatgcgaacgtcagcaatcctgaagaaggcacgttaacaagtcgcctgtgtgataatttcatgcctgcgcccagccattgtaaagataaaagtttcacttgtaatcttaggtaactactaacttagcatgtgaattaccgtcttatttttgttccacgatgttcttgtcccagttcagaaggccatgttgtttaaggggccacttctattctttaatttatacagcaactgccacttggtaggctcgtgctcatcaactataatctcagaagattgttaccatgggttatcagtgagtggctatcataataatgtctttttttt

SEQ ID NO: 91400 - DNA, 1528 bp, Zea Mays
cggacgcacacgcgcgcgcgcagggaatcaatcacgcacacgcgcacgcaccgccacccttcccgaaaagtctcctcacctcccggtcccggcctcccttcctctctctccccccctctcaaacatccccgcgccgatggatctccgcctcgcccactaggcctccggcgcgaccgagggtgggcagggggatggggctcctcgggcggaggacgttgctgcggctcctcgccctcgcttccgcggccgtcgccgtcgccgtcaccgtggaagcctacgagggcgacgctgatccgctctacagagcttgtgtggaaggatgccaaaagacaggctccctgaaggagacttctattaaacattgtatggtgccaaccgatggccaacctgttgacaagtcatggtacacgcatgagccactgtacttgcaatggaaggactggaactgcaagagtgaatgcagataccactgtatgatggaaagggagaatgaaagggcaaagcttggcctccagcctgttaagtatcatggaaaatggcctttgaagcgtgcctctgtgtttcaggaacctttatctgcagctctctctgcgcttactcttgttgtgcaatttaatgggtggctatcatttttcctcttgctttattataaacttcctctgcggccagaaactcacaagacatactatgaatacactggcttgtggcacatctatgggctccttgccatgaattcatggttctggagtgccatatatcacagttgtgacacaatttggacagaaaaactatatttttcatcagatgctgcctttctggggtattccctcattttggcgatactgcggactttaaatttaagagacgaagcatctagagttatggttgccgctcctattctagcatttgtgacaacccacattctgtacctcaacttctacgaacttgacaaaggcctgaacatgaaggtttgtactgtgataatcattgctcagtgtctcctatgggcactgtgggctgtcatgactcggcatccttcacggctgaagatcatatttgttgccatcggaggtgcggctgcggtacttctggaagcttctgacattcctccgcgatggggatatgtggatggccgtgctatatgccttgctgtggctatccccctttcgtacctttggtggagctttgccaaggaagatgcggagatgcgaacgtcagcaatcctgaagaaggcacgttaacaagtcgcctgtgtgataatttcatgcctgcgcccagccattgtaaagataaaagtttcacttgtaatcttaggtaactactaacttagcatgtgaattaccgtcttatttttgttccacgatgttcttgtcccagttcagaaggccatgttgtttaaggggccacttctattctttaatttatacagcaactgccacttggtaggctcgtgctcatcaactataatctcagaagattgttaccatgggttatcagtgagtggctatcataataatgtctttttttt

SEQ ID NO: 91401 - DNA, 1499 bp, Zea Mays
gcaactttacatcctgattactgtggcacacaacaataaccgagtctgtttgttttctttcttcaggaagtatatgaacaacagaaggaacttattttacttggggaacgtgttgttcttgtaacacttggttttgattttaatgtgaaccatccttacaagcccttggttgaagcaataaaaaaatttgaggttgctcaaaatgcacttgcgcaagttgcctggaattttgtcaatgatgggctccgcacttcactttgcctgcaatttaaaccgcaccatattgcggctggcgcaatcttcctggctgcgaagtttcttaaagtcaagcttccatcagatggcgagaaggtctggtggcaagagtttgatgtaactccgcggcagttggaagaggttagcaaccagatgttggaactctatgagcagaaccgtgttcaaccaccaccatcacaaggtaatgatactgaaggcagttctgtaactgctgtgaatcaacgtgctctgggtaaagttccaggagtagttgatgaacctcctgcccatgaacataaccaagcaaccaggcaatcgagccagcagaacatgtcaggccaccatggctatgatcaccctcatccggagaagcgaaactatagggtacccccaaatgaagcaagggatgacagtgctaacagcagcgagggtcccaacgtgtcagcctcgatgatggatgcaatgaaaaagataaacaaggataaggtgaaagcggccctggagaagcggagatcaaaaggtgacctttcgagaaaggttgatgtgatggatgatgatgacctcattgagagggagctggaacatggcgtggagttggcggttgaggatgagaaggtcaagcaggagagaaggcagagctggcctcatccttcacaccgtgtagaccaccggagcaccgaccgtgagaataccgaagagggtgagctatccatggacagtcaggaacaccattctccggagcatgacaatcggaagagaaaggatgcgcatgagcaccggaactatgatcgtgatgaaagggaccttaaaaggctaaggtcatgagcatcacacatcctgtgggagtctcgtgttgtttgggctgtaacatgacgttgatatgcttatttggtgtgctgggggatttggactgttacatacaagttaagatggtttccccacggatcatgtttgtgttagtccatgttggcaattgagatggcgctgtgacttgagtattgcaaacagtaaggaagcggcatccgacggctatctgaagtgtgtatttgattccaaggttacctgaaccctaatggaagcatgcgattttattattcgcccgtctatcttggtactggggaggagatcgtgcatagactaattgttgattttttatgccatgtaatgtccatgctctctacctaaattatggattgttttggccttttagatacacagtttttattatacgttcatatataggt

SEQ ID NO: 91402 - DNA, 1969 bp, Zea Mays
atgctcgggtccgatggttcccgtctccgacaccgcactgctcacaacttcgacaccacttccgactccgtcgccaggtccgccgccggcgagagcgccgcagtcgctagctccgtatgcagagtatacagctgcagcggcgggtgctcctgccggtaccgagtgagtgtgagacggcggaagctccacgtccagcggcgtgcccctccgtcttccgtcactccagatccgaggcagttcactgctgggacgcagtcagagctgttcggtggagctgacaggtaacaagtttttgagaagaggaatataatcatggttatcatgcagagcagtgactcttcacataatggttcacataatggaattgtagaaaatagtccgtacagaattccatatgacagacatgcagaaggtgatcaacttggtgcttcatggtattttagtagaaaagaaatagaggagaattccgtatcgaggagggacggcattgatctgaagaaagagtcttatcttcgcaagtcatattgcacatttctgcaggatttggggatgaggcttaaagtgcctcaagtgacaattgctactgctatagtgttctgtcatcggttttttcttcgtcaatctcatgcgaaaaatgacagacggacaattgcaacagtatgtatgttcttggcgggaaaagttgaagaaacacccagacctctgaaggatgtcatacttctttcatacgagatcatccacaaaaaggatcctgctgcagttcaacgaataaaacataaggaagtatatgaacaacagaaggaacttattttacttggggaacgtgttgttcttgtaacacttggttttgattttaatgtgaaccatccttacaagcccttggttgaagcaataaaaaaatttgaggttgctcaaaatgcacttgcgcaagttgcctggaattttgtcaatgatgggctccgcacttcactttgcctgcaatttaaaccgcaccatattgcggctggcgcaatcttcctggctgcgaagtttcttaaagtcaagcttccatcagatggcgagaaggtctggtggcaagagtttgatgtaactccgcggcagttggaagaggttagcaaccagatgttggaactctatgagcagaaccgtgttcaaccaccaccatcacaaggtaatgatactgaaggcagttctgtaactgctgtgaatcaacgtgctctgggtaaagttccaggagtagttgatgaacctcctgcccatgaacataaccaagcaaccaggcaatcgagccagcagaacatgtcaggccaccatggctatgatcaccctcatccggagaagcgaaactatagggtacccccaaatgaagcaagggatgacagtgctaacagcagcgagggtcccaacgtgtcagcctcgatgatggatgcaatgaaaaagataaacaaggataaggtgaaagcggccctggagaagcggagatcaaaaggtgacctttcgagaaaggttgatgtgatggatgatgatgacctcattgagagggagctggaacatggcgtggagttggcggttgaggatgagaaggtcaagcaggagagaaggcagagctggcctcatccttcacaccgtgtagaccaccggagcaccgaccgtgagaataccgaagagggtgagctatccatggacagtcaggaacaccattctccggagcatgacaatcggaagagaaaggatgcgcatgagcaccggaactatgatcgtgatgaaagggaccttaaaaggctaaggtcatgagcatcacacatcctgtgggagtctcgtgttgtttgggctgtaacatgacgttgatatgcttatttggtgtgctgggggatttggactgttacatacaagttaagatggtttccccacggatcatgtttgtgttagtccatgttggcaattgagatggcgctgtgacttgagtatt

SEQ ID NO: 91403 - DNA, 1968 bp, Zea Mays
atgctcgggtccgatggttcccgtctccgacaccgcactgctcacaacttcgacaccacttccgactccgtcgccaggtccgccgccggcgagagcgccgcagtcgctagctccgtatgcagggttagagtatacagctgcagcggcgggtgctcctgccggtaccgagtgagtgtgagacggcggaagctccacgtccagcggcgtgcccctccgtcttccgtcactccagatccgaggcagttcactgctgggacgcagtcagagctgttcggtggagctgacaggtttttgagaagaggaatataatcatggttatcatgcagagcagtgactcttcacataatggttcacataatggaattgtagaaaatagtccgtacagaattccatatgacagacatgcagaaggtgatcaacttggtgcttcatggtattttagtagaaaagaaatagaggagaattccgtatcgaggagggacggcattgatctgaagaaagagtcttatcttcgcaagtcatattgcacatttctgcaggatttggggatgaggcttaaagtgcctcaagtgacaattgctactgctatagtgttctgtcatcggttttttcttcgtcaatctcatgcgaaaaatgacagacggacaattgcaacagtatgtatgttcttggcgggaaaagttgaagaaacacccagacctctgaaggatgtcatacttctttcatacgagatcatccacaaaaaggatcctgctgcagttcaacgaataaaacataaggaagtatatgaacaacagaaggaacttattttacttggggaacgtgttgttcttgtaacacttggttttgattttaatgtgaaccatccttacaagcccttggttgaagcaataaaaaaatttgaggttgctcaaaatgcacttgcgcaagttgcctggaattttgtcaatgatgggctccgcacttcactttgcctgcaatttaaaccgcaccatattgcggctggcgcaatcttcctggctgcgaagtttcttaaagtcaagcttccatcagatggcgagaaggtctggtggcaagagtttgatgtaactccgcggcagttggaagaggttagcaaccagatgttggaactctatgagcagaaccgtgttcaaccaccaccatcacaaggtaatgatactgaaggcagttctgtaactgctgtgaatcaacgtgctctgggtaaagttccaggagtagttgatgaacctcctgcccatgaacataaccaagcaaccaggcaatcgagccagcagaacatgtcaggccaccatggctatgatcaccctcatccggagaagcgaaactatagggtacccccaaatgaagcaagggatgacagtgctaacagcagcgagggtcccaacgtgtcagcctcgatgatggatgcaatgaaaaagataaacaaggataaggtgaaagcggccctggagaagcggagatcaaaaggtgacctttcgagaaaggttgatgtgatggatgatgatgacctcattgagagggagctggaacatggcgtggagttggcggttgaggatgagaaggtcaagcaggagagaaggcagagctggcctcatccttcacaccgtgtagaccaccggagcaccgaccgtgagaataccgaagagggtgagctatccatggacagtcaggaacaccattctccggagcatgacaatcggaagagaaaggatgcgcatgagcaccggaactatgatcgtgatgaaagggaccttaaaaggctaaggtcatgagcatcacacatcctgtgggagtctcgtgttgtttgggctgtaacatgacgttgatatgcttatttggtgtgctgggggatttggactgttacatacaagttaagatggtttccccacggatcatgtttgtgttagtccatgttggcaattgagatggcgctgtgacttgagtatt

SEQ ID NO: 91404 - DNA, 1962 bp, Zea Mays
atgctcgggtccgatggttcccgtctccgacaccgcactgctcacaacttcgacaccacttccgactccgtcgccaggtccgccgccggcgagagcgccgcagtcgctagctccgtatgcagagtatacagctgcagcggcgggtgctcctgccggtaccgagtgagtgtgagacggcggaagctccacgtccagcggcgtgcccctccgtcttccgtcactccagatccgaggcagttcactgctgggacgcagtcagagctgttcggtggagctgacaggtttttgagaagaggaatataatcatggttatcatgcagagcagtgactcttcacataatggttcacataatggaattgtagaaaatagtccgtacagaattccatatgacagacatgcagaaggtgatcaacttggtgcttcatggtattttagtagaaaagaaatagaggagaattccgtatcgaggagggacggcattgatctgaagaaagagtcttatcttcgcaagtcatattgcacatttctgcaggatttggggatgaggcttaaagtgcctcaagtgacaattgctactgctatagtgttctgtcatcggttttttcttcgtcaatctcatgcgaaaaatgacagacggacaattgcaacagtatgtatgttcttggcgggaaaagttgaagaaacacccagacctctgaaggatgtcatacttctttcatacgagatcatccacaaaaaggatcctgctgcagttcaacgaataaaacataaggaagtatatgaacaacagaaggaacttattttacttggggaacgtgttgttcttgtaacacttggttttgattttaatgtgaaccatccttacaagcccttggttgaagcaataaaaaaatttgaggttgctcaaaatgcacttgcgcaagttgcctggaattttgtcaatgatgggctccgcacttcactttgcctgcaatttaaaccgcaccatattgcggctggcgcaatcttcctggctgcgaagtttcttaaagtcaagcttccatcagatggcgagaaggtctggtggcaagagtttgatgtaactccgcggcagttggaagaggttagcaaccagatgttggaactctatgagcagaaccgtgttcaaccaccaccatcacaaggtaatgatactgaaggcagttctgtaactgctgtgaatcaacgtgctctgggtaaagttccaggagtagttgatgaacctcctgcccatgaacataaccaagcaaccaggcaatcgagccagcagaacatgtcaggccaccatggctatgatcaccctcatccggagaagcgaaactatagggtacccccaaatgaagcaagggatgacagtgctaacagcagcgagggtcccaacgtgtcagcctcgatgatggatgcaatgaaaaagataaacaaggataaggtgaaagcggccctggagaagcggagatcaaaaggtgacctttcgagaaaggttgatgtgatggatgatgatgacctcattgagagggagctggaacatggcgtggagttggcggttgaggatgagaaggtcaagcaggagagaaggcagagctggcctcatccttcacaccgtgtagaccaccggagcaccgaccgtgagaataccgaagagggtgagctatccatggacagtcaggaacaccattctccggagcatgacaatcggaagagaaaggatgcgcatgagcaccggaactatgatcgtgatgaaagggaccttaaaaggctaaggtcatgagcatcacacatcctgtgggagtctcgtgttgtttgggctgtaacatgacgttgatatgcttatttggtgtgctgggggatttggactgttacatacaagttaagatggtttccccacggatcatgtttgtgttagtccatgttggcaattgagatggcgctgtgacttgagtatt

SEQ ID NO: 91405 - DNA, 1416 bp, Zea Mays
aatttgttgatgtggctcctatcaagtgcaccgtgttcccctcttcaagaatcaagagtttgatgctgccgccaaagagatcaccaaggcattaacaactgttggtatctctcatattattgacactactgcaatttctattgggaggagatatgggaggaccgatgagattggtgttccatttgttgtggcaatggattcaacaaacgtgacgatccgagagagggatgacaaggagcagatccgtgtggacatcaacgaggtggcgtccgtggtgaaatagctgatagaaggccaaagcacctgtgcagatgtttttgcaaagcatactgcccatatataaatagacatggtatgtcgtctctttttaaacatgtgcttacctaatgaatcaatggcacatggtgtacacaattcttaaaagtttcatagcctatattgaaattgaattctttataatatgattgtgtgtcgtgatgttgctagagtacttttctggctataatgacatcattatggctagggtctttgctcaccaagatattttggacttggcaaaatatgcatctgtacctgtcataaatggtctcactgactataaccatccatgccagataatggctgatgcacttactatgcttgagcagattggtcgtattgaaaacactaaggttttctatgttggagatgggaacaacattgtgcactcatggctgttattggctgatgtgcttccttttcactttgtatgtgcttgtcccaagggatttgagcctgatgcacacacagtggagatggccaggggtgctggaatcagtaagattgaaataacaaaccgtcccagggaagcagttaagggagcagacattgtgtacacagatgtttgggccagtatgggacaaaaggaagaagttgattatagaaaacagaagttccagggattcacggtggatgaaaccctgatggagattgctggcccataggcctaccttatgcactgtttgcttgctgagagagaggagtggaggtgactgatggcggcggcgccattgaggctcccaattcaatcgtgttcccccaggttgagaacagaatgcacgctcagaacgccatcatgcttcacgtgctcggtgcttaactctcctattgcacaccactacaccagtgacacgctcctcttagattattgggcattgttgtcttgctgaagcattgaggctgttttggctttagggcatatatgagagcttagttcagacgaactgtttagtaaggtgataacggttcttcagggtgggagtttgttgtgctgtaaaggtttggtaacctgaataaaaataaacttatgtgttagtttcattcgagaatcgtgacagttttaactttgaaaggcacgtttggccgagaccctggatc

SEQ ID NO: 91406 - DNA, 153 bp, Zea Mays
tggattattcaatgtgtcaactgtgacaccatttccccggcaattttggtaagttggagagaaagttgtagattatggattagcttctcaagttgctctcaattgtattttctaaaccttccttttcaagctcatcagtctatttatcatcaa

SEQ ID NO: 91407 - DNA, 296 bp, Zea Mays
tgcagccaaacaggctcctaaggatttccttcaaatcattgattttgacaaggatacaataatgaaggttcttaatcgagccattgaggttaaggcattgataaagtctggagacaagagcttccaaccgttcaaagggaaaacaatggtcatgatttttgccaagccatcaatgaggacccgtgtttcatttgagacaggattctttttacttggtgggcatgctatttatttgggtccagatgttatccagatgggcaagcgtggcctgtttcataatgagacacataccactt

SEQ ID NO: 91408 - DNA, 1101 bp, Zea Mays
ctttttgcaaaaatgcattggacctagtggcccaagcccagtcgagggctcggcccagtcagccttctccgtctccctgaatgccaccgaaccgcaagaggcgagcagcagccatggatcccgcggcaggaggcgccggccagcagcgccagaacaaagcttcggcgggcaagaaggtaaagaagggcggtggcagcggcgggagatggccggcggtcaagcccaagaaggatctccagatcaatcgcctcaagggcacccacctcctcaccattccagacttcttcacttctgcggaggcgaaggctttcattgatatcgctgagtcgatgggcttcacgcaccagggcagtttggggccactaaagggggaggcttacagagacaacgaacggatatctgtgacggatccattgcttgctcaagccatttgggaatcaggaataaacaggatttttacagacatcagcgtctctggcaaagtagcaacaggattgaatccaaatatcaggttctacaggtacactgaaggtcagcgttttggtcggcatatcgatgagagtgtctccctcggggatggttctaaaacgtattatacgcttttaatatacctttctggcaaaggaagtgcaaaggattcatctgggcaagctcttgtcggaggggagactgtcttttatgatcaaagaggtggagttgtcgctgaggttgctccagtgcaaggtatggcactcctccacctacatggcgccaaatgtatgctgcatgaagctcgggctgtgaaaaagaatgccaagtatgtactccgttcagatgttgtattttcttagctgaagaaatgcctcaacttgtttcagatcaacccgtctagggcataatggatctggggctgggaagtacttctagttactttccccttttgtaagttgtcatacaaagagtcctgtaaccttttcaatgttggaagtgattcttttggcatcagaaccgtgatctgttatctgttgatgcatttgctgttgtccaagtacaaaagaaatcattatatttagccgcaaacattggctgaaagttcagtgacgtcttgaagccgaataaatt

SEQ ID NO: 91409 - DNA, 2054 bp, Zea Mays
ggagttcacaatgtgggccaagccagtggcacaaacatttgctgcttacagaaatgggactatatgttaaactaggaatacccagaaagagatcctagtgctaacgagtttttttctattatagtgctaaatgctaaacaaaactaactcactagccaacactgtacatccctatagaggcaacacagcaaaatattgtattttcatatagagacaaatgagctttgctaatctggtgtgctttcacctgcagattttcgggtacaggatgtctctatgggcagagcacattggagccattgaggagagcttcaccagaccggagagcctagagtgcacgaggcaggtgcgtcacatcggacagcagaactgggagaaattcatctccagccatgtgaccgagatgaagggccacctgctcaagtaccccgtcagcatcgattccaggggcaaggtgaatcctctgtctgggtgtgccacattcccagatcttggcgggaacatctgcggctccttcctgaatatccaagagaacctcacaatatgagcagtgcttataggtcacccaagtcactgcagtgacattgaccccaccttcagcattgtatcagcagaaaagaaaactccatatttcctgaatcgattcaagagatcacctagctttctgtaggaaggtcaacaccagagattaataggttagtaccttgtaaccaacaacagggtcatcagtggttcgtcagttcagttcgcatggtgcatccaagcaaaatctaaatgtgactgctattttatatctaactcttccatctgatacataccacctattttacatttaactccttcgacctaaaataccagttactactttggccccattcatccatgagggtgaagaggtcggaacgatgttcctttatctaaaaaatcagttactactggattttgaccaacatgattattacattggacatgttcccatttttttgaagttaaacaatagtgcatctggctctatacttttgtaagtaaggcctcctttgggttgaagtataaattcctgaatcttgcgtttttcttgtgtttttgaactaattcatgtaaaattttttatagcattccaaaggagacctaaaagtagtttctgcataagataaaaaaggattgtagctcacctgcaggtgctactaacctactacttacaatcatctgacatatataatggaaagaatatccggattcgaatcggactaccttatccgacaacgaccgaatcgagtttaccaaaggaattcgacattttcaaaattggctaacccagcgtttggaagtcagtattgcagcgtggaattcggaattggcatttgtctgtacgaatactgttgtttggttggcgccggaattcgacggtggaattgcacgtcaataccgaggtggaattgcagcacacacgccgtcaattccgagggctacccctctgatttgcacagaattgaggtccatttcaataccgaggtagaattggtatttggatccatttcaattctatggatgtctacatccaaacggagcctaagcgcatttcgaaggagtagctcaaatatgttagtgaaacaaccgtcatttaattaatcaatctgataaatctcgcaagcaccgtagtagcagcaggaatccgaaataaggggaaccggacgtcgatagaacgagataatcacctgtagacgcccaccgggcgaacctccgagttccgccgctaccaggaaccgggagcaagcacctgtctccccactgattgattcatccgttgcggagcaacgccacgtaatcgaccccaacctccgtttcttcaccatgagctgcacactggtgcgtcgagattatggaacgaactcggttcagcgagtgttaggaggcgggcgaggggggacactgcagcatcggggtccggattagtattctagtagggcgcgcgacaggtgatatccgacgaaaggggaggcgaggccgcggaaggagcagaaccccatcgacgacgatggacggacgcatcggaa

SEQ ID NO: 91410 - DNA, 3889 bp, Zea Mays
ctactagtttgcaaagcacgttgggccttgagagcccatatatcccggtacagcaagcaattcagggagcggaagcggccgatccgcggggcgacgaaccgggtacacacgacacgacaaagagaggatgcatgcaccaccatgcgcgggagggggaagaggagtcagtgagacgaggccgcggaaccccgtgccatcggatcgaggcagacgatgcccgtgcaggacgacgacgagagcgtctcttggttggtgcatggctccgccggggacgcgccggcggtgctgctgcacggcagcctggacatctggatccacgaggcgaggaaccttcccaacaaggacatcctgtccaagaggatgcgggacctgctgtgcaagccgtcggagggcatgaccagcgacccgtacgtgacggtgcaggtcgcctccgcggtggtggcgcgcaccttcgtcatccccgacgacgagaaccccgtgtgggcgcagcagttcctggtgcccgtcgcgcacgaggccgccaccgtcaacttcgtcgtcaaggacagcgacgtcgtgggcgcggagctcatcggcgtcgtcgccgtccgcgccgaccagctgcaggccggggacatggtcgagggcgcgtacccggtcctggagcgcaacggcaaggagtgcgcgccgggggccgtgctccggctgtccgtgcagtacgtgcccgtggcgaggctcaccatgtaccaccacggcgtcaccccgggcccggacttcgccggcgtgcccaggacctacttcccgctgcgccggggcgggaaggtcacgctgtaccaggacgcgcacgtgcccgacggaacgctgccggaggtaaggctcggcaacggcgactgctaccggcacggccagtgctggcgcgacgtctacgacgccatatgccaggcccggaggctcatctacatcaccgggtggtccgtgttccacaccatccacctggtgcgcgacggccacgacgacatggcgctcggcgacctgctcaggaggaagtcgcaggagggcgtgcgggtgctgctgctcgtgtgggacgatcccacgtcccggagactccttggcatcaagatggaaggttacatgggcacaagggatgaggagacccggagatttttcaagcactcttcggtccagatactgctttgcccacgatctgcagggaagaggcacagctgggtgaagcaacaggaaacaggcactatctttactcatcaccagaagacagtgatcttggatgctgatgctgggaatcatagaaggaagattgttgcttttgtgggaggacttgatctatgtggaggccggtcgcataatgattcgctgctgtggatcaacaagatacctgatattatcgctattgacgacgaaatctattcaaacgacgatgatccagagagatgggacgtgcagattttccggtcaattgattcgaattctgtcaagggttttccaaaagatccacgggaggccactagtaagaatcttgtttgtgggaaaaatgtactgattgatatgagcgtgcatacagcatatgtgaatgccatccgaggtgctcaacatttcatctatattgagaaccagtacttccttggctcttcatttaactgggattcacatagagatgttgttccaatgtggcctgagggaaatcctactggtactcctacgcaaaggattctttattggcagaaaatgacaatgcaaatgatgtatgagataatctataaggccttgaaagaagtaggactagatggtacatatgagccacaggattacctgaatttcttctgccttggtaaccgtgaagctgaggacactacttgcacatctagtggaccattctcagccagtaacccacaggaccaagctcggaagaataggagattcatggtgtatgtgcactcgaaaggcatgattgtggatgatgaatatgtgataattggatccgctaacatcaaccagagatccatggaaggaactagagatacagagattgcaatggctgcataccaaccccagcatacatgggcaaatatgctttctgctcctcgtggacagattttcgggtacaggatgtctctatgggcagagcacattggagccattgaggagagcttcaccagaccggagagcctagagtgcacgaggcaggtgcgtcacatcggacagcagaactgggagaaattcatctccagccatgtgaccgagatgaagggccacctgctcaagtaccccgtcagcatcgattccaggggcaaggtgaatcctctgtctgggtgtgccacattcccagatcttggcgggaacatctgcggctccttcctgaatatccaagagaacctcacaatatgagcagtgcttataggtcacccaagtcactgcagtgacattgaccccaccttcagcattgtatcagcagaaaagaaaactccatatttcctgaatcgattcaagagatcacctagctttctgtaggaaggtcaacaccagagattaataggttagtaccttgtaaccaacaacagggtcatcagtggttcgtcagttcagttcgcatggtgcatccaagcaaaatctaaatgtgactgctattttatatctaactcttccatctgatacataccacctattttacatttaactccttcgacctaaaataccagttactactttggccccattcatccatgagggtgaagaggtcggaacgatgttcctttatctaaaaaatcagttactactggattttgaccaacatgattattacattggacatgttcccatttttttgaagttaaacaatagtgcatctggctctatacttttgtaagtaaggcctcctttgggttgaagtataaattcctgaatcttgcgtttttcttgtgtttttgaactaattcatgtaaaattttttatagcattccaaaggagacctaaaagtagtttctgcataagataaaaaaggattgtagctcacctgcaggtgctactaacctactacttacaatcatctgacatatataatggaaagaatatccggattcgaatcggactaccttatccgacaacgaccgaatcgagtttaccaaaggaattcgacattttcaaaattggctaacccagcgtttggaagtcagtattgcagcgtggaattcggaattggcatttgtctgtacgaatactgttgtttggttggcgccggaattcgacggtggaattgcacgtcaataccgaggtggaattgcagcacacacgccgtcaattccgagggctacccctctgatttgcacagaattgaggtccatttcaataccgaggtagaattggtatttggatccatttcaattctatggatgtctacatccaaacggagcctaagcgcatttcgaaggagtagctcaaatatgttagtgaaacaaccgtcatttaattaatcaatctgataaatctcgcaagcaccgtagtagcagcaggaatccgaaataaggggaaccggacgtcgatagaacgagataatcacctgtagacgcccaccgggcgaacctccgagttccgccgctaccaggaaccgggagcaagcacctgtctccccactgattgattcatccgttgcggagcaacgccacgtaatcgaccccaacctccgtttcttcaccatgagctgcacactggtgcgtcgagattatggaacgaactcggttcagcgagtgttaggaggcgggcgaggggggacactgcagcatcggggtccggattagtattctagtagggcgcgcgacaggtgatatccgacgaaaggggaggcgaggccgcggaaggagcagaaccccatcgacgacgatggacggacgcatcggaa

SEQ ID NO: 91411 - DNA, 2627 bp, Zea Mays
ctactagtttgcaaagcacgttgggccttgagagcccatatatcccggtacagcaagcaattcagggagcggaagcggccgatccgcggggcgacgaaccgggtacacacgacacgacaaagagaggatgcatgcaccaccatgcgcgggagggggaagaggagtcagtgagacgaggccgcggaaccccgtgccatcggatcgaggcagacgatgcccgtgcaggacgacgacgagagcgtctcttggttggtgcatggctccgccggggacgcgccggcggtgctgctgcacggcagcctggacatctggatccacgaggcgaggaaccttcccaacaaggacatcctgtccaagaggatgcgggacctgctgtgcaagccgtcggagggcatgaccagcgacccgtacgtgacggtgcaggtcgcctccgcggtggtggcgcgcaccttcgtcatccccgacgacgagaaccccgtgtgggcgcagcagttcctggtgcccgtcgcgcacgaggccgccaccgtcaacttcgtcgtcaaggacagcgacgtcgtgggcgcggagctcatcggcgtcgtcgccgtccgcgccgaccagctgcaggccggggacatggtcgagggcgcgtacccggtcctggagcgcaacggcaaggagtgcgcgccgggggccgtgctccggctgtccgtgcagtacgtgcccgtggcgaggctcaccatgtaccaccacggcgtcaccccgggcccggacttcgccggcgtgcccaggacctacttcccgctgcgccggggcgggaaggtcacgctgtaccaggacgcgcacgtgcccgacggaacgctgccggaggtaaggctcggcaacggcgactgctaccggcacggccagtgctggcgcgacgtctacgacgccatatgccaggcccggaggctcatctacatcaccgggtggtccgtgttccacaccatccacctggtgcgcgacggccacgacgacatggcgctcggcgacctgctcaggaggaagtcgcaggagggcgtgcgggtgctgctgctcgtgtgggacgatcccacgtcccggagactccttggcatcaagatggaaggttacatgggcacaagggatgaggagacccggagatttttcaagcactcttcggtccagatactgctttgcccacgatctgcagggaagaggcacagctgggtgaagcaacaggaaacaggcactatctttactcatcaccagaagacagtgatcttggatgctgatgctgggaatcatagaaggaagattgttgcttttgtgggaggacttgatctatgtggaggccggtcgcataatgattcgctgctgtggatcaacaagatacctgatattatcgctattgacgacgaaatctattcaaacgacgatgatccagagagatgggacgtgcagattttccggtcaattgattcgaattctgtcaagggttttccaaaagatccacgggaggccactagtaagaatcttgtttgtgggaaaaatgtactgattgatatgagcgtgcatacagcatatgtgaatgccatccgaggtgctcaacatttcatctatattgagaaccagtacttccttggctcttcatttaactgggattcacatagagatgttgttccaatgtggcctgagggaaatcctactggtactcctacgcaaaggattctttattggcagaaaatgacaatgcaaatgatgtatgagataatctataaggccttgaaagaagtaggactagatggtacatatgagccacaggattacctgaatttcttctgccttggtaaccgtgaagctgaggacactacttgcacatctagtggaccattctcagccagtaacccacaggaccaagctcggaagaataggagattcatggtgtatgtgcactcgaaaggcatgattgtggatgatgaatatgtgataattggatccgctaacatcaaccagagatccatggaaggaactagagatacagagattgcaatggctgcataccaaccccagcatacatgggcaaatatgctttctgctcctcgtggacagattttcgggtacaggatgtctctatgggcagagcacattggagccattgaggagagcttcaccagaccggagagcctagagtgcacgaggcaggtgcgtcacatcggacagcagaactgggagaaattcatctccagccatgtgaccgagatgaagggccacctgctcaagtaccccgtcagcatcgattccaggggcaaggtgaatcctctgtctgggtgtgccacattcccagatcttggcgggaacatctgcggctccttcctgaatatccaagagaacctcacaatatgagcagtgcttataggtcacccaagtcactgcagtgacattgaccccaccttcagcattgtatcagcagaaaagaaaactccatatttcctgaatcgattcaagagatcacctagctttctgtaggaaggtcaacaccagagattaataggttagtaccttgtaaccaacaacagggtcatcagtggttcgtcagttcagttcgcatggtgcatccaagcaaaatctaaatgtgactgctattttat

SEQ ID NO: 91412 - DNA, 783 bp, Zea Mays
cagaggaatagaaaaaacagaacaaaacaaaaaggttcaggctctttattattatttaactaattctgtttgatcacaggtgattgatatgcttctgttcaacgcgacggaggagctgaacaacatagtcgaacatgcaaagcagcgccatcatgtgattgggcagtatgtgatcggccaagagggcctggtgcacgagctggggtcgaaggatctagggaactctgactttctgaagaaattctacacaagcaattacttctgatctgtgttgcagatttacaacatctggtatactccgggtggtgctctgaataagacgacactgaggacctatcaggaccgattgtttcgcactggaggttttgatctatttggctcttgaatcctctgttcaatgtgatactgctgtcagctgtttgtcttgtttactgttgtacttatcaaattgatgttgatgttttagtcgattcgagtaatcgagtctacaagattgaactttgttgctacagcgagtaccgagcagtgccccccccccccccctttttttttttagaaacagccctcagcttttagtagagaaagggactaaacatgtcttccaacataaaaactaagggcctatttgttttagcttttttgttttttgttaagcatgttcgcttggttttaatttataatgggttctactccttctacagtgttttttttttggtattgtgtccgcaggatttcaagctatgattcttgttccaacataatacttgccatgcaatggctgaa

SEQ ID NO: 91413 - DNA, 1081 bp, Zea Mays
ctctttccggcccaaccacgaaccactcctcctacagaaatcacctgccggcctggcctttccgtagctacaaccgaagccaccaccagcagtccagcacgactagcggaataatatccaccggcgacgggaacgggaggcggcgcggccggagattcgaagcgatggcgttcacgatgcgggcagtgaaggtgcctccgaactcggcctcgctggaggaggcccggcaccgcgtcttcgatttcttcaagcaggcatgccgctctatccccaccgtcatggagatctacaacctcgacgacgttgtcacgccctctcagctccgctcgaccatcgctaaggagatccgtaaaaaccagaacgtcaccaaccccaaggtgattgatatgcttctgttcaacgcgacggaggagctgaacaacatagtcgaacatgcaaagcagcgccatcatgtgattgggcagtatgtgatcggccaagagggcctggtgcacgagctggggtcgaaggatctagggaactctgactttctgaagaaattctacacaagcaattacttctgatctgtgttgcagatttacaacatctggtatactccgggtggtgctctgaataagacgacactgaggacctatcaggaccgattgtttcgcactggaggttttgatctatttggctcttgaatcctctgttcaatgtgatactgctgtcagctgtttgtcttgtttactgttgtacttatcaaattgatgttgatgttttagtcgattcgagtaatcgagtctacaagattgaactttgttgctacagcgagtaccgagcagtgccccccccccccccctttttttttttagaaacagccctcagcttttagtagagaaagggactaaacatgtcttccaacataaaaactaagggcctatttgttttagcttttttgttttttgttaagcatgttcgcttggttttaatttataatgggttctactccttctacagtgttttttttttggtattgtgtccgcaggatttcaagctatgattcttgttccaacataatacttgccatgcaatggctgaa

SEQ ID NO: 91414 - DNA, 390 bp, Zea Mays
atgatgggggcgcatcagatcatcgctcaatggcagcagcatgggcgttctcctcctgctggtgctcctgctggatgcgggcgtcgtcctcccagccgtgctcctagcagcagaggctccagcagcagaggagaagaggcaggatgcgggcgtcgtcctcctagttatgctcctgctgggcggtgcgctgtgctcctactggtgctcgacggctggagcctgctgcctggtggtgctcggcggatgagcaggggatccgatcgggtaggggatgaggatgagatgaccgatcggatcggatgggcaggggatgaggatgagtggatgaccgaccggatgagctggtttgctcggcggctgccggctgggggatggggattaggtcattag

SEQ ID NO: 91415 - DNA, 183 bp, Zea Mays
actacacaaccagattcttcagcagcagatggatctgttgaagcgccgtttgacaaagccaccaaagagcagcagcaaacaagctcaaagtcttcgctaactactaatctcataaagcttgaattttctcattgttatgtttccttctcctagcaaagttaagatgtttgcacatttctagct

SEQ ID NO: 91416 - DNA, 116 bp, Zea Mays
ctttcttggagaagatccatttttttaagatgcaatgcaaccttagattctaactccttgttccaactaccaacccaacgtgtggtatgtgaatttatggattatacgaaactaat

SEQ ID NO: 91417 - DNA, 1600 bp, Zea Mays
ggacgcatgtgaccgtggaattccattcctcgtgcgcgattaggttgagacgtcgtgatcctcgtgcgcccgccgtacaaacccgtgatcctaattgtgctgatggatcgattggaaatgcaggacgactcgaagagatccaataggcccaaatattctaagtttacgcagcaagagcttccagcatgcaagccactgctaactccagcaattgtcatttccgccttcttactggttggcatcctattcgtcccaattggtctcgcatcgctttctgcgtcacaagagattgtggagctggtagatagatacgatacaagttgtgtgcccgtggctgacaaagttgggttcattcagaacactaaaacggacaaatcatgcacaagaactctaactatccctaagcatatgaagagcccaattcaaatatattaccagatcggtgacttctatcaaaaccatcgacggtatgtgaaaagtcgcagtgataaacaattgcgatataaagatgctgcacacttgacaaaagattgtgagcctgaagtttatagtgctggcggtgccccaatcgttccatgtggcctcgttgcttggagtttgttcaatgatacatatacaatttcggtcaacaagaaagctattgtagtgaataaaaaggatatagcctggcagagtgacaagaagaaaaaatttggcagtgatgtttatcccagtaactttcagaacggaaatcttataggtggcgctaagctaaatgagagcataccgctaagtgagcaagaagatctcattgtttggatgagaactgctgccctcccaactttcagaaagctttatggaagaattgagacagatattatggaaaatgatgaactcacagtggttatacagaacaactataacacatacagttttggagggtcaaaagcactggtcctctcaactacatcttggattggaggcaaaaataatttcattggtttcgcatatctgattgttggtggtttttgccttttccttgcactggtttttgtagttctctacatgattaagccaaggactcttggagacacctctttcttgtcatggaataggggtaccatggactatccaagctaatacatcgaaacattctctttataaaaatagtggaaggacccattgccaattggactgcactgcagagtctcatgcattgctcacctcaaagaatgacactgcaaacaaaggtggaaacgatgttactcctatctgttacggatgcactacctgtgtctgataaaggaaagtacaattctagcatatgatacctcaaacttgattaattatagataaaagaagttcagcttgtgtttcagaaacgtcatgctgagtacaattctagcatatgataacttactgcagcttggtaattacgatttactagctgcacattcccaaatctgcagcatgtgcgttcaacgatgaggtgtttggacgaaggagttttgcaccttcttccattgttaagagcagtagatggtgaggaagtacctggagaggtcgtggtgtcgacggagaagctggcgagggggatgacgaacgacttaatcctccccgt

SEQ ID NO: 91418 - DNA, 1664 bp, Zea Mays
tccagtctccctctcctctcttcgtcctcactcctcgacgtttcgtcggggtctctcgccgtcgctctctctgctctccaccatcctcctccccctcccctcgacctctcatcctcctcctgcttccccgcccggtcaacccataatccaaggcatccctgtgctgatggatcgattggaaatgcaggacgactcgaagagatccaataggcccaaatattctaagtttacgcagcaagagcttccagcatgcaagccactgctaactccagcaattgtcatttccgccttcttactggttggcatcctattcgtcccaattggtctcgcatcgctttctgcgtcacaagagattgtggagctggtagatagatacgatacaagttgtgtgcccgtggctgacaaagttgggttcattcagaacactaaaacggacaaatcatgcacaagaactctaactatccctaagcatatgaagagcccaattcaaatatattaccagatcggtgacttctatcaaaaccatcgacggtatgtgaaaagtcgcagtgataaacaattgcgatataaagatgctgcacacttgacaaaagattgtgagcctgaagtttatagtgctggcggtgccccaatcgttccatgtggcctcgttgcttggagtttgttcaatgatacatatacaatttcggtcaacaagaaagctattgtagtgaataaaaaggatatagcctggcagagtgacaagaagaaaaaatttggcagtgatgtttatcccagtaactttcagaacggaaatcttataggtggcgctaagctaaatgagagcataccgctaagtgagcaagaagatctcattgtttggatgagaactgctgccctcccaactttcagaaagctttatggaagaattgagacagatattatggaaaatgatgaactcacagtggttatacagaacaactataacacatacagttttggagggtcaaaagcactggtcctctcaactacatcttggattggaggcaaaaataatttcattggtttcgcatatctgattgttggtggtttttgccttttccttgcactggtttttgtagttctctacatgattaagccaaggactcttggagacacctctttcttgtcatggaataggggtaccatggactatccaagctaatacatcgaaacattctctttataaaaatagtggaaggacccattgccaattggactgcactgcagagtctcatgcattgctcacctcaaagaatgacactgcaaacaaaggtggaaacgatgttactcctatctgttacggatgcactacctgtgtctgataaaggaaagtacaattctagcatatgatacctcaaacttgattaattatagataaaagaagttcagcttgtgtttcagaaacgtcatgctgagtacaattctagcatatgataacttactgcagcttggtaattacgatttactagctgcacattcccaaatctgcagcatgtgcgttcaacgatgaggtgtttggacgaaggagttttgcaccttcttccattgttaagagcagtagatggtgaggaagtacctggagaggtcgtggtgtcgacggagaagctggcgagggggatgacgaacgacttaatcctccccgt

SEQ ID NO: 91419 - DNA, 91 bp, Zea Mays
gctggtggatcgaggtcaccggcgtcggggacgggagacgaggtcgctggatcggggcggcgccgtgacagaggacaggaggagccaaatc

SEQ ID NO: 91420 - DNA, 1790 bp, Zea Mays
cacccgtcggtaaatgcaaagatcgcaagtccacggcccaccccccaaatcggccaatctccacttcttaagcctccctgttgcctcgcacggcctccgcctcctcgtcgtccggcctcccgcgccaccaccggggcctcgccgccacgaatggagtacgagcgcatccacgagccgctcccgcgccgtcagtccggcggattctccccagctaagctgcgagcgatgcttcgcgggctagagaaacaccagcgcaacagcggcgaggacacgtcgccggaggccaacgactccggcgagctcgacgaccggaggagcttggaatgctccacctccaccgagatgtcgagcaacagcggccacaggtcaaggaaccgggccccggacgacgacagcttcgactcggagagcagctcgtcggggccgcccacggtgaagaggtcggccgcggtggccgctttgctgccgcccttctctcgcccaacgccgtccaagtgggacgacgccgagaagtggatttccagccccacgtccaaccgtactggccgtgccgggcctaccgctggaactatgccaaagaagtccgcattggcatttcctgaacatggagcccgccagccagccgttgctaaggtggtcacggatgtgcctactatcgctggaccattggttaagaattcagatggtcttgcccatcctgatttgcttaaacttgcacacgatgcttcaatagttgatggaccagctcctgcagttaggtctgtctctatgagagacatggggaccgagatgactccaattgccagccaggagccttctcggaccgcgactcctatgattgcatccagtccaacctcctctcggacaccaactcctcaacgcaccacagaattcagtgtgagcaatatagattctaacaagatggcgatgtctgaagaggaggtccatataagtacaagacaggaaattatggatcttggcgaaaggttaggcaagactactatagctgcatgggcaagcaaggaggagaaagctgctgcacgttctacggatactgcagccgataatgctgttgatgtcaacagggagaatcgagcggcagattggcaggaggcagagaaggcaaagtatcttgcaaggtttcatagggaggaggcaaagatccaagcttgggaaaatctccagaaagcgaaaattgaagctgaaatgaaaaggatagaggccaagatcgagcggaaacgggcgcgcgagcaagacaggctcgccagcaaactggcagcggtgagccaccgagcggaggcgaagagggaggccgcggaggcgaggcgggaccaggaagccgcgagaacggaggagcaggcggctcagatccgagaaaccgggcacacgccttcctctttctcatgctggtgctggtgcctgtgactctgattccttcactgcatgaccagcacagcacgtcacccgactgtaacatagcatgacccgtgagactgtgatctccggccatggtagaaaaatttgctcactgtacgacttgtgtagtgccttggtctaatggtgtccagttttttggtacctcgcgattaatatgggctgttaggccggttgggctgtggacggtagataaggcccgtagaggatttttggagatgggctcggatcgtcagctcggcctaggaattggatcgcaggcaaatcccaacggctcctgtcgttccttcccatgaacaggaggaaaaccttctggttcttttttttcttcagaaaggaggatcccccatttcatt

SEQ ID NO: 91421 - DNA, 1902 bp, Zea Mays
cagacgcagaattcttgcgtctcgctcggtcgctagcgcgcaatctgccgccgccgctaaatcgcattaaattaattaacaaatcccaccgccacaaatctacaactacaagacccacacacccgtcggtaaatgcaaagatcgcaagtccacggcccaccccccaaatcggccaatctccacttcttaagcctccctgttgcctcgcacggcctccgcctcctcgtcgtccggcctcccgcgccaccaccggggcctcgccgccacgaatggagtacgagcgcatccacgagccgctcccgcgccgtcagtccggcggattctccccagctaagctgcgagcgatgcttcgcgggctagagaaacaccagcgcaacagcggcgaggacacgtcgccggaggccaacgactccggcgagctcgacgaccggaggagcttggaatgctccacctccaccgagatgtcgagcaacagcggccacaggtcaaggaaccgggccccggacgacgacagcttcgactcggagagcagctcgtcggggccgcccacggtgaagaggtcggccgcggtggccgctttgctgccgcccttctctcgcccaacgccgtccaagtgggacgacgccgagaagtggatttccagccccacgtccaaccgtactggccgtgccgggcctaccgctggaactatgccaaagaagtccgcattggcatttcctgaacatggagcccgccagccagccgttgctaaggtggtcacggatgtgcctactatcgctggaccattggttaagaattcagatggtcttgcccatcctgatttgcttaaacttgcacacgatgcttcaatagttgatggaccagctcctgcagttaggtctgtctctatgagagacatggggaccgagatgactccaattgccagccaggagccttctcggaccgcgactcctatgattgcatccagtccaacctcctctcggacaccaactcctcaacgcaccacagaattcagtgtgagcaatatagattctaacaagatggcgatgtctgaagaggaggtccatataagtacaagacaggaaattatggatcttggcgaaaggttaggcaagactactatagctgcatgggcaagcaaggaggagaaagctgctgcacgttctacggatactgcagccgataatgctgttgatgtcaacagggagaatcgagcggcagattggcaggaggcagagaaggcaaagtatcttgcaaggtatagttgatcctattttggtctgttcatcttgagaataacatttaaagacacacataatatttaatgctttgcactgcaataatatacagaaactaggtttaggatcatctgggctctgtggtaaagaactgcagaacgtacggaagctaggcgaaacaggaggttgcagatttattgtttctttgaccttaaacattatgcaggtttcatagggaggaggcaaagatccaagcttgggaaaatctccagaaagcgaaaattgaagctgaaatgaaaaggatagaggccaagatcgagcggaaacgggcgcgcgagcaagacaggctcgccagcaaactggcagcggtgagccaccgagcggaggcgaagagggaggccgcggaggcgaggcgggaccaggaagccgcgagaacggaggagcaggcggctcagatccgagaaaccgggcacacgccttcctctttctcatgctggtgctggtgcctgtgactctgattccttcactgcatgaccagcacagcacgtcacccgactgtaacatagcatgacccgtgagactgtgatctccggccatggtagaaaaatttgctcactgtacgacttgtgtagtgccttggtctaatggtgtccagttttttggt

SEQ ID NO: 91422 - DNA, 1742 bp, Zea Mays
cagacgcagaattcttgcgtctcgctcggtcgctagcgcgcaatctgccgccgccgctaaatcgcattaaattaattaacaaatcccaccgccacaaatctacaactacaagacccacacacccgtcggtaaatgcaaagatcgcaagtccacggcccaccccccaaatcggccaatctccacttcttaagcctccctgttgcctcgcacggcctccgcctcctcgtcgtccggcctcccgcgccaccaccggggcctcgccgccacgaatggagtacgagcgcatccacgagccgctcccgcgccgtcagtccggcggattctccccagctaagctgcgagcgatgcttcgcgggctagagaaacaccagcgcaacagcggcgaggacacgtcgccggaggccaacgactccggcgagctcgacgaccggaggagcttggaatgctccacctccaccgagatgtcgagcaacagcggccacaggtcaaggaaccgggccccggacgacgacagcttcgactcggagagcagctcgtcggggccgcccacggtgaagaggtcggccgcggtggccgctttgctgccgcccttctctcgcccaacgccgtccaagtgggacgacgccgagaagtggatttccagccccacgtccaaccgtactggccgtgccgggcctaccgctggaactatgccaaagaagtccgcattggcatttcctgaacatggagcccgccagccagccgttgctaaggtggtcacggatgtgcctactatcgctggaccattggttaagaattcagatggtcttgcccatcctgatttgcttaaacttgcacacgatgcttcaatagttgatggaccagctcctgcagttaggtctgtctctatgagagacatggggaccgagatgactccaattgccagccaggagccttctcggaccgcgactcctatgattgcatccagtccaacctcctctcggacaccaactcctcaacgcaccacagaattcagtgtgagcaatatagattctaacaagatggcgatgtctgaagaggaggtccatataagtacaagacaggaaattatggatcttggcgaaaggttaggcaagactactatagctgcatgggcaagcaaggaggagaaagctgctgcacgttctacggatactgcagccgataatgctgttgatgtcaacagggagaatcgagcggcagattggcaggaggcagagaaggcaaagtatcttgcaagaaactaggtttaggatcatctgggctctgtggtaaagaactgcagaacgtttcatagggaggaggcaaagatccaagcttgggaaaatctccagaaagcgaaaattgaagctgaaatgaaaaggatagaggccaagatcgagcggaaacgggcgcgcgagcaagacaggctcgccagcaaactggcagcggtgagccaccgagcggaggcgaagagggaggccgcggaggcgaggcgggaccaggaagccgcgagaacggaggagcaggcggctcagatccgagaaaccgggcacacgccttcctctttctcatgctggtgctggtgcctgtgactctgattccttcactgcatgaccagcacagcacgtcacccgactgtaacatagcatgacccgtgagactgtgatctccggccatggtagaaaaatttgctcactgtacgacttgtgtagtgccttggtctaatggtgtccagttttttg

SEQ ID NO: 91423 - DNA, 830 bp, Zea Mays
cagacgcagaattcttgcgtctcgctcggtcgctagcgcgcaatctgccgccgccgctaaatcgcattaaattaattaacaaatcccaccgccacaaatctacaactacaagacccacacacccgtcggtaaatgcaaagatcgcaagtccacggcccaccccccaaatcggccaatctccacttcttaagcctccctgttgcctcgcacggcctccgcctcctcgtcgtccggcctcccgcgccaccaccggggcctcgccgccacgaatggagtacgagcgcatccacgagccgctcccgcgccgtcaggtgcctcgcctcgccgcgatcccccccccccccccccccctgaattcgctccccgggtgctccgttcctggatcttgtcttcgcttgggcgctctcctccccccctgccgccctgccgccgggtgcttgctcgtcttgggcgtccgatttgcttctgctctcgcgccgtcttgggtccgtcgttttcttgggccaaaggttcgtagtgcgtgtgctattcgcgaggtggctttttaatggttattaggttgtcggcctaggaacggaggcgcgcgcgcgcgcgcctatcgtcgctgaactcgatgatggttcagtttggtcggacaggttggttttctttcttgcagggtttcctttccccctctctctttcttccccatccttctgctctctattgaattcggctggagcctagagccttggtgcttgtgcggctaaatttgacgcgcatttcgccgaaaagctgctgcggctctctcatgcgtctgatgttactcgccactgttcctgttaaaattt

SEQ ID NO: 91424 - DNA, 479 bp, Zea Mays
cgagcgcgagcccagccatacgacctcggcaggacacctcacagcatcgtatccagcaactccagactcagctagatgatgagaggaggcaacgtgaggagctagagaagaggatggcggagatgttcgcgtacatgtagagccttggcgccgcacagggtcatgctccaccacctccgttgttccctgcagctgaccctacagagttcactactcctggtcaatcggcggcgtcgaacaaccctcatgcttcgtccagcccttcgccgaaccagtccagatgcccacctcgttgatgatttgttttgtgatgatccagacttacctttatgagtgttggtgatgtttgttacactttatcttgtgagatacttggtgatgttagtgatgatgcagacttgtatctgttttgtgatgatcctgactttagtgagacttgtgatctgttttgtgagactttgtgatatatatggtgttga

SEQ ID NO: 91425 - DNA, 762 bp, Zea Mays
atgcggtccataccttgcgtccttgccagtttccactgctgctggcggctgggcgtctggggtgatcggtgtggcctagttgttgcgtcgatcttggactcttggtcgattctcacaaatcagaacagaaggcggcactgggaattgcttgtgatcgagagaacgtgtgataggatcatatggttggctatttcagaagagtcggtggcgaacctgcagctgctcgtgagctggaaacttgcgaggcattcggggtgtgccactgtgcgcgtaaaagcgcgcacctgtctgtgtgatgatcggtcaccccccaacccagtcccagatgacaggacgaagcaacttgagacaagcgattggagttcggttgatgtggcaacgaggtggattgccacaacccacacacttacacctgccttgattagctacagatacgcactcttcgacggattcattgactcgtcgtcggtgagatctcagaggacgggttcatcttcccgtagctcatgctctcgtcgaccgaacgagcaggagttggagattatgaggatgcgtgaagagatgagacaacaacgcgaatttatggaggcttgcaatgctcataatcaagcgatgtatcaagttacgcctgaagcgggtggcagtgggtctgatccagcagcagggactggatttgttgactcgctcttcgcgttccctcctcctggtggtgaaggcggcagcggtcaaagctctaaccacccaagtggtggttacctctaa

SEQ ID NO: 91426 - DNA, 1582 bp, Zea Mays
ttagtttagtggtgtaagtactgtctccttaacttatcaaccacagtttgaatacccttgtttttcatttattttttagatacttttctggacatcctaaacataatagctggcggtagtctagctttcggcgtttcaaaatccctatgaacatcaacagacgatgatgattagcaactactagtgctcggtagcactagtagtccacggcagacgtggcagaacatgtgtaccggccggcggaccggcaagctaggtgagcagaccagggccccctcttttccctcccagaattcaagcaccaatacgagggcggaaaaagaataaaaagagtagggcgcggcagcagcggcggcgagagaataaaagcagcggcagtgggcagaggcgagagggcactcgactcctccagcgtccaacgccatccatcccgacctcgcaacgcaagcaaagaaagcccaggcaggcgtgtgcacggcgcggcggggcaaccaagggtgggtgaacccgcagagaggggcagctagcttccttccttcccaggcgcgcgggagagattagccgcagtataagtagccagccagccagccatgtcgtcggtgtcgtcgtcgctgaccaacttcctgctctgctgcttctacccgtcatccgccggccaccaccgcggcggcgcctactactacagcagccacccgacgagcgccagcaccctgcactaccacgagggcaccttcgccgggcgcagggccatgggccggagcagcaggccgctgtcgctgcagacggtggagctgaaggtgcgcatgtgctgctcgggctgcgagcgcgtggtgaagcacgcggtgacgaggctgcgcggggtggactccgtggaggtggacgtggagatggagaaggtgacggtgacggggtacgtggaccgccaccgggtgctcaaggaggtccggcgcgcggggaagaaggcggagttctggcccaacccggacctgccgatgcacttcacctgcgccaaggactacttccacgacgaggagtcgtaccgccgcacctacaactactaccgccacggctacaacggcgacaagcacggacagctccacgagccccaccgcggcgccgaccccgtcagcaacatgttcaacgacgacgacgtcaacgcctgctccgtcatgtgatctcagtcgcgctctcgtcgtcgacaggcggtgtgtgtgtgtgtgtatgtgctcgtcagctcgtgcgcgtgtaacagaaccgtaccaaatggatggatgagtagtagcaatgcaatcgacaacgggcaatggccactctctatccactccacggtccgagcgccatgcgtgcccatggtgttcctgttcccccgactgtccactgttcagacagggacaaagcaaatgggacaccagagcatcttcctgcgacagcgaaaggcgcgcggctttttactagtcgatctgctccattttcgtgcgcgcccgcgcgggagagctgagcatagagaaccctgaggcgtaggcgtagcagtagccagtagccgctagtactaggtaggtttggtcgtcggcgatcgtggtcg

SEQ ID NO: 91427 - DNA, 126 bp, Zea Mays
ttttattttgtatttcaattttagatattttaaattcaagtttggctttaaatttcaaactcaaatttaaatacacagatcaaaagctcagcatgaatgcaactataactttatattattttttta

SEQ ID NO: 91428 - DNA, 1229 bp, Zea Mays
ccgcgccatccttgccccgcgcgcgcccgcacatctcgcaagggcgccccttcccctgcccccgtcgtctccgcgcaagggcctgtcgtctcgcaagggcgccccttcccctgcccccgtcgtctccgcgccatccttggatccggggttcgctcaggttgcctcgcctcgcaaggtccccaccacgcgcggtcagggagcatggtgggtggggaagacagggaggagcagaggagtaggtgaagctcaacatcgacaacatgttcacggcgctcgagtccctcaagaagaagggcaacaagaacagggcggatgggccgtcctccaggaagaatcatggcgcagggcccgcactacagcagagcaggaactgcctcaaaggaggtcttctgggctcccgtgccgctcactactgtctcgcgtccttcaccgccgacgactggctcgacaaccggatctagggaccttcctcctgatgcaggcgcatggcgccatggtattgggcgagggcgtcggtgccgcgcatgcttgagttcgccgagagggcgccaagctcgagcgacgcgattggcactggacttgctttaagattgattggaaatgctgatgcctggatctgcggggcaatagagttttggaagtgcgatgcttgggagcaaattttccagtcaaaagtgcaggacatctgtgatgatgaactttcttggttccgcaaggctcagttgcttgttgtggatcaagcaacctacaagatggccagagaaagcaacatggcaggagtgaagagctttgataggctttcagcttacaactttgatttgtttggagacatttttaatgaaattcaattaaagcatttgtgtattgttttccaaagaggggttgaccaagatatggtaattctgatggctgccaaagcttctcatacagaaaatcaggatgacatagatgccataatagttggtatgatggctgatccaaaggaggctcgtgctggtgtccaagagattcattttctgctagtcaatccaagtaacaaaagaactgctttaacctaccttgatggagagggaagaatgcatcgtgttagcaagggagcaccagagcagtgcctggcaattgcacagaaattacttgatataagtgatgaagttattttaaattcttatgacacactggttttgttgtcagttactttcccccttctttatcttgattatgagttttga

SEQ ID NO: 91429 - DNA, 243 bp, Zea Mays
atggaggagggcgcccagccagcgtcgttagcggctttctttgattgtgagcaaccactaatatctctccctccgatttctcctggactaccagttggcgcggaaattgttgctggtgctcattcatatggaatggatgatgtttctgttgcggattgctctccttcaagtctaaacatgcgattttcagatcctgcgtctagtagtggaatagagattagttctattccattatttgtttaa

SEQ ID NO: 91430 - DNA, 1581 bp, Zea Mays
gcagtatcgatggccccctcccacatgggatgtgcatgcacccccactatgccagttgccctatatataaaaccgcctggaccgaccggagtcccactagctccactccaccacacacaccgcgcagctagctgtcaccggagcaagaaggaagaaaaaccagcggcaccgatcgatcgacgacacgcgcgcgatcgaggtgaggagcgaaagaaaaggtggccttttcgaagccgccggacggagtgtagcgctagctagctccccaggccggagaggaggatggtgggacgaggagcggcgacggccctcgtgtgggcggcggtggtggcggtcgcgacggtggtgtcgcgggcgcagcagctgcaggtggggttctacgacacgctgtgcccggcggcggagatcatcgtgcaggaggaggtgagcaaggcggcgtccggcaaccccggcgtcgccgcgggcctcctgcgcctccacttccacgactgcttcgtcagggggtgcgacgcgtcggtgctgctggactcgtcggcgggcaaccaggcggagaaggacgcggcgcccaacgccagcctgcgcgggttcgaggtcatcgacagcgccaagacgcggctggagcaggcctgcttcggcgtcgtctcctgcgccgacgtcctcgccttcgccgcccgcgacgccctcgcgctggtcgggggcgacgcgtaccaggtgccggcggggcggagggacggcaacgtctcctcggcgcaggaggcgggcgcgaacctgccgccgccgacggcgagcgcgagccagctgacgcaggcgttcggcgccaaggggctgagccaggccgagatggtggcgctgtcgggggcgcacacggtgggcgcggcgcgctgcagctccttcgcgccccgcctctactcgtacgggcccagcggcgcggggcaggacccgtccatggaccccgcgtacctggcggcgctggcgcagcagtgcccgccgcaggggaccggcgccgccgacccgcccctccccatggaccccgtcacgcccaccgccttcgacaccaactactacgccaacctggtcgccaggcgcggcctgctcgcctccgaccaggcgctgctcgccgacccggccaccgccgcgcaggtgctcgcctacaccaacagccccgccaccttccagaccgacttcgtcgccgccatgatcaagatgggtgccatacaggtgctcaccggcacagccggcaccgtccggaccaactgcagggtggctagctagctagctcatccatgagaatgtacctgtagactcatgtgcttaaaatcatacgacgaaactgtacgtacggcgtagagtggtgtggcggggtccaatgattcagattgtacgtacgtgtccatcgatccaactgtagttgtgtacgcagtacagtacgtgctagctacggatcagttgcttatatatagcttgtgcgtttttttacactttcttttgtccttttggtttataatttttattaagatatacaaatatttctcttcagattcggatcgaatacaaatattaaaaatggttcgttctttttca

SEQ ID NO: 91431 - DNA, 1503 bp, Zea Mays
gcagtatcgatggccccctcccacatgggatgtgcatgcacccccactatgccagttgccctatatataaaaccgcctggaccgaccggagtcccactagctccactccaccacacacaccgcgcagctagctgtcaccggagcaagaaggaagaaaaaccagcggcaccgatcgatcgacgacacgcgcgcgatcgaggtgaggagcgaaagaaaaggtggccttttcgaagccgccggacggagtgtagcgctagctagctccccaggccggagaggaggatggtgggacgaggagcggcgacggccctcgtgtgggcggcggtggtggcggtcgcgacggtggtgtcgcgggcgcagcagctgcaggtggggttctacgacacgctgtgcccggcggcggagatcatcgtgcaggaggaggggtgcgacgcgtcggtgctgctggactcgtcggcgggcaaccaggcggagaaggacgcggcgcccaacgccagcctgcgcgggttcgaggtcatcgacagcgccaagacgcggctggagcaggcctgcttcggcgtcgtctcctgcgccgacgtcctcgccttcgccgcccgcgacgccctcgcgctggtcgggggcgacgcgtaccaggtgccggcggggcggagggacggcaacgtctcctcggcgcaggaggcgggcgcgaacctgccgccgccgacggcgagcgcgagccagctgacgcaggcgttcggcgccaaggggctgagccaggccgagatggtggcgctgtcgggggcgcacacggtgggcgcggcgcgctgcagctccttcgcgccccgcctctactcgtacgggcccagcggcgcggggcaggacccgtccatggaccccgcgtacctggcggcgctggcgcagcagtgcccgccgcaggggaccggcgccgccgacccgcccctccccatggaccccgtcacgcccaccgccttcgacaccaactactacgccaacctggtcgccaggcgcggcctgctcgcctccgaccaggcgctgctcgccgacccggccaccgccgcgcaggtgctcgcctacaccaacagccccgccaccttccagaccgacttcgtcgccgccatgatcaagatgggtgccatacaggtgctcaccggcacagccggcaccgtccggaccaactgcagggtggctagctagctagctcatccatgagaatgtacctgtagactcatgtgcttaaaatcatacgacgaaactgtacgtacggcgtagagtggtgtggcggggtccaatgattcagattgtacgtacgtgtccatcgatccaactgtagttgtgtacgcagtacagtacgtgctagctacggatcagttgcttatatatagcttgtgcgtttttttacactttcttttgtccttttggtttataatttttattaagatatacaaatatttctcttcagattcggatcgaatacaaatattaaaaatggttcgttctttttca

SEQ ID NO: 91432 - DNA, 1768 bp, Zea Mays
gatggccccctcccacatgggatgtgcatgcacccccactatgccagttgccctatatataaaaccgcctggaccgaccggagtcccactagctccactccaccacacacaccgcgcagctagctgtcaccggagcaagaaggaagaaaaaccagcggcaccgatcgatcgacgacacgcgcgcgatcgaggtgaggagcgaaagaaaaggtggccttttcgaagccgccggacggagtgtagcgctagctagctccccaggccggagaggaggatggtgggacgaggagcggcgacggccctcgtgtgggcggcggtggtggcggtcgcgacggtggtgtcgcgggcgcagcagctgcaggtggggttctacgacacgctgtgcccggcggcggagatcatcgtgcaggaggaggtgagcaaggcggcgtccggcaaccccggcgtcgccgcgggcctcctgcgcctccacttccacgactgcttcgtcagggtcagtgcgccaagcggctaattattaagcaagctagctagccgccctcctcgagtgatccaatgcaaagtggttggtggtggcggtggtggtgtcacgtactgtggggacgggccggccgggtgcctcgattgcgcgcgtagctgcatgtggatcctccttcctctctgttcattattacgcgtattattggtattgcaggggtgcgacgcgtcggtgctgctggactcgtcggcgggcaaccaggcggagaaggacgcggcgcccaacgccagcctgcgcgggttcgaggtcatcgacagcgccaagacgcggctggagcaggcctgcttcggcgtcgtctcctgcgccgacgtcctcgccttcgccgcccgcgacgccctcgcgctggtcgggggcgacgcgtaccaggtgccggcggggcggagggacggcaacgtctcctcggcgcaggaggcgggcgcgaacctgccgccgccgacggcgagcgcgagccagctgacgcaggcgttcggcgccaaggggctgagccaggccgagatggtggcgctgtcgggggcgcacacggtgggcgcggcgcgctgcagctccttcgcgccccgcctctactcgtacgggcccagcggcgcggggcaggacccgtccatggaccccgcgtacctggcggcgctggcgcagcagtgcccgccgcaggggaccggcgccgccgacccgcccctccccatggaccccgtcacgcccaccgccttcgacaccaactactacgccaacctggtcgccaggcgcggcctgctcgcctccgaccaggcgctgctcgccgacccggccaccgccgcgcaggtgctcgcctacaccaacagccccgccaccttccagaccgacttcgtcgccgccatgatcaagatgggtgccatacaggtgctcaccggcacagccggcaccgtccggaccaactgcagggtggctagctagctagctcatccatgagaatgtacctgtagactcatgtgcttaaaatcatacgacgaaactgtacgtacggcgtagagtggtgtggcggggtccaatgattcagattgtacgtacgtgtccatcgatccaactgtagttgtgtacgcagtacagtacgtgctagctacggatcagttgcttatatatagcttgtgcgtttttttacactttcttttgtccttttggtttataatttttattaagatatacaaatatttctcttcagattcggatcgaatacaaatattaaaaatggttcgttct

SEQ ID NO: 91433 - DNA, 91 bp, Zea Mays
ttgtacgcattcgtagcttgcatgcatgggaattgggaagaaagttccatgccggatagtaactctgaaaacagaaggatagctcgccaat

SEQ ID NO: 91434 - DNA, 4670 bp, Zea Mays
tctagagatgagctacgtcttgtctatggtgtttctgagcgtacagaaagcgatggtgcagctaatttaattcagaagttgagagctataaactatgctctgggtgaactaggacagtggtgtgcttacaaggttgcactgtcattcttgacagcactacagaatgatgaaagggccaactatcaggttgatgttaagtttcaagagtcatacttgagaaaggtagttgatttgttacactgccagttgactgaaggggctgcaatgaaaagtgacagtaatgatgttgaaatgcataattctgaaaaccccaagccaaatgaacttgaggagggagagctacctgacagtcatggtgaacatgtagatgaagtcattggtgccgcagtggccgatggaaaagttaccccaagggtgcaagctttgataaaaatacttctcaagtatcagcacactgaggattttcgtgctatcatatttgtagagcgagtggttacagcattagtcctccctaaggtctttgcagaacttccatcgttgggctttatacggtgtgcaagcttgataggtcataacaataaccaggagatgcggtcgtgccaaatgcaggatacaatcacaaaatttcgtgatggccgtgttacactgttagttgcaactagtgttgcagaggaaggacttgatattaggcagtgcaatgttgtcattcgctttgaccttgcaaagactgttttggcctacattcagtctcggggtcgtgctagaaagcctggatctgactacatattgatgcttgaaagaggaaatatgtctcatgaagctttcttgagaaatgctcggaatagtgaagagacattgagaaaagaagctattgagagaactgatctcagtcatctcgatggcacttctatgctaagccctgttgatatatcacctgattctatgtatcaggttgaatcaacaggtgccgttgtcagtctgaactctgcagttggactcgtacatttttactgctcacagctgccgagtgacagatactctattcttcgaccggaatttattatgcaaaagcatgagaaaccagggggttcaacagaatattcttgcaaacttcaactcccttgtaatgccccattcgagaaacttgaaggtcctatatgcagttcaatacgcctggcccaacaagctgtttgtttagctgcttgtaagaagctacatgagatgggtgccttcacagatatgcttttacctgacagaggaagtggggaaggagaaaagactgaacaaaatgatgaaggtgatccactgcctggaacagcacgccatagagagttctttcctgaaggggttgctgaaattctacatggagaatggattttatctggaagagatggttaccaaagttcacagtttattaagttatatttgtattctgtgaactgtgtaaacattgggacttcaaaggaccctttcgttacacaactttcaaattttgctcttatttttggcaatgagctggatgcagaggttttatcgacgacgatggatctctttgttgctaggacaataataacaaaggcatctctcgtattccgtggaccaattgaaattacagaaagtcagctgatcctgcttaagagctttcatgttaggctcatgagcattgtacttgatgttgatgttgatccctcaacaactccttgggatccagcaaaagcatacctctttgttcctgtgggagctgagaaatgtatggatcttttaagagagatagattggactctagttaatagcattgtgaattctgatgcctggaacaaccctcttcagagggcacgcccagatgtctatctaggcacgaacgaaaggacacttggaggggataggagggaatatgggttcgggaagttgcgccatggaactgcatttggacagaaagcccaccctacgtatggtatcagaggagccatcgctgaattcgatgttgtcaaagcgtctggattagttcctggtcgtggatggggacattttaatgattatcaaaataaaggcaagttgttcatggcagattcatgttgggatgccaaagatcttgctggaatggttgtaactgccgcccactcaggaaaaaggttctatgtggacagtatttgctataatatgaatgcagaaaattctttccctaggaaagagggctatctgggtcccttggaatacagctcgtttgctgattactacaagcagaagtatggtgtggagttagtttataagaaacaacctcttatacgggcacgcggtgtttcatactgcaaaaatctactttctcctagatttgagcattctgaagctagcaatggagagttctcagagaatcttgacaagacatactatgtatatttaccacccgaattgtgccttgtgcatcctctccccggatcacttgttcgtggagctcagaggttaccctcaataatgagaagggtggagagcatgcttcttgcaattcaactgaaggacataattgggtatccagttcctgcaaataagatattagaagccttgactgctgcgtcatgccaggagacattctgctatgaaagagcagagctgctgggtgatgcatacttgaaatgggttgtgagtagattccttttcctaaaatatcctcaaaagcatgagggacagctcacaaggatgcggcagcagatggttagcaacatgatcctgtatcaatacgccctgaataaaaacctccaatcttatatccaagcagatcgatttgctccatcaagatgggcagctccaggagtgttacctgtatttgatgaagaaacgagagattctgaaccatccatctttgatgaggaatttactcctagcagtgagttacaaaagaacttgtatgatgactatgatggcgatagcatgcaagaagacggtgaaattgagggagattctagctgctatcgtgttctatcaagcaaaacattagcagatgttgtggaagcacttattggtgtctattatgtagctggagggaaaattgctacaaaccatctgatgaaatggatcggtattaatgcagagttggatcctcaagagatcccatcttcgaagccatataacatacctgagagcataattaaaagcatcaattttgacacattagagggtgcattgggtatcaagtttcagaataaaggcttacttgttgaagctataacacatgcatcaagaccatcatcaggtgtttcctgttaccagcgcctggaatttgttggtgatgctgtattggaccatctcattacgaagcacttattttttacttatacggacctacctccaggccgcttgactgacttgagagctgcagctgttaataatgagaactttgcaagggttgcagttaaacataagctacatgtacatcttcgccatggatcatctgcattggagacacagattcgagagtttgtgaaggatgtccaggaggagctttcgaaaccaggtttcaattcttttggccttggggattgtaaggctccaaaggttctcggagacatttttgagtctattgctggcgcaatattccttgatagtgggtgtgctacctccgtagtctggaaggtttttcagcctctgcttgatccaatggtgacgccggacacccttccgatgcaccctgtaagggagctccaagagcgctgccagcagcaagccgaaggattagaatacaaagcatcccgtacaggcaatgtagctacagttgaagtcttggttgatggcatacagattggtgtagctcagaacccacagaagaagatggcacaaaagttggcggctagaaatgcacttgttgtcttgaaagagaaggaaaccgcagcaaagaaagacactgaaaaggatggcgagaagaaaaacggttctcagttcactaggcagactctgaacgacatctgcttgagaaggcaatggccgatgccacagtacaggtgtataaacgagggtggccctgcccatgccaaaagatttgtttatgcggtaagggtaaatacatctgacagtggatggactgacgagtgcattggagagccaatgccgagtgtgaaaaaggccaaggactctgcagctgttcttctgctcgagctgctgaatcgaaattaccgtggcaagcctgatggaaaataatctttggtgatgttctgtggtggtaggtagacgtggaagcatccatcattctgattatacccccatgcagtgcttttcagcaaagcaaattaatggcctttgttgatgttcttggtggcggtattggtgatatggaggcattcaatgcaagcataagcagagctatggggagtgggattagaggattattattagttttgtctgaggtgactactaggtattttactggcgaggtactgaggtcacaactcacaaatagcagttgcaaattgcaatagaggaaatgatgataggttgatataggatattggaggcctcttattcatcgattgtataagatgtttacagaacagtgcattgatccattaaatttatattgattgatatttttatagtggatgcgcctgcagctgggaactcggggttctctatcttggcctcgccgaccaaatatcacgtacgtcgacgtccgcgaacagtat

SEQ ID NO: 91435 - DNA, 99 bp, Zea Mays
gagagcatccttttgtttttgcaatcttttgtcgtttcagattttctgaataatcaacttttgtttcctagatatatctacatttgcatactctcatct

SEQ ID NO: 91436 - DNA, 1514 bp, Zea Mays
atgcccatcccaagtcacgaattcctatccggcaggtacgccacagcttccataatgctccggctggccttcccgctcgtctcccatctcccacgccggaaaccgtccgcaatccgcccacgccctccacccgctcgacgatatgcctccgcggccgccgtcaccgcctcctccttctccccacctcactctcccttgctaccgccgctacccccggcctccgcctacgtccaccttcccttctgccgcaagcgctgccactactgcgacttccccatcatcgccctcggctcatcgtcagccccctcccgtggcgaggccgcggaagaccccaggatcgttgactacgtgaacctcttgctccgcgaggtctccgccacgcgcccggtttccgacgatggcgtgccgctcgagaccgtcttcttcggtgggggcacgccgtcgctcgtcccgccgcgcctggtcgccacggtcctcgacgcgctgcgcgccaggttcggcctgtcggcgcgccccgaggtctccatcgagatggaccccggcacgttcgatgccgccaggctcaaggagctcgtgggcgtgggcgtcaaccgcgtctcgctcggcgtgcaggcgttccaggaggacctgctgcgggcgtgcggacgcgcgcacggcgtgaaggaggtgcacgaggccgtcgcgatcgtgacggcgtgcgaggggctgcagaactggagcatggacctcatctcctcgctgccgaatcaaaccgaggagatgtgggaggaaagcttgaggtgcacggtggatgcaaggcccactcacgtttctgtgtatgatctgcaaattgagcagggcaccaagtttgggcagatgtatactcctggtgtctttcctctgccgagtgacaccgaatctgcaaacttctacaggattgcttcgaagcgactttctgaagcaggttataaccactatgagatcagtagctactgcaagcctggatacgagtgcaagcacaacctaacatactggcaaaaccgacccttctatgcctttggtcttggatctgcgagctacattaacggtgtgaggtactccaggcccagaagaacaaaggagtatgcagaatgggttcagaagttagaggatggaacgtggagacatgagtctagaagctctgatctgaaggacatggcactggatgtggttatgctatcgctgagaacagcttgggggcttgatttgcaaagtttcagtaaatcctttgggaaaagcctggcgctatcactgtgtaacacatttaagccttttgtggagagtgggcatgtaattgcaatggatatggatcgacaagccttgccacatactgattttgagttggacctgcaaaatgaagatggttttggaagcagaattgcattcatccgtctcagcgacccagatggatttttgttgtccaacgagttgatttcacttgcttttgggattatctcaccttgatctaacattaatatagatgcatttccatttgg

SEQ ID NO: 91437 - DNA, 568 bp, Zea Mays
atggggcaaagcctgtccgtcctctcctcctcctcctcccagagagacgcatgcgcatgcgctgcagacggacgggtccggcggcaacgacgacagcagagaggacatgcacggcgagacgcagacgcacgcagagatggggtgggcttgcagcctgccactgccagagagacagcagctcaggccagaaggttgcagttgcacggcaccgcgcaacggaaccccacagcaccaatgctcaactacagcacacacgatactgtgcctgtgcgtggtctatatagaaccgtacacgcacacacggatgcatggctgtctccaaggacaagggagaaaacgctacagcctacagctagcctactgcatgcttcagccttcagtctcgagctagagtcttcactcttcacccttccctactggatggaaagtactggtcctgccactgccagccaagtaaacaacagtcaagttacagtaggagtctccggctcctatcctcccccctgcgctgctctggacctgcctgccgctgcttgcttggtcccctagctcgctgccgctgctctac

SEQ ID NO: 91438 - DNA, 1446 bp, Zea Mays
gtatcaacgaggggagtgccttgcccctcgtcagcggattagatagggggcaggcagcagaggttcccggctccttcgcggcgctgcttatctcccgctcccggctcccctcctcccccgcgccgcgatgaacacagccatggccaccacctccttatccctccaaggccgcccatcccacgctcccactaggaagctctcctccccgttcctcggagcccccgcgtcctttctccggccgctggctcccacgcccgccgccggcccctcctcgcggcggacgcttgccgtcagggccatggcgcctcccaagccgggaggcaagcccaagaaagtggtgggccttataaagctggcgctcgaggccggcaaggcgacgccggcgccgcccgtcggcccggcgctcggtgccaagggagtcaacatcatggcgttctgcaaggagtacaatgccaagacggccgacaagcccggctacatcatccccgtcgagatcaccgtgtttgatgataagagctttaccttcgtcttgaagacccctccggcttcagtcctgctactcaaggctgcaggtgtcgaaaaaggttcaaaagagccacaacggcagaaggtgggaaaggtaacagtggatcaagtgcgtgcaatagctcaagagaagttgccggacttgaactgcaagagcatcgactctgctatgaggatcatcgctggcaccgccgctaacatgggcatcgatgttgatcctccaatccttgttaagaaggaaaaggtcctcttgtagtttgtttttgctggcaccaccagtgcccattttgagattatatgtgaaaggaccaagatgatcaaaagagtgaattgagtttctctaaaatatcttgtataaattaatgcctattaatgagtccatttcaccctttgtatctaagaattttttttgcatacaggtttcaatcgtatactgtcatgttaattctagcagtaaataattgaatgtaattgattaaaagtaaatgatcaaagtacaaggattaaaaatgtctcaatattttctcgaggtactaaagagtcgacattgtgcactagttttcattggagtacatgcacaaaaatgccgctccctccctgatctgcacaaagattaagtgctatctacagctaatgatacttatatggtatcataaatattggtaccttcctatataaagttagtcagacttaaagatgccttgactcggtactatgctaggattatatcgggttctagacctaggaagtatctaggaaacaaaaatcataagatacaaatgaaaaccaaatacttgacttccttaacactaaaacctttagtctctgtcaaatggtccaaaagacggccaggagttccaacctaagaaactagaaaaaaaaaacagaacatgcatcctgagactttttacttagataata

SEQ ID NO: 91439 - DNA, 1102 bp, Zea Mays
agtttccaaactcgcgcatccggtcggctggcgcgtcgtgtggaccagaaagggagcgaaatcctactcgtcgcacggggtccgcaagcttttcgtcgcctcgattcgcttccgccccatcctccttcccgacgcctcacatggcaacggccgtgcccgccgcctgcctccgcgcgccgtgctcctctccagcggccgtcgcacgccgacttggggccggtggcccgtcgctgcgcaagcggcattgcgccgtcgcgcccgtcgctgccgcctgcggccccgcgccgccgcggctgcttgacaacgaggaggcggtctgctccgtacggcggcgtgtgctggttgccggtgccgccgcgttcctctcccggcctaatccggcggcattcgcagcagaggctaagaaagggttcctgcccgtcgtcgacaagaaggctggctactctttcctctacccgttcggatgggaggaagtggctgtgcaagggcaagacaaggtgtacaaagatgtgatagagcctctcgagagtgtgagcgtcaactctattccaactagcaaggaggatatccgtgatcttggtcctccggataaggttgccgaggctctgattaaaaaggttttggcaccatcaacacagaagacaaagttaattgaggcgaaagagaatgatgttgatgggagggcttactacacttttgagttcacagctcaggctccaaactacaccagacatgcacttggtgctattgtaattgcaaatggcaaattttacacattgaccactggagcaaacgagaggaggtgggaaaagatgaaggataggctgcatactgttgtggattccttcaaaatcgaaaatagaatatgagtgcctgaattgctgtgttgtttttccttcgttgattcgctttttcttacataactgcagtgctgagatttttcagtagtaaataccgggattgtggattatgctgatcagtttcatttcgaaatgtttgttaccagacttgagcaacatttgtttgtactttatgtgtataataataatatcttgtttggatgtagatattggagcataaaattgggaattagaatcaatgt

SEQ ID NO: 91440 - DNA, 1110 bp, Zea Mays
atggcagagcatctcatctctacggctgaccacgacaggctgccggacagctacgtccggccggagacgcagcggccgcgcctgcgcgaggtcgtccccgacgcggagatccccgtggtggacctcgccgaccccgaccgcgaagccgtcgtcgccagggtcgccgaggcgtgccgcacccacggcttcttccagttgctcaaccacggggtgccggagcagctgacggcggcgatgatgtcggtggcgtacgaattcttccggctccccgcggaggagaaggccaagctgtactccgacgacccggccaagaagatgcggctgtccaccagcttcaacgtgcgcaaggagacggtgcacaactggcgggactacctccgcctgcactgccacccgctggagcagtacgtccccgactggccggacaacccaccatccttcaggaggaccgtgagcgcgtactgcagtgcggtccgggagctggggttcaggctgtacgtcgccatctccgagggcctgggcctggacggagcgtacatcaaggaggcgctgggcgagcaggagcagcacatggcggtgaacttctacccgaggtgcccggcgccggagctcacgtacgggctgcccgcgcacacggaccccaacgcgctcaccatcctgctcatggaccagcaggtggccggcctgcaggtgctcaaggacggccgctggatcgccgtgaacccgcggcccggcgcgctcgtcgtcaacatcggggaccagctgcaggtgacgtgctcttgtctcgctctcccattattcccaccctctcacctcctctctgcccctggcctccactactgcactgcacctgcacaggcgctgagcaacggcaggtacaggagcgtgtggcaccgcgccgtcgtcaacgccgacaggccgaggatgtcggtggcgtcgttcctctgcccctgcaacgacgcgcgcatcggccccgccgccaggctcctcaccgacggcacgcccgccgtctacagggactacacctacgccgagtactacgccaagttctggagcaggaacctggaccaggagcactgcctcgagctcttcaggaccccgacctcctag

SEQ ID NO: 91441 - DNA, 213 bp, Zea Mays
atgatgtcggtggcgtacgaattcttccggctccccgcggaggagaaggccaagctgtactccgacgacccggccaagaagatgcggctgtccaccagcttcaacgtgcgcaaaggagacggtgcacaactggcggggactacctcccgcctgcactgccacccgctggagcaattagaggggattgagattatacagattagagatgattga

SEQ ID NO: 91442 - DNA, 1685 bp, Zea Mays
atataccctttcgtctccgcccagcagcaacggcacccaccgaatccgcccctccctctttccgttccgcctcgttgcgctcgctctcgctgcgccgcccgccccacctcacggagctcacggcaacaccggcagggacggaaaaggaaagccgaggaggcgaggagagagagatacaaggcaggcagccaggcacaggcagcccgcggctggctacggggccaaaacccttacgcgcgacgcggccccctcctcttcttctctctcccaccaccgccctccccttgccatttttggtgagtgccccctttcccttccctagaccagatcctcgccccgttttccacttttgcctccaccgccggcccaattcggataacaagctccctccgcctcgccgcgtctcctcccagccgcaggagccgccgccatccgatccggaagagggaggaggggggagggaggaggatctgtgtcccgattcgattggagctctcgtccccggcggtccaggatggtgcggggcaagacgcagatgaagcggatagagaacccggccagtcgccaggtcaccttctccaagcgccgcaacggcctgctcaagaaggcgttcgagctctccgtcctctgcgacgccgaggtcgcgctcgtcgtcttctccccgcgcggcaagctctacgaattcgccagcggaagtgcccagaaaacaattgaacgttatagaacgtacacaaaggataatgtcagcaacaagacagcacatcaggacattgagcaagtaaaagctgatgctgagggcctggcaaagaaactggaagcacttgaagcttacaaaagaaaacttttgggtgagaggttggaagaatgctcctttgaagaactgcacagtttggaagtgaaactcgaaaagagccttcattgcatcaggggaagaaagactcagctgctggaggagcaactccataagctgaaggagaaggagatgaatctgcgcaagagcaacgaagatttacgtgaaaaggtaatgggggcgaaaacattttgcagacgctgcactgcggcaagcggcatgccaacaacccaagaaaacaggctttgattctaccgccttacctcgacttcctgtgctgtgatatcttattgcaagaagcagccgccgccgccgccgcctatgctgatggctcctccgccgcctccagcgccggcagccatcgatcacacggggccgaaggatgtcgggatggacgtggagacggagctgtacataggattgcccggcagagattaccgctcaaacaacaaagacatgactgcacagtagctgtcaggtcaggtcaggtcaggctagccagcagtgcagagaataatcttagatctgtggtgcggagaactggagatgcaagccaagcccaagccaatcaacatgataaggatcatgagtgtcgcgtcgtgttttacaaacctgtccaccgtccgtcaaaggcacatgcgccagaacgtccgtcagagaacacttaccccctcatctccctctattagctagctgctccggcctgctcatgtcgaaaccttctgttcaagtatgttctcctcctgatgaattccctgcccggcatgcattggtgagcttcttctcgagaagaagtgggtggggtggggacactgtcgttcatatttggcaacac

SEQ ID NO: 91443 - DNA, 1636 bp, Zea Mays
atataccctttcgtctccgcccagcagcaacggcacccaccgaatccgcccctccctctttccgttccgcctcgttgcgctcgctctcgctgcgccgcccgccccacctcacggagctcacggcaacaccggcagggacggaaaaggaaagccgaggaggcgaggagagagagatacaaggcaggcagccaggcacaggcagcccgcggctggctacggggccaaaacccttacgcgcgacgcggccccctcctcttcttctctctcccaccaccgccctccccttgccatttttggtgagtgccccctttcccttccctagaccagatcctcgccccgttttccacttttgcctccaccgccggcccaattcggataacaagctccctccgcctcgccgcgtctcctcccagccgcaggagccgccgccatccgatccggaagagggaggaggggggagggaggaggatctgtgtcccgattcgattggagctctcgtccccggcggtccaggatggtgcggggcaagacgcagatgaagcggatagagaacccggccagtcgccaggtcaccttctccaagcgccgcaacggcctgctcaagaaggcgttcgagctctccgtcctctgcgacgccgaggtcgcgctcgtcgtcttctccccgcgcggcaagctctacgaattcgccagcggaagtgcccagaaaacaattgaacgttatagaacgtacacaaaggataatgtcagcaacaagacagcacatcaggacattgagcaagtaaaagctgatgctgagggcctggcaaagaaactggaagcacttgaagcttacaaaagaaaacttttgggtgagaggttggaagaatgctcctttgaagaactgcacagtttggaagtgaaactcgaaaagagccttcattgcatcaggggaagaaagactcagctgctggaggagcaactccataagctgaaggagaaggagatgaatctgcgcaagagcaacgaagatttacgtgaaaaggtaatgggggcgaaaacattttgcagacgctgcactgcggcaagcggcatgccaacaacccaagaaaacagtgcaagaagcagccgccgccgccgccgcctatgctgatggctcctccgccgcctccagcgccggcagccatcgatcacacggggccgaaggatgtcgggatggacgtggagacggagctgtacataggattgcccggcagagattaccgctcaaacaacaaagacatgactgcacagtagctgtcaggtcaggtcaggtcaggctagccagcagtgcagagaataatcttagatctgtggtgcggagaactggagatgcaagccaagcccaagccaatcaacatgataaggatcatgagtgtcgcgtcgtgttttacaaacctgtccaccgtccgtcaaaggcacatgcgccagaacgtccgtcagagaacacttaccccctcatctccctctattagctagctgctccggcctgctcatgtcgaaaccttctgttcaagtatgttctcctcctgatgaattccctgcccggcatgcattggtgagcttcttctcgagaagaagtgggtggggtggggacactgtcgttcatatttggcaacac

SEQ ID NO: 91444 - DNA, 1568 bp, Zea Mays
atataccctttcgtctccgcccagcagcaacggcacccaccgaatccgcccctccctctttccgttccgcctcgttgcgctcgctctcgctgcgccgcccgccccacctcacggagctcacggcaacaccggcagggacggaaaaggaaagccgaggaggcgaggagagagagatacaaggcaggcagccaggcacaggcagcccgcggctggctacggggccaaaacccttacgcgcgacgcggccccctcctcttcttctctctcccaccaccgccctccccttgccatttttgccgcaggagccgccgccatccgatccggaagagggaggaggggggagggaggaggatctgtgtcccgattcgattggagctctcgtccccggcggtccaggatggtgcggggcaagacgcagatgaagcggatagagaacccggccagtcgccaggtcaccttctccaagcgccgcaacggcctgctcaagaaggcgttcgagctctccgtcctctgcgacgccgaggtcgcgctcgtcgtcttctccccgcgcggcaagctctacgaattcgccagcggaagtgcccagaaaacaattgaacgttatagaacgtacacaaaggataatgtcagcaacaagacagcacatcaggacattgagcaagtaaaagctgatgctgagggcctggcaaagaaactggaagcacttgaagcttacaaaagaaaacttttgggtgagaggttggaagaatgctcctttgaagaactgcacagtttggaagtgaaactcgaaaagagccttcattgcatcaggggaagaaagactcagctgctggaggagcaactccataagctgaaggagaaggagatgaatctgcgcaagagcaacgaagatttacgtgaaaaggtaatgggggcgaaaacattttgcagacgctgcactgcggcaagcggcatgccaacaacccaagaaaacaggctttgattctaccgccttacctcgacttcctgtgctgtgatatcttattgcaagaagcagccgccgccgccgccgcctatgctgatggctcctccgccgcctccagcgccggcagccatcgatcacacggggccgaaggatgtcgggatggacgtggagacggagctgtacataggattgcccggcagagattaccgctcaaacaacaaagacatgactgcacagtagctgtcaggtcaggtcaggtcaggctagccagcagtgcagagaataatcttagatctgtggtgcggagaactggagatgcaagccaagcccaagccaatcaacatgataaggatcatgagtgtcgcgtcgtgttttacaaacctgtccaccgtccgtcaaaggcacatgcgccagaacgtccgtcagagaacacttaccccctcatctccctctattagctagctgctccggcctgctcatgtcgaaaccttctgttcaagtatgttctcctcctgatgaattccctgcccggcatgcattggtgagcttcttctcgagaagaagtgggtggggtggggacactgtcgttcatatttggcaacac

SEQ ID NO: 91445 - DNA, 1565 bp, Zea Mays
atataccctttcgtctccgcccagcagcaacggcacccaccgaatccgcccctccctctttccgttccgcctcgttgcgctcgctctcgctgcgccgcccgccccacctcacggagctcacggcaacaccggcagggacggaaaaggaaagccgaggaggcgaggagagagagatacaaggcaggcagccaggcacaggcagcccgcggctggctacggggccaaaacccttacgcgcgacgcggccccctcctcttcttctctctcccaccaccgccctccccttgccatttttggtgagtgccccctttcccttccctagaccagatcctcgccccgttttccacttttgcctccaccgccggcccaattcggataacaagctccctccgcctcgccgcgtctcctcccagccgcaggagccgccgccatccgatccggaagagggaggaggggggagggaggaggatctgtgtcccgattcgattggagctctcgtccccggcggtccaggatggtgcggggcaagacgcagatgaagcggatagagaacccggccagtcgccaggtcaccttctccaagcgccgcaacggcctgctcaagaaggcgttcgagctctccgtcctctgcgacgccgaggtcgcgctcgtcgtcttctccccgcgcggcaagctctacgaattcgccagcggaagtgcccagaaaacaattgaacgttatagaacgtacacaaaggataatgtcagcaacaagacagcacatcaggacattgagcaagtaaaagctgatgctgagggcctggcaaagaaactggaagcacttgaagcttacaaaagaaaacttttgggtgagaggttggaagaatgctcctttgaagaactgcacagtttggaagtgaaactcgaaaagagccttcattgcatcaggggaagaaagactcagctgctggaggagcaactccataagctgaaggagaaggagatgaatctgcgcaagagcaacgaagatttacgtgaaaagtgcaagaagcagccgccgccgccgccgcctatgctgatggctcctccgccgcctccagcgccggcagccatcgatcacacggggccgaaggatgtcgggatggacgtggagacggagctgtacataggattgcccggcagagattaccgctcaaacaacaaagacatgactgcacagtagctgtcaggtcaggtcaggtcaggctagccagcagtgcagagaataatcttagatctgtggtgcggagaactggagatgcaagccaagcccaagccaatcaacatgataaggatcatgagtgtcgcgtcgtgttttacaaacctgtccaccgtccgtcaaaggcacatgcgccagaacgtccgtcagagaacacttaccccctcatctccctctattagctagctgctccggcctgctcatgtcgaaaccttctgttcaagtatgttctcctcctgatgaattccctgcccggcatgcattggtgagcttcttctcgagaagaagtgggtggggtggggacactgtcgttcatatttggcaacac

SEQ ID NO: 91446 - DNA, 1481 bp, Zea Mays
atataccctttcgtctccgcccagcagcaacggcacccaccgaatccgcccctccctctttccgttccgcctcgttgcgctcgctctcgctgcgccgcccgccccacctcacggagctcacggcaacaccggcagggacggaaaaggaaagccgaggaggcgaggagagagagatacaaggcaggcagccaggcacaggcagcccgcggctggctacggggccaaaacccttacgcgcgacgcggccccctcctcttcttctctctcccaccaccgccctccccttgccatttttggtgagtgccccctttcccttccctagaccagatcctcgccccgttttccacttttgcctccaccgccggcccaattcggataacaagctccctccgcctcgccgcgtctcctcccagccgcaggagccgccgccatccgatccggaagagggaggaggggggagggaggaggatctgtgtcccgattcgattggagctctcgtccccggcggtccaggatggtgcggggcaagacgcagatgaagcggatagagaacccggccagtcgccaggtcaccttctccaagcgccgcaacggcctgctcaagaaggcgttcgagctctccgtcctctgcgacgccgaggtcgcgctcgtcgtcttctccccgcgcggcaagctctacgaattcgccagcggaagtgcccagaaaacaattgaacgttatagaacgtacacaaaggataatgtcagcaacaagacagcacatcaggacattgagcaagtaaaagctgatgctgagggcctggcaaagaaactggaagcacttgaagcttacaaaagaaaacttttgggtgagaggttggaagaatgctcctttgaagaactgcacagtttggaagtgaaactcgaaaagagccttcattgcatcaggggaagaaagtgcaagaagcagccgccgccgccgccgcctatgctgatggctcctccgccgcctccagcgccggcagccatcgatcacacggggccgaaggatgtcgggatggacgtggagacggagctgtacataggattgcccggcagagattaccgctcaaacaacaaagacatgactgcacagtagctgtcaggtcaggtcaggtcaggctagccagcagtgcagagaataatcttagatctgtggtgcggagaactggagatgcaagccaagcccaagccaatcaacatgataaggatcatgagtgtcgcgtcgtgttttacaaacctgtccaccgtccgtcaaaggcacatgcgccagaacgtccgtcagagaacacttaccccctcatctccctctattagctagctgctccggcctgctcatgtcgaaaccttctgttcaagtatgttctcctcctgatgaattccctgcccggcatgcattggtgagcttcttctcgagaagaagtgggtggggtggggacactgtcgttcatatttggcaacac

SEQ ID NO: 91447 - DNA, 1448 bp, Zea Mays
atataccctttcgtctccgcccagcagcaacggcacccaccgaatccgcccctccctctttccgttccgcctcgttgcgctcgctctcgctgcgccgcccgccccacctcacggagctcacggcaacaccggcagggacggaaaaggaaagccgaggaggcgaggagagagagatacaaggcaggcagccaggcacaggcagcccgcggctggctacggggccaaaacccttacgcgcgacgcggccccctcctcttcttctctctcccaccaccgccctccccttgccatttttgccgcaggagccgccgccatccgatccggaagagggaggaggggggagggaggaggatctgtgtcccgattcgattggagctctcgtccccggcggtccaggatggtgcggggcaagacgcagatgaagcggatagagaacccggccagtcgccaggtcaccttctccaagcgccgcaacggcctgctcaagaaggcgttcgagctctccgtcctctgcgacgccgaggtcgcgctcgtcgtcttctccccgcgcggcaagctctacgaattcgccagcggaagtgcccagaaaacaattgaacgttatagaacgtacacaaaggataatgtcagcaacaagacagcacatcaggacattgagcaagtaaaagctgatgctgagggcctggcaaagaaactggaagcacttgaagcttacaaaagaaaacttttgggtgagaggttggaagaatgctcctttgaagaactgcacagtttggaagtgaaactcgaaaagagccttcattgcatcaggggaagaaagactcagctgctggaggagcaactccataagctgaaggagaaggagatgaatctgcgcaagagcaacgaagatttacgtgaaaagtgcaagaagcagccgccgccgccgccgcctatgctgatggctcctccgccgcctccagcgccggcagccatcgatcacacggggccgaaggatgtcgggatggacgtggagacggagctgtacataggattgcccggcagagattaccgctcaaacaacaaagacatgactgcacagtagctgtcaggtcaggtcaggtcaggctagccagcagtgcagagaataatcttagatctgtggtgcggagaactggagatgcaagccaagcccaagccaatcaacatgataaggatcatgagtgtcgcgtcgtgttttacaaacctgtccaccgtccgtcaaaggcacatgcgccagaacgtccgtcagagaacacttaccccctcatctccctctattagctagctgctccggcctgctcatgtcgaaaccttctgttcaagtatgttctcctcctgatgaattccctgcccggcatgcattggtgagcttcttctcgagaagaagtgggtggggtggggacactgtcgttcatatttggcaacac

SEQ ID NO: 91448 - DNA, 1784 bp, Zea Mays
atataccctttcgtctccgcccagcagcaacggcacccaccgaatccgcccctccctctttccgttccgcctcgttgcgctcgctctcgctgcgccgcccgccccacctcacggagctcacggcaacaccggcagggacggaaaaggaaagccgaggaggcgaggagagagagatacaaggcaggcagccaggcacaggcagcccgcggctggctacggggccaaaacccttacgcgcgacgcggccccctcctcttcttctctctcccaccaccgccctccccttgccatttttggtgagtgccccctttcccttccctagaccagatcctcgccccgttttccacttttgcctccaccgccggcccaattcggataacaagctccctccgcctcgccgcgtctcctcccagccgcaggagccgccgccatccgatccggaagagggaggaggggggagggaggaggatctgtgtcccgattcgattggagctctcgtccccggcggtccaggatggtgcggggcaagacgcagatgaagcggatagagaacccggccagtcgccaggtcaccttctccaagcgccgcaacggcctgctcaagaaggcgttcgagctctccgtcctctgcgacgccgaggtcgcgctcgtcgtcttctccccgcgcggcaagctctacgaattcgccagcggaagtgcccagaaaacaattgaacgttatagaacgtacacaaaggataatgtcagcaacaagacagcacatcaggacattgagcaagtaaaagctgatgctgagggcctggcaaagaaactggaagcacttgaagcttacaaaagaaaacttttgggtgagaggttggaagaatgctcctttgaagaactgcacagtttggaagtgaaactcgaaaagagccttcattgcatcaggggaagaaaggttagttactttcctcatgtcgttttatgcatacagtatatgtatgatgttttaacaaatgaattgaaagctgcatacatacatatgcgtatctggtcttacgtacatggcagactcagctgctggaggagcaactccataagctgaaggagaaggagatgaatctgcgcaagagcaacgaagatttacgtgaaaaggtaatgggggcgaaaacattttgcagacgctgcactgcggcaagcggcatgccaacaacccaagaaaacaggctttgattctaccgccttacctcgacttcctgtgctgtgatatcttatgtgcatacagtctccccatttctgcaacatcatgatgcacgcatatggtataatcctgatccaagccatgcgtgcagtgcaagaagcagccgccgccgccgccgcctatgctgatggctcctccgccgcctccagcgccggcagccatcgatcacacggggccgaaggatgtcgggatggacgtggagacggagctgtacataggattgcccggcagagattaccgctcaaacaacaaagacatgactgcacagtagctgtcaggtcaggtcaggtcaggctagccagcagtgcagagaataatcttagatctgtggtgcggagaactggagatgcaagccaagcccaagccaatcaacatgataaggatcatgagtgtcgcgtcgtgttttacaaacctgtccaccgtccgtcaaaggcacatgcgccagaacgtccgtcagagaacacttaccccctcatctccctctattagctagctgctccggcctgctcatgtcgaaaccttctgttcaagtatgttctcctcc

SEQ ID NO: 91449 - DNA, 2199 bp, Zea Mays
gccttgcagcagctcgatcgcttcctcctgtccgcctggaagtggaaggccacaaaccacagccatggtgtctctctgcgcatccaccaccaccatctatgccttcctagtcatactcttcatccactctggccactctccaaccgctgcattctacctcccgggcagttatcctcagcggtaccggcccggcgacacctttgccgcaaaggtgaactccctgacctcgccgtcctccaagctcccctacccctactactcccttcccttctgcgccccgcaacacggcgtccggcacgccgccgagagccttggcgagctcctcctcggcgaccgcatcgagacgtcgccataccgcttttccatgctcaacaacaccgcatcgcccttgttcctctgccgcaccgaccccctgtcccccggcaccgccgagctcatcaagtcccgcatcgatgacgcctatcaggttaacatcctcctcgacaccctccctgtgatgcgctacgtgaagaaccctgtcgcgcccgacgtgctcctccggtccaccggcttcccggtcggcgttcgcgccgacgacggcgagtactacgtgtacaaccacataaagctcaccgtgctggtgaacaagcagaacaccaccaccagggtggagaccttgatggcgaccgccgacggggccgatctgatcagcttcaccggcggcaaggagggctgcggctacacggtcgtcgggttcgaggtcgtcccgtgcagcgtggagtacgacgcggcggctgtcaagaacaagaccatgtacgacgagatcacgtcgaaggcggccaccggctgcgacccgtcggtggtgagcatgcgtgtgcaggacaacagtccgctggtctactcctacgaggtggccttcattgagagcagcgtcgagtggccgtcgcgctgggacgcgtacctcgagatgggcggtgccaaggtgcactggttctccatcctcaactccatggtggtggtctcgttcctggccgcgatcgtgctcgtcatcctgctgcgcaccgtgcggcgcgacctcgcgcagtacgaggagctcggcggcagcgagtcgggggcgcacgcggacgagctagccgggtggaagctcgtggccggcgacgtgttccgggagcccagccacccggtgctcctctgcgttctcgtcggcgatggcgtgcgcatcctgggtatgggcgtggtcaccatcgtcttcgccgcgctcgggttcatgtcgcccgcgtgccgcggcgcgctggtcaccggcatgctgtgcttgtacctcgtcctgggcgtggccgccgggtacacgtccgtgggcgtctggaagacggtccggcagggcgaagccgccgggtggaagtccgtggcgtggcgcgcgtcgttcgccttcccgggcgtcgggttcaccgtgttcaccgtgctaaactgcgtgctatggtacaacggaagcaccggagccgtgccgctcctcttgttcgtcgtcatcctcctcctgtggtttttcgtctccgtgcccctcacccttgccggcggcctcctcgcctcccgcggtcgccacatcgagtttcctgtcagggccaacaagatcgcccgccaggtgccggcggcacagtgctcgccgtgggtgttcgtggcggtggccgggaccctgccgttcgggacgctgttcatcgagctcttcttcatcatgtcgagcctgtggctgggccgcgtctactacgtgttcgggttcctgctggtggtgctggcgctgctggtgacggtttgcgccgaggtgtcggtggtgctcacgtacatgggcctgtgcgtggaggactggcggtggtggtggcgcgccttcttcgcatccggctccgtcgcgctctacaccctgggctacgccgtctactacctggtgttcgagctgcacagcctcgccggccccgtttctgccgcgctctacgtaggctactctttgctcatggctctcgccgtcatgctcgccaccggcgctgtgggactcggcgcgtccttctgcttcgtgcactacctcttctccaccgtcaagctggactgattcatcgtgtcgtgcgcgcgacggtacgagatggtgaccggacgtgtcacgtttcgtgcttcttctattttcttgaataagtttcttcttcttctaaacaatacgtgtgataaataatgacggta

SEQ ID NO: 91450 - DNA, 576 bp, Zea Mays
atgaaccagttgttgatttgcttcagctgcaggccggtctcttcgacgagcttagccttatcgtcttccttggggtatggccacttggagtgctcctgccaccattgcttgaggatgctggtggtgtccccaggcagcttcccggccctccttttcctcaggatctcctcccgcacatcctctattctcgacttgaaaccctgcttgagctccatcttgagctcctgcctgaccctctccatgagcgagcgctccgagtcggtgggcatgagcgggccgaagcccatcatgtcgtgcccgtcggagcccatatccaggcccacctccagcatcggcgcctcgtcctcgtcctctgacatggtcgcccccgtcccttcctcaagtgtcgccccggttaggtcctgcagggactgctcgatctcgcggcacgccatgacggcctccacggcgtgcacccggacgtgctgctgcagctgctcccggaacgagcacagcagcatcaggtactgcgcgaggaacgagtcgaggtcgtgcttgtcgtgcggggagaggaaggggcggtggtgggcggcgtag

SEQ ID NO: 91451 - DNA, 1748 bp, Zea Mays
ttcagtaacaagtctgtattattcataataaaacagacaatttatttacagttacacgctaaatcagaggtctaattatttaaaattagacgtactcacactgattaaaatagtaaccgaacaaacacagattttatactaaaatagagttagaaattgtgattgaacaaatagagagttcaatacgtaaatctgcagaaaataaaataaacaaaataagaaagacgctcgtggcctattttggccgagtcagcccatgtaggcgaggtggcccatcgattacaagtcaaggtggtttagggattttaatcgccttcctttccgtctagcgccgccgccaccaggaaactgcttgcccgtcgagtacgcctgcgcacgcaggagccgtttcttccgggctaggcctcgccagggggcgccggcctgcgcctttgctagcctgcaccgaggctgggccgcccgcccgcgaggctgcggggtgctcgcgcgaggctggggctgccggggccggcacgcccactaggctgtggcttgcctgcgcgcccgcgaggctgtgtgggtggcctgcctgcgcgcccgtgtggccgcggctacccacgtcggaggcgcgcatccggctctcacctgcgctggagcgtgcctgcacgcgtcgtggctcccgtgccgaaacgctgtcatggccggggctacgcctggccggagtgctagccgagcccgcgctagtgcccgtagccaaccaaagtcacgccatccgagagcgcctccgcgtcgtgcgcctgaccggatccgccaaggactgcgcgctagtgtcgtgcccgcggccaggtcgcgttgccgcgcccgcgtcgagccaggttcggccgcgtcgggtctccgcgctcaggaggccgagcgcccctgcccgccagggcttccaagcgcctgcacgccgccagggcgcggatccagcccacgtcaagccgctcccagcgcttgcgcgctgccagggcggagcggatccgaccgtgctgaggacccacgctgggggtcgcgctcgcggccagcagcccgcggccggtcgggcatcccgctgtccttgcgcgcgctaggtcgccgaggcccacgctgccatggcctggggccgccgtggccggcgtccgcgccgctggagacgcacgcacgtggccgacgctctagtgccgaccgtccagggccgcatccgcgcgccgccaggccggggccgcgatgcgcctgcgccagagtgcgcctcgccggtgctgcacccgtgcctgcggtacgccaaggccgcctcttcccttggctctccaaagtggcgaaaagtaggttgtacgagtgtatggtgaagacgatggagatctcaccttgtcttcccctctcgaatcctacatgaacactcgatgtccagcagcagcagtgtcccgatgccgagcgtcatcaccgtagaggagaaccgccagcgcgccatcgccgctaacaccaaccgctcggtggagagagactcgtgctgataacgtgttaaagtctactcagtgataatcagattgagagagataaaatgacagaaccgttatttgtattccacagatcattacacttatatacaagtgaaggggtgtatcccaagaggtgtgtcccttggggaaaactgtcgcaccccttggattgatcacatatataatattttgtaacagcgcttacgactggcgagagcatggtgattaggagaaataataaaatgttattactcg

SEQ ID NO: 91452 - DNA, 1621 bp, Zea Mays
ttcagtaacaagtctgtattattcataataaaacagacaatttatttacagttacacgctaaatcagaggtctaattatttaaaattagacgtactcacactgattaaaatagtaaccgaacaaacacagattttatactaaaatagagttagaaattgtgattgaacaaatagagagttcaatacgtaaatctgcagaaaataaaataaacaaaataagaaagacgctcgtggcctattttggccgagtcagcccatgtaggcgaggtggcccatcgattacaagtcaaggtggtttagggattttaatcgccttcctttccgtctagcgccgccgccaccaggaaactgcttgcccgtcgagtacgcctgcgcacgcaggagccgtttcttccgggctaggcctcgccagggggcgccggcctgcgcctttgctagcctgcaccgaggctgggccgcccgcccgcgaggctgcggggtgctcgcgcgaggctggggctgccggggccggcacgcccactaggctgtggcttgcctgcgcgcccgcgaggctgtgtgggtggcctgcctgcgcgcccgtgtggccgcggctacccacgtcggaggcgcgcatccggctctcacctgcgctggagcgtgcctgcacgcgtcgtggctcccgtgccgaaacgctgtcatggccggggctacgcctggccggagtgctagccgagcccgcgctagtgcccgtagccaaccaaagtcacgccatccgagagcgcctccgcgtcgtgcgcctgaccggatccgccaaggactgcgcgctagtgtcgtgcccgcggccaggtcgcgttgccgcgcccgcgtcgagccaggttcggccgcgtcgggtctccgcgctcaggaggccgagcgcccctgcccgccagggcttccaagcgcctgcacgccgccagggcgcggatccagcccacgtcaagccgctcccagcgcttgcgcgctgccagggcggagcggatccgaccgtgctgaggacccacgctgggggtcgcgctcgcggccagcagcccgcggccggtcgggcatcccgctgtccttgcgcgcgctaggtcgccgaggcccacgctgccatggcctggggccgccgtggccggcgtccgcgccgctggagacgcacgcacgtggccgacgctctagtgccgaccgtccagggccgcatccgcgcgccgccaggccggggccgcgatgcgcctgcgccagagtgcgcctcgccggtgctgcacccgtgcctgcggtacgccaaggccgcctcttcccttggctctccaaagtggcgaaaagtaggttgtacgagtgtatggtgaagacgatggagatctcaccttgtcttcccctctcgaatcctacatgaacactcgatgtccagcagcagcagtgtcccgatgccgagcgtcatcaccgtagaggagaaccgccagcgcgccatcgccgctaacaccaaccgctcggtggagagagactcgtgctgataacgtgttaaagtctactcagtgataatcagattgagagagataaaatgacagaaccgttatttgtattccacagatcattacacttatatacaagtgaaggggtgtatccc

SEQ ID NO: 91453 - DNA, 1344 bp, Zea Mays
ccaatataacataggatctttccaagtgcataaccagagaaaacacacacagaagacagagcaatattatgcttcagttgcaaataaatttccgtcattcagcacagcacagggttccccatgaggttgttcagcacaaccgacttgccagcttccggcatagaaaaggaacagaaaagattgagccagatcggaaagagatggaggtgagagggatcgagcacgcatggtggacgataggcacttacgacgttaccgtgcgcggcggtgttgagaaagagaacagtggaggggcggcacgaggtgttttcgacggaggggtcatcgtccgcaaggagcgaggtggcctaccacatggactcggagagctggacgagctcgtcgattgcctccatggctgccgaagatgacatgtccgcagggatctcgaggctggtcggaagatctcggggtggcgctgggattggtgaggtgggtggttggagtgcggagcacagagaaattgggggcagactcgtggaattcacggggacgacctgttgcacctcaactcgaaccgcttcacggggacgctcctggagtccctccccaagatgcggctcctccacgagctggacgtcagcaataaccgcctctagggtggcttcccgcagcacatcatgtgcctgcccagcgtcaggtacgtggacctgcggttcaacgacctatgcgggccggtgccgccggcgctcttcgacaagccgctagacgccatcttcctcaacgacaaccgcttcgacctcgagctgccggacaacctgggcaactcgccggcgttcgtgctcgtgctggccaacctgcgcctgcgcggctgcatcccgcgcagcatgggccgcatggcgggcacgctggtcgagctggtggcgctcaactcgggcctccgctcctgcctcccgcaggagctgggctggctgcgcgagctcacgctgctggacctcagctccaaccagctgcaggggatgctgccggagtccatggccggcttgcatagcctgtagcagctccacgtggcgcgcaacgagctgtggggccacgtccccgagggcgtctgcgcgctgcccgcactctgcaacttcaccaactcgtacaactatttctgctccgagccaagccgctgcctcgatgtccgtcaggtcgacgaccgccagaactgcatcgccgccaggttcacgaggcgagtcggcgacactctagcatctgcctcaacagtcgtgccgccttcaccaggcccatctcgccggaagcggagaatacggatctgcggcgccgacgtgtggtctcagctcctccacggagccgggtggc

SEQ ID NO: 91454 - DNA, 96 bp, Zea Mays
gacattactgatcagcgtgttttgtcaactaatggttgttaactggtacaactacgctcctatgtatcgtgcaagtgtagccatgccataagtgct

SEQ ID NO: 91455 - DNA, 1992 bp, Zea Mays
gtccagagcacacgaaggcctagcccagaaccactggattggccactgccagcggcacagccgacgccttatccagcaaccgtcttcctcatccatggcataagccgcgcccgcctccgcacgccccgctccgatggcagccgcggctgtgaccctgccctcctcgggcacgcccttcgccgtcgccacaaccgcctcttcctcatccgcccgccgctgcctgctcctgccctccgcggctccccgccgagctctccgcgtcgtggcctccgccgctaccgaggcgccgcccaagcccacgcagccgccgacatcgccctccggcatcgtgctcgtcgacccatccgaagcccagaaggtgcaccggctcaaggccgtctacgaccagaaggtcgtcccgctcatcaccgaggagttcggctacaccaatgtccaccaggttcccaagctcgagaagattgtggtgaactgcggtctgggcgcggaggcagggaactcgaaggggctggatgccgccatgaaggacctggccatgatcaccgggcagtggcccgtcaagatccgtgagggaaacaccatcggtatcgcagtcaccctccgcggcaggataatgtacaacttcctggataggctcatcaaccttgggctccctaggaccatggacttcctgggtgtcaaccccaacagcttcgacgggcacggcaactacagccttggcctccgtgaccagggcgtgttcccggagatcccgtacgaggtgggcgggaagaagaacggcatggacgtgtccatcgtcaccagcgccaagacggacaacgaggcgttcaggctgctggtcctcctcggcatgccattctcggagaacatcaagaccgacgtggtgatccggaagaagaggttgaagcgccaccacttcctgagcaagggcaaggggaagggaggacgacggtgaggagaggaaccagccagccagccagcccatggttgcacacgctctgttcagcttgttttaattccgatctttttgcagaatttggcttacaaattcgatgctgttgttgtctgtcaattatgtaacttgtgcacctatgaaaaaggtttgcaatgatcatgtccgttttgctgatttcttcttgatgcataatttgtagtcacaagttataccactgccagacattgtaatcggaggaagcagtaatgtgagacggacactgtaatgcaaacgtatttcagctgcatttctcatactgcttgtctagactatcaccgaagagcctatatgatcaatgatctcttttggcaatcggcctcaatagctacacttcggcagctcgggtgggccgatgacgagctcttcctccgggaaggcgcacggcttgccctccgcggcgagctccgggcacggcttgggcgagacgtgggaggtgacccccttgacgttggtgcagttccactgcagctccttggcgtccggcgcgaggcgggcggtcacgttggatatgcagatcccggtgtaggggtccttagggatgccctccatcctgccggccatggtcacgttctcggcgaacacgtcgctgtagttgatgccggtgacctcgggcatggcgttggggtcggacgtgttgtcggggtgctgcccgtagttgccggtcatccagaacacccacttcatggtgtggaggctgaggccgcgcacgaagatgtccctgacgaagccgcccctcccggcgccggacttgaccctgacggccgactccgtgttgatggccacgctgtcctcggcgcgcacgtcgcggatgccgccggacatctcgctgcccagcgcgatcatggcgctcgtgggggagacgcaggtcagcctccggatgacgatgtgctggctcggcatgttgaacctgatgccgtactcgtcccacccgctcttcacggccacgcagtcgtcgccggagacgatgtagcagtcctcgatcttgacacgcgaggaagaat

SEQ ID NO: 91456 - DNA, 2025 bp, Zea Mays
gtccagagcacacgaaggcctagcccagaaccactggattggccactgccagcggcacagccgacgccttatccagcaaccgtcttcctcatccatggcataagccgcgcccgcctccgcacgccccgctccgatggcagccgcggctgtgaccctgccctcctcgggcacgcccttcgccgtcgccacaaccgcctcttcctcatccgcccgccgctgcctgctcctgccctccgcggctccccgccgagctctccgcgtcgtggcctccgccgctaccgaggcgccgcccaagcccacgcagccgccgacatcgccctccggcatcgtgctcgtcgacccatccgaagcccagaaggtgcaccggctcaaggccgtctacgaccagaaggtcgtcccgctcatcaccgaggagttcggctacaccaatgtccaccaggttcccaagctcgagaagattgtggtgaactgcggtctgggcgcggaggcagggaactcgaaggggctggatgccgccatgaaggacctggccatgatcaccgggcagtggcccgtcaagaccaaggccaggaagtccgtggccagcttcaagatccgtgagggaaacaccatcggtatcgcagtcaccctccgcggcaggataatgtacaacttcctggataggctcatcaaccttgggctccctaggaccatggacttcctgggtgtcaaccccaacagcttcgacgggcacggcaactacagccttggcctccgtgaccagggcgtgttcccggagatcccgtacgaggtgggcgggaagaagaacggcatggacgtgtccatcgtcaccagcgccaagacggacaacgaggcgttcaggctgctggtcctcctcggcatgccattctcggagaacatcaagaccgacgtggtgatccggaagaagaggttgaagcgccaccacttcctgagcaagggcaaggggaagggaggacgacggtgaggagaggaaccagccagccagccagcccatggttgcacacgctctgttcagcttgttttaattccgatctttttgcagaatttggcttacaaattcgatgctgttgttgtctgtcaattatgtaacttgtgcacctatgaaaaaggtttgcaatgatcatgtccgttttgctgatttcttcttgatgcataatttgtagtcacaagttataccactgccagacattgtaatcggaggaagcagtaatgtgagacggacactgtaatgcaaacgtatttcagctgcatttctcatactgcttgtctagactatcaccgaagagcctatatgatcaatgatctcttttggcaatcggcctcaatagctacacttcggcagctcgggtgggccgatgacgagctcttcctccgggaaggcgcacggcttgccctccgcggcgagctccgggcacggcttgggcgagacgtgggaggtgacccccttgacgttggtgcagttccactgcagctccttggcgtccggcgcgaggcgggcggtcacgttggatatgcagatcccggtgtaggggtccttagggatgccctccatcctgccggccatggtcacgttctcggcgaacacgtcgctgtagttgatgccggtgacctcgggcatggcgttggggtcggacgtgttgtcggggtgctgcccgtagttgccggtcatccagaacacccacttcatggtgtggaggctgaggccgcgcacgaagatgtccctgacgaagccgcccctcccggcgccggacttgaccctgacggccgactccgtgttgatggccacgctgtcctcggcgcgcacgtcgcggatgccgccggacatctcgctgcccagcgcgatcatggcgctcgtgggggagacgcaggtcagcctccggatgacgatgtgctggctcggcatgttgaacctgatgccgtactcgtcccacccgctcttcacggccacgcagtcgtcgccggagacgatgtagcagtcctcgatcttgacacgcgaggaagaat

SEQ ID NO: 91457 - DNA, 1219 bp, Zea Mays
cactgccagcggcacagccgacgccttatccagcaaccgtcttcctcatccatggcataagccgcgcccgcctccgcacgccccgctccgatggcagccgcggctgtgaccctgccctcctcgggcacgcccttcgccgtcgccacaaccgcctcttcctcatccgcccgccgctgcctgctcctgccctccgcggctccccgccgagctctccgcgtcgtggcctccgccgctaccgaggcgccgcccaagcccacgcagccgccgacatcgccctccggcatcgtgctcgtcgacccatccgaagcccagaaggtgcaccggctcaaggccgtctacgaccagaaggtcgtcccgctcatcaccgaggagttcggctacaccaatgtccaccaggttcccaagctcgagaagattgtggtgaactgcggtctgggcgcggaggcagggaactcgaaggggctggatgccgccatgaaggacctggccatgatcaccgggcagtggcccgtcaagatccgtgagggaaacaccatcggtatcgcagtcaccctccgcggcaggataatgtacaacttcctggataggctcatcaaccttgggctccctaggaccatggacttcctgggtgtcaaccccaacagcttcgacgggcacggcaactacagccttggcctccgtgaccagggcgtgttcccggagatcccgtacgaggtgggcgggaagaagaacggcatggacgtgtccatcgtcaccagcgccaagacggacaacgaggcgttcaggctgctggtcctcctcggcatgccattctcggagaacatcaagaccgacgtggtgatccggaagaagaggttgaagcgccaccacttcctgagcaagggcaaggggaagggaggacgacggtgaggagaggaaccagccagccagccagcccatggttgcacacgctctgttcagcttgttttaattccgatctttttgcagaatttggcttacaaattcgatgctgttgttgtctgtcaattatgtaacttgtgcacctatgaaaaaggtttgcaatgatcatgtccgttttgctgatttcttcttgatgcataatttgtagtcacaagttataccactgccagacattgtaatcggaggaagcagtaatgtgagacggacactgtaatgcaaacgtatttcagctgcatttctcatactgcttgtctagact

SEQ ID NO: 91458 - DNA, 689 bp, Zea Mays
gtccagagcacacgaaggcctagcccagaaccactggattggccactgccagcggcacagccgacgccttatccagcaaccgtcttcctcatccatggcataagccgcgcccgcctccgcacgccccgctccgatggcagccgcggctgtgaccctgccctcctcgggcacgcccttcgccgtcgccacaaccgcctcttcctcatccgcccgccgctgcctgctcctgccctccgcggctccccgccgagctctccgcgtcgtggcctccgccgctaccgaggcgccgcccaagcccacgcagccgccgacatcgccctccggcatcgtgctcgtcgacccatccgaagcccagaaggtgcaccggctcaaggccgtctacgaccagaaggtcgtcccgctcatcaccgaggagttcggctacaccaatgtccaccaggttcccaagctcgagaagattgtggtgaactgcggtctgggcgcggaggcagggaactcgaaggggctggatgccgccatgaaggacctggccatgatcaccgggcagtggcccgtcaagaccaaggccaggaagtccgtggccagcttcaagatccgtgagggaaacaccatcggtatcgcagtcaccctccgcggcagggtgagcctcatccattgctcatttggcctcggagtgtatttcgtggcag

SEQ ID NO: 91459 - DNA, 1404 bp, Zea Mays
cgtacagcaatggcagtatacaatatccgcgtggactggccgtcttcccccccctccccctcccccccacccaccccccaccccagtataataaaaggcagagccgcgttcccgttcccgctcccgcccctgccgccgcacgttgtcccgcggatctccacgctcgcaagttgactcccaccactgccaccgtccaccgacgacgactccagcccacttgttcgtcccctcgtccaagccccccctcccgttgcaccgaggccacaccacacacacgtacacccgttggccatggccgtcgcgaggctggtggccgccccattccctctcgccacgtgccgcttgcggaggccacgcccagccttgccccccgcgcatgcggggccggggccgcggccgcaggtcctggtgctcgcgcctcccgctgccacggcggcccggcgcgccgtgcccgtgcgcgcggcgccggaggacgaggccgtggtcgccggcgacggcggcggaggggacgcggaggccgtggcggcgcgcgcggcgcggaagcagtcggagcggcggacttacctggtggcggcggtcatgtccagcctcgggatcacgtccatggccgccgccgccgtctactaccgcttcgcctggcaaatggaggggggcggcgagatcccggtgacggagatggtcggcaccttcgcgctctcggtgggcgccgcggtggggatggagttctgggcgcggtgggcgcaccgggcgctgtggcacgcgtcgctgtggcacatgcaccagtcccaccaccggccccgcgacgggcccttcgagctcaacgacgtcttcgccatcgtcaacgccgtcccggccatgtccctcctcgcctacggcttcttcaaccggggcctcgtgccgggcctctgcttcggcgcggggctggggatcacgttgttcgggatggcctacatgttcgtgcacgacggcctcgtccaccgccgcttccccgtcgggcccatcgagaacgtgccctacttccgccgcgtcgccgccgcccatcagatacatcacatggacaagttccagggcgtgccctacggcctgttcctggggcccaaggagctgaaggaggtgggaggaactgaggagctggagaaggagatcaagaagaggatcaggaggagggaggccctagacgccatccaataagacctgattagctatacagtgcttactgctttggctatagaattccactgttttttttgaccttctcctcacattagatcttctagcgtttcgatgtatatacgagtggtagcgtgtgcatgtgtcttctttcctgttaatagagtagaagcgcagatcgaggaataatttcgagttgggcaaacaggtagccgcagctagctcttgcatgaa

SEQ ID NO: 91460 - DNA, 1323 bp, Zea Mays
cgtacagcaatggcagtatacaatatccgcgtggactggccgtcttcccccccctccccctcccccccacccaccccccaccccagtataataaaaggcagagccgcgttcccgttcccgctcccgcccctgccgccgcacgttgtcccgcggatctccacgctcgcaagttgactcccaccactgccaccgtccaccgacgacgactccagcccacttgttcgtcccctcgtccaagccccccctcccgttgcaccgaggccacaccacacacacgtacacccgttggccatggccgtcgcgaggctggtggccgccccattccctctcgccacgtgccgcttgcggaggccacgcccagccttgccccccgcgcatgcggggccggggccgcggccgcaggtcctggtgctcgcgcctcccgctgccacggcggcccggcgcgccgtgcccgtgcgcgcggcgccggaggacgaggccgtggtcgccggcgacggcggcggaggggacgcggaggccgtggcggcgcgcgcggcgcggaagcagtcggagcggcggacttacctggtggcggcggtcatgtccagcctcgggatcacgtccatggccgccgccgccgtctactaccgcttcgcctggcaaatggaggggggcggcgagatcccggtgacggagatggtcggcaccttcgcgctctcggtgggcgccgcggtgagttccagagttcccagactcgtcctcctcgcagccacgcggcacgccccgccgtggtctggggcgctttctcttctgcgccgcgagacgaatggataccagacgaccaacaatcgcgtgttggtggtggtttgcatttgcaggtggggatggagttctgggcgcggtgggcgcaccgggcgctgtggcacgcgtcgctgtggcacatgcaccagtcccaccaccggccccgcgacgggcccttcgagctcaacgacgtcttcgccatcgtcaacgccgtcccggccatgtccctcctcgcctacggcttcttcaaccggggcctcgtgccgggcctctgcttcggcgcggagctgaaggaggtgggaggaactgaggagctggagaaggagatcaagaagaggatcaggaggagggaggccctagacgccatccaataagacctgattagctatacagtgcttactgctttggctatagaattccactgttttttttgaccttctcctcacattagatcttctagcgtttcgatgtatatacgagtggtagcgtgtgcatgtgtcttctttcctgttaatagagtagaagcgcagatcgaggaataat

SEQ ID NO: 91461 - DNA, 2216 bp, Zea Mays
atggcccattcgccggcgcccagcggcggcggcggcggggggccgctgccgctactggtgtcgctcaactgcctcgacgacctctcgctggagcaggaggggctggcgggcgtggccgcggtggagcacgtgccgctctccgccgtcgcctgcggccgcatcgaggccgcctccgcggtgctgctcccctccctcgccttcctcccgcgcgccgcgcagcgccggctgcggccctggcagctgctgctctgtctcggctccgcggaccgcgcggccgacgcggcggcggccgccgacctgggcctccgcctcgtccacgtcgacgccaaccgcgccgaggaggtcgccgacaccgtcatggcgctcatcctcggcctgctccgccggacccacctcctctcgtgccacgcctcgtcggtcccggccgccggctggctcggctccgtccagcccatgtgccgcggcatgcggcgctgccgcggtctcgtgctcggtatcattggccggtccgcggccgcccgctgcctcgccactcgtagtctcgcgtttcggatgagcgtgctctacttcgatccgcgctacgtgggactgttgtataggctaagtaattttagtactacaattactactaagggggtgtttggaaacacagtttttcaaaaccacggtatttcaaataccacagtatacaaatgccatgacatgatctcagttttcaataccacagttttagaataccacggttttgaatacatggaggtgtttgggaacaaagcaagtgggaaaacaaagcggccttctattgttttcccttctgcagcaaggagaatggacactctcaatgatttattagcagcgagtgaccttatttcgctgcattgcggattaacaaatgaaaccatgcatatacttaatgctgactgcctgcagcacataaaacctggagctttcatagtcaatactggtagttgccagcttatagatgactgtgctctcaaacagctcttgattgatggtaccatagctggttgcgcattggatggtgctgaaggtccacagtggatggaagcatgggtgcgggagatgccaaatgttttaattcttccgcggagtgcagactacagcgaagaagtgtggatggaaataagagagaaagcaataactatgttacagtcctttttcttcgatggtgttcttccaagtagtgcaatttctgatgaagatgaggaaataagtgaagctaaaaatgaagatgactatctaggcccacaggcaaaggatagccagtcacagatttttgatactgaaatagatgaaagccacataacgctggagtctgaaaagaaaagagccatatcccaccataaagagcctcaggcgtctggaaagtctgtaaacattggctcccgatctgaagggaggcgtagtcgttctggaaagaaagggaaaaagaggcctgcccatcgcagacctcaacagaaaccagatgacttatctgctgttgagagtgacagtaactattcctcccggagagatgatgacactgcaatgagtagcagggaccaggttgtaagttccagttcacgatttgcctctcctgaggacccaaaatacaagcataaatctctttctgaatccccgatggaaataacatccgagaagaaggtgcctgtactactcagtagaaagtaccctgataaactaaaagatggatttattgtagctttgagagcaagagataattcagggtaccatgttgcaagacagagagtagttggtggtggtggctggattcttgatgttgtctcaaatgctacaaacagggaccccgctgctcagttccttgttactttcaaaaacaagattaataggaagatggagtttgtgtttgcaagccattcttttgatgtttgggagagctggatgctggacggttccttgctggaggttatggtggttgaggtcgtgctcgctggcggtggtggatcaatgctagtccgcttggaggtcaaggtctcgacatgctcgaggggatggcctcacctggaggaggctagaggagtcatcatcggagccgagcgcgggaagcacgggaaaaggagcaccgtcaccgactcaccgtccgaagacgtgcggtcgcatgagatgagaaagatttcactgtttcacggatggaaagagatcggagactaaaaagaagggaaaaaaaaaagaac

SEQ ID NO: 91462 - DNA, 1163 bp, Zea Mays
aggctgatcgttttttccttgagaaatgatcctctgaccctcatcccccagacggccagaccccagtgcactctatcccctcagctatggcgacaaccgtcacgcccgcctccccgttccgcgactacctccaccgccgccgcgtccgcctccacgccaagccgcacccgcattcccagcgccgcctatcacgcaccgcgcggctacgctatgctccggacggtggcggcgctgaggtctcgggccctcccgcttccgcggccgtcgaggagcaaacgccgcaggaacggccggaggacttcatgctcctggctgccaaccgcagcgaattcaacgagatcatcatggtcatcgactcgcccgtcgcgcggtacctcgtcctcgaccacaacaagaatatccacagcattctccccaaaacaaccgtttggaccaactcgtactgggatgagtttgtgagcctgccagctattgttccacggggccctgttgcactactaggtttgggtgctgggacatcagcacatctgatgctaaagttttggccttggttacaacttattggctgggagatcgaccctatgataattgaattgtcaagggattattttggtatgtctgatttagagaaggccacagaatcaggtggttcacttttggtgcgcattggtgacgcactttctccatcagcaacagtcgaaggaggatttgctggaattgttgtagatttgttttgtgatggaaaggtcatacctcagctacaagaagccaaaacttggttgcaaattgcaaaaaggctaatgccagacggtcgaatcatggtaaattgtggtggatcagacactgaagaatctctctcatcgccttgggttcaaaaccctacagttaaagcactttgttccgcatttcctggacaggtaagctggaagagactatcggagaaagagagtgtaaactatgttgccctgactggacctctcccagacctggacgggtggtcggcgtcggttcctagtgagctaagcacgaatagggccggccctaagcctatgctagagaggcgacggccgggggcctaaaattcttaggggcccaatatttagtatatataacactatataatatatcaatttacactttacaaaacccatctaaccaaataa

SEQ ID NO: 91463 - DNA, 441 bp, Zea Mays
aaacacaaaagcaccacaattatatattcacaaaatcatcacaattataatatcattcacaactagatcatttacagatagctagctagatcattcacaaaagctccagagatgatcagtcacaaaagcaccacagcgacatcactccagcttgaagcagttcaaaagcccacaactacatcactaatgtttcatatcactccagctattgttcaaaagcccacaactatatcactctagctgctccagagctgatcagtcacaaaagcaccaaagctacactaatgcttcaagcagttcaaaagccttcagacaaccactccagcttcttgtatcctcctgttttaagttacaagctttctttgtccagaacaccctccactagacggtgttgcagccttatgcaccaacttcagctggtgcaatcaaggttaatcatta

SEQ ID NO: 91464 - DNA, 1327 bp, Zea Mays
ttatattattactgctggtgaatgatcgaaccagaacggacgttgatcgcatagcaaccagtacctagcaaccactacccggaaatatatactatagttaattttcagttcaacaatataatcaccagatatatagatcgcattgcttggaagttggaattattatttaacgccgcggtcactacttaactcattaactggatcccagcacaaccatggaagcgtacgacaagacctaccactaccagtgctcctccatttcaccgtgctcttctcaaccgctgcgtgcagcgtgctcctagtcatagcgcccccgcccactagctgagccaccgacttgttccgggccgccgcggggcagggcatgaaagcgacgacgtggcgcggcgcgccggggaccctaccggccgccagcgccaaggagaagaggaggaagcaaaaaacgcccgcgccgcgcggcttgatgtgcggctgcggcagcaccaggtcggtctccgtcgacatctccgccgctgtcacgacggcggcgcggacgaggcgacgcgtttccacggcgggggagccagcatctgcggcaaagacgacgacgacgacaggctgcggccgcggcgctgacgaagcgagcgccgagggcacgcccagcgtggactcgcttctgcggcagctgcgggagctggagcgcggcgtccgcgcgctgggcctgggcgtccgggaacgggaggagggcggcggcgcggcatcagggacggcgacgaccgcggaaacggcggcaaggccccgccggcacgcgcggagcgcgagcgtcgtggagcggctggactacgggagcgtggcggtggtgacggagtcggcggacccgctgcgcgacttccggcgctcgatggcgcagatgatcgtggagaacggcatcaccggcggcgccgagctgcgcgagctcctgcgccggttcctcgcgctcaacgccgcgtgccaccaccacctcatcctccgcgccttcggcgacgtctgggaggagatcttcgccgccgccgccgccggccgcgatggcggtagagctagcaaacggccacgcggtcgcgctggcgctggcgctgacactctaagctagccacccacagtcgtctgtcgtctcgtccatcctactactacaataatacttactctcctcgggaattgttcttgtccgtgtccgaattaatacggcgcgcgttgcggcgttggtggtatacatactacatgacatggccccgcacgcgtggctttctgtgcggccccggccaccagaaaacctgcgacgatctcgtacaggtcatacgtagctctcccc

SEQ ID NO: 91465 - DNA, 1575 bp, Zea Mays
ccaaggtttttgttttttttccttcttccattattgtgggcggcgcgcaataatcctcgcgacaaaaaagaggctgcagggttcgtgcagcgcccacatgcgtgcttgcgtcgcccgccaacgatcacgctgcaccgcaagcatattcctcctcccttccaaggctctctcagttctgacccatcaccctctccctctctttctgtttctggctcccatccatccatccgttcgttcatctcgttgcttcttcagagcaggaaaaaaaagagagaagatgatgatgcagatcgatgcacgcactgcgacgaccaccaacaccacccaaagaccgtcacggagaatttagttacagattcattcacgaactggcagctatacggtttggacttttgactcacaaaataataaaagctacgagtagctagtttgattcgtctgtcttctcatcgtaataataacgtaacacgacgacggatgtacacatggactgatggacggggcgggccgggagacacgtacgtactcacgttcgcgcgcgcgacgcgagagacaaagcggccgggatcgattgcttcagcagatggcgcacgagtttgggttctcctccatgctcatgttgcgcacgtagtagtactgcgggggcggcgggggcggcgccgcgtacgggtggtacgccacgggcggcggcggcggggggcggtggtggtactggctcatgtagtcgttggtgatcatgtgcatgtactgcggcggcagctggtgcagcggcgggaacggcaaaatcgggggcaccgcggcggcgggcttcttctcctctgcgccgccgccgccgccgtccttcttgtcgtccttcttgccatcgccatcctccttcttgccctcgccgtcctgcttcttgccgtcgccgtcctccttcttgccctcgccgtctttcttgccgtcgccaccgccgccgccgtccttcttcccgtccccttcctccttcttgccctcgccaccgccgccgtccttcttctcgccgccgccgtccttcttctcctccttcttctcgggctccttggccggcccgacggagtcgatgtgcgccgcccacgacttgctgcgcagcttgctcaccacctgcaccgggtccaccgtcccgatcaccgtcatcttgtgcgccgccatgtccaccgacacggcgtcgatgcctgggtgggggaggatggatgatggatggtgggcgcgggaaacggaagctcagtcgtccgctgttaattaactgtgatacgatacgtaccgacgagcacggagatggccttcagcgccttctgcttgtccttgttgtcgtgcaggtccagcttcaccacgattttctgcacgttcatggccatggcacacatacggttagtttagtcatccgcttcctctaccggcttcgaaaagatgagaggaatgcaatgcacggagatgaacggggggccgccgcgcgatgcatgccaccgatatgaatggacaagaggagggcagggctcaccttcgacatgtctcgacgcggcgcgggtgagcgctggattcgagcagggaggtgag

SEQ ID NO: 91466 - DNA, 795 bp, Zea Mays
atgtacacatggactgatggacggggcgggccgggagacacgtacgtactcacgttcgcgcgcgcgacgcgagagacaaagcggccgggatcgattgcttcagcagatggcgcacgagtttgggttctcctccatgctcatgttgcgcacgtagtagtactgcgggggcggcgggggcggcgccgcgtacgggtggtacgccacgggcggcggcggcggggggcggtggtggtactggctcatgtagtcgttggtgatcatgtgcatgtactgcggcggcagctggtgcagcggcgggaacggcaaaatcgggggcaccgcggcggcgggcttcttctcctctgcgccgccgccgccgccgtccttcttgtcgtccttcttgccatcgccatcctccttcttgccctcgccgtcctgcttcttgccgtcgccgtcctccttcttgccctcgccgtctttcttgccgtcgccaccgccgccgccgtccttcttcccgtccccttcctccttcttgccctcgccaccgccgccgtccttcttctcgccgccgccgtccttcttctcctccttcttctcgggctccttggccggcccgacggagtcgatgtgcgccgcccacgacttgctgcgcagcttgctcaccacctgcaccgggtccaccgtcccgatcaccgtcatcttgtgcgccgccatgtccaccgacacggcgtcgatgccgacgagcacggagatggccttcagcgccttctgcttgtccttgttgtcgtgcaggtccagcttcaccacgattttctg

SEQ ID NO: 91467 - DNA, 1905 bp, Zea Mays
ataaagccgcaggcgcgcggagcggaggtcgcgagagcaaaattcactgctccctgcccgtcgaaccagccgagcaagccaacgcaaacccagcgagccgcggcacctcgtcgcgcgcgccttgcctgtccgcttcttcgtccgatcgtccgccggtccgagccgagccccccgaagtatggcggagcccgcggcggcggggaggaagacgcgggtggggccgtacgaggtcggcaagaccatcggggagggcagcttcgccaaggtgaagcacgcccacgactcccgcacgggcgccgtccgcgctatcaaggtgctcgaccgcagccacgttctccgccacaagatggtcgagcagatcaaacgggagatttcgactttgaagctaatcaaacatcccaacgtggttcagctgcatgaggttatggcgagtaggacgaagatatacatggttcttgaatttgttgatggaggcgagttattcgataagatcgtcaattctggaaggctaggagaggatgaagctaggatatactttcatcaacttataaatgcggttgattattgtcatagccgaggagtgtaccatagagatctgaagccagagaatctacttctggactcacatggaacccttaaagtttcagactttggcctaagtgcatttgcaccacaaacaaaagaggatgggcttctgcatactgcctgtggaactccaaactatgtagcgcctgaggtgctcgctgataaaggctatgatggtatggctgcagatgtatggtcctgtggcataatcttgtttgttcttatggccggatacttacccttcgatgatgccaatctgatgagactgtacaaactgatctgccatgcaactttttcttgcccaccatggttttcttctggagcaaggaagtttattaagcgcattctcgatcctaaccctgataccaggataaaaattgcagaaattttggaagatgaatggttcaaaaaaggctataaaccaccacattttgaacaaggcgaagatgttaaccttgacgacgttgatgctgcattcaatgattcagaggaccgtcttgtagcagagaaaagagaaaagccagaatcaatgaatgcatttgctcttatttcgaggtcacagggcttcaaccttggaaatttgtttgagaaggagatgatgggaatggtaaagagggaaacatctttcacgtctcaatgtacagcacaggagatcatgtcaaaaatagaggatgcatgtgggccacttggtttcaacgtgcggaaacaaaattacaagatgaaattgaaaggtgacaaatccggaagaaaaggccacttatctgttgcaactgaggtttttgaggttgctccttcacttcacatggttgagcttcgtaaaaccggaggagacacattggaattccacaatttctacaagaatttctcatcagagctgaaagatatcgtgtggaaagctgaatctgatgcaagtatgaaacagacgaagtgacacccagggaatctgtgtaacttatgatgtcacattgtgagatagaccaccacctcgggtgataccgcttgtttggtactgtatgttttttttactggtaccacattggcaatcaatctcgtgtacagagctccttctgaatgagcgcagctgtacacgagacatgaagaggccctccctgagatgctccaaacgttgcaatggaactaaaaatttgtataaatgggtccttggcgtcctaccaatcgggcctgctgcaggggcaaccactagcggaggagcggcaggtccccttctctattgtatagagcaccgactttctgtagtttctactgttgtcacttttacaaaaacaaattttttttctaatcgaccacggtcaagcttcc

SEQ ID NO: 91468 - DNA, 1833 bp, Zea Mays
ataaagccgcaggcgcgcggagcggaggtcgcgagagcaaaattcactgctccctgcccgtcgaaccagccgagcaagccaacgcaaacccagcgagccgcggcacctcgtcgcgcgcgccttgcctgtccgcttcttcgtccgatcgtccgccggtccgagccgagccccccgaagtatggcggagcccgcggcggcggggaggaagacgcgggtggggccgtacgaggtcggcaagaccatcggggagggcagcttcgccaaggtgaagcacgcccacgactcccgcacgggcgccgtccgcgctatcaaggtgctcgaccgcagccacgttctccgccacaagatggtcgagcagatcaaacgggagatttcgactttgaagctaatcaaacatcccaacgtggttcagctgcatgaggttatggcgagtaggacgaagatatacatggttcttgaatttgttgatggaggcgagttattcgataagatcgtcaattctggaaggctaggagaggatgaagctaggatatactttcatcaacttataaatgcggttgattattgtcatagccgaggagtgtaccatagagatctgaagccagagaatctacttctggactcacatggaacccttaaagtttcagactttggcctaagtgcatttgcaccacaaacaaaagaggatgggcttctgcatactgcctgtggaactccaaactatgtagcgcctgaggtgctcgctgataaaggctatgatggtatggctgcagatgtatggtcctgtggcataatcttgtttgttcttatggccggatacttacccttcgatgatgccaatctgatgagactgtacaaactgatctgccatgcaactttttcttgcccaccatggttttcttctggagcaaggaagtttattaagcgcattctcgatcctaaccctgataccaggataaaaattgcagaaattttggaagatgaatggttcaaaaaaggctataaaccaccacattttgaacaaggcgaagatgttaaccttgacgacgttgatgctgcattcaatgattcagagggcttcaaccttggaaatttgtttgagaaggagatgatgggaatggtaaagagggaaacatctttcacgtctcaatgtacagcacaggagatcatgtcaaaaatagaggatgcatgtgggccacttggtttcaacgtgcggaaacaaaattacaagatgaaattgaaaggtgacaaatccggaagaaaaggccacttatctgttgcaactgaggtttttgaggttgctccttcacttcacatggttgagcttcgtaaaaccggaggagacacattggaattccacaatttctacaagaatttctcatcagagctgaaagatatcgtgtggaaagctgaatctgatgcaagtatgaaacagacgaagtgacacccagggaatctgtgtaacttatgatgtcacattgtgagatagaccaccacctcgggtgataccgcttgtttggtactgtatgttttttttactggtaccacattggcaatcaatctcgtgtacagagctccttctgaatgagcgcagctgtacacgagacatgaagaggccctccctgagatgctccaaacgttgcaatggaactaaaaatttgtataaatgggtccttggcgtcctaccaatcgggcctgctgcaggggcaaccactagcggaggagcggcaggtccccttctctattgtatagagcaccgactttctgtagtttctactgttgtcacttttacaaaaacaaattttttttctaatcgaccacggtcaagcttcc

SEQ ID NO: 91469 - DNA, 1698 bp, Zea Mays
ataaagccgcaggcgcgcggagcggaggtcgcgagagcaaaattcactgctccctgcccgtcgaaccagccgagcaagccaacgcaaacccagcgagccgcggcacctcgtcgcgcgcgccttgcctgtccgcttcttcgtccgatcgtccgccggtccgagccgagccccccgaagtatggcggagcccgcggcggcggggaggaagacgcgggtggggccgtacgaggtcggcaagaccatcggggagggcagcttcgccaaggtgaagcacgcccacgactcccgcacgggcgccgtccgcgctatcaaggtgctcgaccgcagccacgttctccgccacaagatggtcgagcagatcaaacgggagatttcgactttgaagctaatcaaacatcccaacgtggttcagctgcatgaggttatggcgagtaggacgaagatatacatggttcttgaatttgttgatggaggcgagttattcgataagatcgtcaattctggaaggctaggagaggatgaagctaggatatactttcatcaacttataaatgcggttgattattgtcatagccgaggagtgtaccatagagatctgaagccagagaatctacttctggactcacatggaacccttaaagtttcagactttggcctaagtgcatttgcaccacaaacaaaagaggatgggcttctgcatactgcctgtggaactccaaactatgtagcgcctgaggtgctcgctgataaaggctatgatgaaattttggaagatgaatggttcaaaaaaggctataaaccaccacattttgaacaaggcgaagatgttaaccttgacgacgttgatgctgcattcaatgattcagaggaccgtcttgtagcagagaaaagagaaaagccagaatcaatgaatgcatttgctcttatttcgaggtcacagggcttcaaccttggaaatttgtttgagaaggagatgatgggaatggtaaagagggaaacatctttcacgtctcaatgtacagcacaggagatcatgtcaaaaatagaggatgcatgtgggccacttggtttcaacgtgcggaaacaaaattacaagatgaaattgaaaggtgacaaatccggaagaaaaggccacttatctgttgcaactgaggtttttgaggttgctccttcacttcacatggttgagcttcgtaaaaccggaggagacacattggaattccacaatttctacaagaatttctcatcagagctgaaagatatcgtgtggaaagctgaatctgatgcaagtatgaaacagacgaagtgacacccagggaatctgtgtaacttatgatgtcacattgtgagatagaccaccacctcgggtgataccgcttgtttggtactgtatgttttttttactggtaccacattggcaatcaatctcgtgtacagagctccttctgaatgagcgcagctgtacacgagacatgaagaggccctccctgagatgctccaaacgttgcaatggaactaaaaatttgtataaatgggtccttggcgtcctaccaatcgggcctgctgcaggggcaaccactagcggaggagcggcaggtccccttctctattgtatagagcaccgactttctgtagtttctactgttgtcacttttacaaaaacaaattttttttctaatcgaccacggtcaagcttcc

SEQ ID NO: 91470 - DNA, 957 bp, Zea Mays
acaagacatcaggaggcctactacgtgtacgtgcacacaatatccattccaccttggtccatcagcagcgagcgaacaggcaaaaaggaaaggccgagaagcgctttatccggccgtacgtagcgataagagtggtgcacccgtagcggcacggcatggcggccacggcgtactccgtggcgctcctcggcggcgcacgcctgccggccgccttcctccctcgacgcagcagcgtgtgccaccaccagcttcgcctccaagacgcaccgaggctgatctccctgcaccgtgccagggccgcttccgaggacacgtcggcctccggcggcgacgagctcatcgaagacctcaaggcaaagtgggacgccgttgaggacaagcccaccgtcctcctgtacggcggcggcgccgtcgtcgcgctatggttgacgtccgttgtcgtcggcgccatcaacgccgtgccgctgctccccaagatcctggagctcgttggcctcggctacaccggctggttcgtctaccgctacctcctcttcaagcaaagcaggaaagagctggtcgacgacattgagaccctcaagaaaaagattgctggaacggcggaataagcgctagctctcgtggaaagctttagaaaaccaacgacgagaggggccgtttcttctttgcaaattaagatatcaaaccgaggaacgtaccaatgcagctactgtcgcccatgtcatgtgttgtgtgatgcatacccttaccttctgtatacataacgaaattaaagagaggacagcattttgccttgccagccatttctcaatcggttcttcagttacgacttcccaaccatttatattataatttatttataaaatatattttcatactaaatctaggtgtagatatgatctgcacagacctcctagttgtatttttatttggacgtatagagagaatagtatttga

SEQ ID NO: 91471 - DNA, 282 bp, Zea Mays
atggctggtgcatccaccagggcacgaccatggaggagccgagcaggagcaaggaggcgagggagaaccgacggcgtgggcgaaaggtgctgggacttggagacgtgctggtgcagaggcatgttggaggaagcaggggcgcgggtccagacgagcgccacctgggagcgggcgctggcgagcgtggcatcaacaggagatggcggccagcgcgaggtcgagctggagcatgtgtgcagccatgggcgagcgcgagttgaagaaactggagaccagagatga

SEQ ID NO: 91472 - DNA, 941 bp, Zea Mays
agaggtccgggcctagcgtcaccagataaccccgcccacatgatcctcccccacgtaccttactcacacccccactgtatattcccgcacgcgcgacgcacggaccagggcggcggggcgggggcgggcgacctctcctcgcttcacttgacgacgttcacgtccgtgtgatggcgcagcgggaggcgcgtgcggcggataaggcggtagctgccggcggcggggagacgagggacgccagccacgtcgcgctggagatgggcggcggcgtgggggagctgcgggcggggcagagtgcgacggcgacggcgtgggcgtgcggggcggccgcggcgggcgtggggctggcgggggccggcgcgctggtgtggtgggcgctggcgttccgcccggcgcgccagcagacgtggatggtgcccgtgggcctcgtcctgctcggcacgccgctcctcgcctggctctccctgtcggcctccggcgcgtgccgctggctctcccgcctccgcggccaccagccgcccgtccgcccggccccggagcgatgatgatcacgcatggcgacgatgcatggtccgtggttccgtctctccgtgcgcggcacgcaggatcgcagatccagtgtaggctggcggggccttcgcgcctgccttgccttgccttgggtgtacatttttttttcttcttcttcttccccccggcgggcggtctcttctttccgttcccctgttcttgtgtgaaccggaacggacagcagcttcttgctagtagtagcaaaactaggcacggcacgagtgttgttgtagatttgcaagaggcttcggttgcgtggatttttgtttgttttgtttagttggcatgcgatgcgaacatgcatctcggggtcagcattcgaatacgaaattcagatgcagtagaattttacacaacatgaacatgaaaca

SEQ ID NO: 91473 - DNA, 680 bp, Zea Mays
agttgaagacatttaaacaatctagctaatagctcaactattagctatttttagcaaattagctaatagttagctagatgtttgttatctagttaattgtactagcaatttttgtaggcaataaatattagctacagtgcattcaaacaccctcttagcatgattgacttattatctgttaatacttgcagatgtttaccttttttttcttttcttttaattggtatggttgtttagactttggagactacttcgtaattctctgaacacgactctttttgcccccctttttgacatgaggcacgtttacgcagtggtttgcaggtgccagcctcatcattcttggcgtcttcatcctcagcaagtccagcatcgaggagaaacagaacacggattaggtggaaaagttttgaccgctagtgttagctgtaacatatacgtactccgcataagctgagccatgggatgttttgtccgtccatgtagccgaatcagagcatgactgtcattcggctaatacaatgtagtgtagcaaacatgttgtgcgagttgtcacgccaggacatttgacatttcccatggtgctactggtacatcgagaatcatcgctgtaattgtatgtatgtggtgaattgatttcatttattttattatatttttattcaagctgtggcaatatc

SEQ ID NO: 91474 - DNA, 716 bp, Zea Mays
aggtttcctttccaccaccgctactccgctaggttcagcagcggcaccagtcggctgagcggatctccggtgaggttgagggatcagggatggcgaacggcggcggctacgtgtgggcccttgcggcgggcttcaacgccgcgctcgccgccatctccgccaaattcatcgccactctgccgctcaaatatggcacggtgatacttttcaacgtgacaatgtgggggtgctacgtcaacagcctcaaagctttgtcgtccctccaggcaacagtcacaaacttcgccgccaacttcctctcgtctgggcttgcagggtatttcctgttcgaggagccgctgccttctaagtggtttgcaggtgccagcctcatcattcttggcgtcttcatcctcagcaagtccagcatcgaggagaaacagaacacggattaggtggaaaagttttgaccgctagtgttagctgtaacatatacgtactccgcataagctgagccatgggatgttttgtccgtccatgtagccgaatcagagcatgactgtcattcggctaatacaatgtagtgtagcaaacatgttgtgcgagttgtcacgccaggacatttgacatttcccatggtgctactggtacatcgagaatcatcgctgtaattgtatgtatgtggtgaattgatttcatttattttattatatttttattcaagctgtggcaatatc

SEQ ID NO: 91475 - DNA, 593 bp, Zea Mays
aggtttcctttccaccaccgctactccgctaggttcagcagcggcaccagtcggctgagcggatctccggtgaggttgagggatcagggatggcgaacggcggcggctacgtgtgggcccttgcggcgggcttcaacgccgcgctcgccgccatctccgccaaattcatcgccactctgccgctcaaatatggcacggtgatacttttcaacgtgacaatgtgggggtgctacgtcaacagcctcaaagctttgtcgtccctccaggcaacagtcacaaacttcgccgccaacttcctctcgtctgggcttgcagggtatttcctgttcgaggagccgctgccttctaaggtaacacgggaattctaagttttcatgtgatgcatcttgaggatcagcacacacagagaagcgaaacagaactggactttattctatatatgacatgacgtctctctaccttcgattccctggaaactgagttaccatagtatagagttggtccatcctggtaaacacaatgatttacagaaccccaccaggccaccaccgccaccaagaccaccaccaggggggtgtagaacttaatcggat

SEQ ID NO: 91476 - DNA, 255 bp, Zea Mays
aggtttcctttccaccaccgctactccgctaggttcagcagcggcaccagtcggctgagcggatctccggtgaggttgagggatcagggatggcgaacggcggcggctacgtgtgggcccttgcggcgggcttcaacgccgcgctcgccgccatctccgccaaattcatcgccactctggtaccgcgccagtgcgccaccaacctacccctacctccctctatcgctcgccctccgtacacgatccgagattcct

SEQ ID NO: 91477 - DNA, 1485 bp, Zea Mays
actagtatatcctcctcttccctctccttggagttggagcactcgctgttggctgttgccctgcgagcggggcgtcgtcgtcgcgcgcgcgctgaatctgatgcacgcacatactactacgcaggtgcaggtgcaggtgatcatatgaactccatggaatcatgcgtgcccccgggtttcaggttccaccccaccgacgaggagctcgtcggctactacctcaggaagaaggtggccgcccagaagatcgacctccacgtcatacgcgacatcgacctctaccgcatcgagccatgggatctccaagggcattgcgggatcgggtacgaggagcaaaacgagtggtacttcttcagctacaaggaccgcaagtaccccacggggacgcggaccaaccgggccaccatggccggcttctggaaggccacgggcagggacaaggcggtgcacgacaagagccgcatcatcggcatgaggaagacgctcgtcttctacaaggggagggcccccaacggccacaagaccgactggatcatgcacgagtaccgcctcgagaccgacgagaatgcgccgccgcaggaagaaggctgggtggtgtgccgagcgttcaagaagagaacagcgtacccggcaaggatggcatggggggaccccagctacgcctaccgcgagatcagcgccatgggcgcggcggcggcggcgttcgtggaccctaacgcggcgtcgtacgcgcagatcagacgccagcagtccaacaagagcgcgcgcttcaagcaggaggccgagctggacggcggcgccgccgccgcgctgctgcagtactcctccagccacctggtcgagctgccgcagctcgagagcccgtcggcgccggccaacaagagccaggcggcgtcagcctctgatgaggttgtggacgccgccgacagcggccggcggccgggcaagaaggcgcgggctgatgaagtggccacggactggagggcgctcgacaagttcgtcgcgtcgcagctcagccccgcggcggagtgcggcttggaggcggcggcagcgtcgtcgacggccgccgccagcaacgtgggctcccagctggaccacgttgaggatgatgacatggcggcattgctgttcctcaacagcgacgggagagacgaggcggagaggtggacggggctgctcggcccggccgccggggacgacggcgactttggactgtgtgtgttcgacaaatgagtggcgggcgcggacggccggcgcgccgcccgcgtgcatggtgtggcgcggagggatgcatgcatgcatgcgtacatgggatggtgcgtgtcatatattatgtggttatagctgaaagttggtctctcttttattttttttccttgactactttccctttgtatgtttgccaacaaatgtgattgtaattttcatctgtctctgtgcagagtcataagatgcatgccattccggcagatgtgttaattcttt

SEQ ID NO: 91478 - DNA, 1456 bp, Zea Mays
caagaactcatatatgcgcacaacactcttcctctgacaagagtttgttctgcaactaaccactatatatatagatcgatcctctatctgacaaggtgcaggtgcaggtgatcatatgaactccatggaatcatgcgtgcccccgggtttcaggttccaccccaccgacgaggagctcgtcggctactacctcaggaagaaggtggccgcccagaagatcgacctccacgtcatacgcgacatcgacctctaccgcatcgagccatgggatctccaagggcattgcgggatcgggtacgaggagcaaaacgagtggtacttcttcagctacaaggaccgcaagtaccccacggggacgcggaccaaccgggccaccatggccggcttctggaaggccacgggcagggacaaggcggtgcacgacaagagccgcatcatcggcatgaggaagacgctcgtcttctacaaggggagggcccccaacggccacaagaccgactggatcatgcacgagtaccgcctcgagaccgacgagaatgcgccgccgcaggaagaaggctgggtggtgtgccgagcgttcaagaagagaacagcgtacccggcaaggatggcatggggggaccccagctacgcctaccgcgagatcagcgccatgggcgcggcggcggcggcgttcgtggaccctaacgcggcgtcgtacgcgcagatcagacgccagcagtccaacaagagcgcgcgcttcaagcaggaggccgagctggacggcggcgccgccgccgcgctgctgcagtactcctccagccacctggtcgagctgccgcagctcgagagcccgtcggcgccggccaacaagagccaggcggcgtcagcctctgatgaggttgtggacgccgccgacagcggccggcggccgggcaagaaggcgcgggctgatgaagtggccacggactggagggcgctcgacaagttcgtcgcgtcgcagctcagccccgcggcggagtgcggcttggaggcggcggcagcgtcgtcgacggccgccgccagcaacgtgggctcccagctggaccacgttgaggatgatgacatggcggcattgctgttcctcaacagcgacgggagagacgaggcggagaggtggacggggctgctcggcccggccgccggggacgacggcgactttggactgtgtgtgttcgacaaatgagtggcgggcgcggacggccggcgcgccgcccgcgtgcatggtgtggcgcggagggatgcatgcatgcatgcgtacatgggatggtgcgtgtcatatattatgtggttatagctgaaagttggtctctcttttattttttttccttgactactttccctttgtatgtttgccaacaaatgtgattgtaattttcatctgtctctgtgcagagtcataagatgcatgccattccggcagatgtgttaattcttt

SEQ ID NO: 91479 - DNA, 3131 bp, Zea Mays
ggccgcgccacgaactccacattgcccgcgccgcgcactgccgcactccgcaggggggagggacaggacgcgccgtgcccgtgcgtgagcgtggcaccaacccctcaaccctacccgcccgcaagtaccctcacgtagtcacgttcgcttctcgctcggccgctcctcctcctcgccacgccgcgcgcccggcagcgggaggcggggcccttcgcgcgcgcgcaatggcgccggacccgtgcgccgacctcgcggtgacgcccaagacgtcggccaaggacgaggcgtcctgctccgtggccccgcccacgccgcccaaggtcacccccgacgaggtccgcgcggtggcgcgcaagttcgcggaccagcctatccaggagacggaacccgacgtctgggccgtcctcaccgccatctccaagaaggcccgcctccggccccaggggatgaacattcttttgagcgctgacgagcactacctagggcgtgctgttgaggagcggtttcgggtttttgcccagcagatcagtgggaagcattgcaagatatacaaggacaccgtctcaggggagcggaaccgccatgagcctgtgcctgttttcttcaaggacacaagctcaaatggcacattcatcaactggaaaaagttcaagaaaaatgcatccccggtcaagcttaatcatggcgacattatatcattaccatcacctcctcatgacggcaaatcctttgtatttgtctaccgggaagttaatgcaatcagttgtgtagagaatggggttcccattcttaaaaggaagtcagaggagggtagttctggaagcaagaggcttaagggtcttggtattggttctcctgatggtcctgtttcactagacgatgtccgaagactagaaaaatctaatgctgatctcagggaacaacttgaggctcatgttgtgacaattgaaactttgagggctgaaataaaaacgacccaagtgcagcatggaaaggaacttgaggagttgagagaaactacgtcgagttcttatcttgatcaaactaaatctctccagtccacacttgaggagaaacagaagcaaatagattcactcagtacatcaaatacagagttacagaactctataaaagatctggatgaaaggcttggtgcatctaaacaatcacgcgcggatgctgatgagataatttcaagccagaaagcaatcatccgtgagcttgaggaacagctaagtgaggagcgcaacttaagaagagaagagcgtgataaggctgcacatgacttgaaatttgcagtgcataaagtgcaagccgaggctcaagaagaaattaagaaacaagcagagtcttaccttagacaacaaagagaacagaaagaagttattaacaagcttcaggaatcagaaaaagaaacacgtttgtttgtggaaactttgaggtccaagttggaagatgctcgagataatcttgtaacatctgagaaaaaagtaagagagctggaagctcagtttcaggacgagcagctagtatcagccaacaatcgaaagaaatcagaaaatctggaaactgaattgagaaaactgaagaaggaacttgagaatgagaaggctgctcgagaagaagcatgggcaaaggtctcagctcttgagcttgaaatagctgcaacgattagagatctatcaattgagaaacagaggtatcaaggggctagagaacggattattctacgggagactcagctgcgtgctttctattcaactacagaagaaatctcttctctgtttgcgaagcagcaggaacagctgaaagctatgcagagaactttggaggatgaggagaactatgagagcaccttaatgagtgtggatctcaataaagagcatctagccattgataatgctggtatgaagccagtaaactgctcaaaaaatacactgggagcttcaattgcttcaccagaaaatactcaggtaagtgaacatagttccagtgacgaagatgccaacatgactgagcagcaagatgatgatgttactgccaatggtggcaacactcaagatctagaatgcaccagtccagaaaggtcagtggagaggaggccgggttttcatggcaatcctgttcctacagctcctgagagggaagtaacagatactgagcaagttcctgagacagaaagcgaagctggtaatgttggttgcgatgaccaaagatgtgacaatatcggaggagagactatgccgctagaggacgaagtgctgcttccagagaacgaggagcctactgcattgctcaaagatgcagggcagccacaatcaaatatggttcctattccaattctcgatgatggcggcggccactgttcagaagaaaaacacgagggtgcttgctctgagagcaaacgggatgacacacatgttggagctatcagaacgggtgatctgttggcctcagaagttgctggcagctgggcagtggaaacagctccatctgtcaatggggagaacgaatctccaaggagcttgggagatgctacagagcgagatgaagatggaggtagcgtggcagctgatgctttgctaactttggtgaactcagagggccaggcggctgggagccagaataatgttgagcaggccagttccaaaataaccgatgatcgccgtgttcttagtgccatgattgggattgttgatcctgaattcaggaagcaaatgtccaggagtggagctggaaacgaggagccgatgtctgacgctgagacggatgaaggcgtcgaggaaggtgattcagattcaggttcagatggcagcgacagcgacagcgaggaggctatggttgaggattctgttgggtagcttaaacggaattgactgctcactgtaaatatctcaattcgttcgtgcaccattcgctgtatgagcttgtattatgcgtagtgtagcagtatttgttttttattctttaaatgtttttagcagctcgtggtgttgtacgaaatggatgccgtttggtcttcaacacaaaataaagacattcaaactataaaaggatttggctttttatatacagttgattttctatatattcagacataatatagaaaagtcaaaaataactcaagaata

SEQ ID NO: 91480 - DNA, 1012 bp, Zea Mays
ttactttgcttgatctcggtttagcttctttagcatgctttaaggacatttcatttagtaaagctgcactctctaacgacttttctttttattttaaggttgaagccattcgcaatctatttgcagcactcttccttgcaagcattggaatgctcatacatgttaagttcttgtggaatcatgttgacatattacttgcagctgttatactggttataatagtaaagagtattgtcgtagctattgttgtaaaggcatttggatacagcatgaggaccgcttttgttgttgggctgtccttggctcagataggagagtttgcttttgtgcttttgagccgggcctcccatctccatcttgttggggggaaaatgtatctattattactgggaacaactgcccttagcttggtaacaactcctctcattttcaaactaattcctgtggtaatgcaccttggcatccttatgcgttggttcccctcggaaaacagtatgcagagtgaggaaaaggcggttatgcttgaagcccacaacagatcactctaacattgcctagccacaacattcttttgactgacggtgatttatttgtgcatcgactctttgcgcatgccatggaaacattggagaaacaattacacaccagtactccctttttgcggcgatatgggaacacgatgggatggacagagttaacagcttggccagccttggggctctccgtatagcattcttttttattgcgcttttgagttgtacatataggggatactgtacatgtcgtcaaggtagcatacagggggaaggcgccgatgggccttggttttgtatcattgttgccaactcgatcagtcgacagtctagaaagctagatagggatttttggtacctcgtgctcaaatgtacacttattgtcagaagacgatgggaaagttgtatgttatgtatttgttatgcccttgtgacgactaattgaccatggacacatgaatggtaacgtgttcaccgta

SEQ ID NO: 91481 - DNA, 2356 bp, Zea Mays
tcggtctctcctccgactcaccccgcgcccgcggcgagaaataaaagagaaatcccccgacgaccccgacgcgccacccgcaaatctcgctctccccgctgcccgcccgcccgcaccccacccctcgctcgcgcgccgcggcgcccgcgcgatccgatggcccccgccgccgcagcagcagaagcagcggggccctcgcctcgccggcgcctcgcggcggccgtcctcgcgctcgcgctcgcgctcgcctgtgtcctcgcgcaggcggccgccaggcccgacaaggagacgcgggagaagttctacgggacgctcgtcgccaacggcacacacaacgcctccggggacggcagcatcgccgagatgttcggccgcgtgctcgacaaggagttctccgacagcgacacgcccgacgctcccgacaagagtagcttcaacaacagcgtgtcagatcatcaagctgttctggagactgtagctgtcattacacatgacaagaagaagaatgattcacaacatactaattccccaaaacctttccaaataggtgacatgtttggaggccaagatgaaacctccgatgacttggaaactgtgattgataaagaggataatgtttttgtgatgtcaaatcgtaaaacaaagtatccaactcttcagctagatttacgattgattaaagatctggtaattataatcgtttcagctactggtggtggtatcatgttctcttttatggggcagccggttatcgttggctacctgcttgctggttctctagttggacctgggggtttgaactttatcaatgaaatggtgcaggtggagacttttgctcaatttggtgtagtgtttcttctttttgctcttggtctcgagttttcactgactaagttgaaagtcgttggtcctgttgctgtacttggaggtctgcttcagattgttctgttcatgttcttgtgtggcctcactgcagcgttgtgtggtgctaaatcatctgaaggagtgtttgttggtgccttcttgtctatgtcatctactgcagtggtttcgaagtttttagtggaaaaaggtagtacaaacacgcttcatggtcaagttacaattgggacgctaatacttcaggattgtgcagttggcctgctgtttgcactccttcctgttcttggaggtgctagtggcatttttggaggagtgatgtcaatggcgaaactgttgctagtgctatccgtatttgtagctgttacatatatgatgacatggtcaattgttcctcgattcttaaaactgatgattcagttatcttcacagacaaatgaactctaccaattggcctccgttgcattttgcttgcttctagcctggtgcagtgactattgtggattgagtcttgagttggggtcatttcttgctggtgttatgatatcaaccacagattttgctcatcatactatggagcaggttgaagccattcgcaatctatttgcagcactcttccttgcaagcattggaatgctcatacatgttaagttcttgtggaatcatgttgacatattacttgcagctgttatactggttataatagtaaagagtattgtcgtagctattgttgtaaaggcatttggatacagcatgaggaccgcttttgttgttgggctgtccttggctcagataggagagtttgcttttgtgcttttgagccgggcctcccatctccatcttgttggggggaaaatgtatctattattactgggaacaactgcccttagcttggtaacaactcctctcattttcaaactaattcctgtggtaatgcaccttggcatccttatgcgttggttcccctcggaaaacagtatgcagagtgaggaaaaggcggttatgcttgaagcccacaacagatcactctaacattgcctagccacaacattcttttgactgacggtgatttatttgtgcatcgactctttgcgcatgccatggaaacattggagaaacaattacacaccagtactccctttttgcggcgatatgggaacacgatgggatggacagagttaacagcttggccagccttggggctctccgtatagcattcttttttattgcgcttttgagttgtacatataggggatactgtacatgtcgtcaaggtagcatacagggggaaggcgccgatgggccttggttttgtatcattgttgccaactcgatcagtcgacagtctagaaagctagatagggatttttggtacctcgtgctcaaatgtacacttattgtcagaagacgatgggaaagttgtatgttatgtatttgttatgcccttgtgacgactaattgaccatggacacatgaa

SEQ ID NO: 91482 - DNA, 2472 bp, Zea Mays
gcctctcccttcccagttcccccgcctgccgccgcctcgtgctctcgtgctcgcgcgaccggatggaggatattcggacgacgactccaccgcgccaaccgacccctctcgcctctctcggtctctcctccgactcaccccgcgcccgcggcgagaaataaaagagaaatcccccgacgaccccgacgcgccacccgcaaatctcgctctccccgctgcccgcccgcccgcaccccacccctcgctcgcgcgccgcggcgcccgcgcgatccgatggcccccgccgccgcagcagcagaagcagcggggccctcgcctcgccggcgcctcgcggcggccgtcctcgcgctcgcgctcgcgctcgcctgtgtcctcgcgcaggcggccgccaggcccgacaaggagacgcgggagaagttctacgggacgctcgtcgccaacggcacacacaacgcctccggggacggcagcatcgccgagatgttcggccgcgtgctcgacaaggagttctccgacagcgacacgcccgacgctcccgacaagagtagcttcaacaacagcgtgtcagatcatcaagctgttctggagactgtagctgtcattacacatgacaagaagaagaatgattcacaacatactaattccccaaaacctttccaaataggtgacatgtttggaggccaagatgaaacctccgatgacttggaaactgtgattgataaagaggataatgtttttgtgatgtcaaatcgtaaaacaaagtatccaactcttcagctagatttacgattgattaaagatctggtaattataatcgtttcagctactggtggtggtatcatgttctcttttatggggcagccggttatcgttggctacctgcttgctggttctctagttggacctgggggtttgaactttatcaatgaaatggtgcaggtggagacttttgctcaatttggtgtagtgtttcttctttttgctcttggtctcgagttttcactgactaagttgaaagtcgttggtcctgttgctgtacttggaggtctgcttcagattgttctgttcatgttcttgtgtggcctcactgcagcgttgtgtggtgctaaatcatctgaaggagtgtttgttggtgccttcttgtctatgtcatctactgcagtggtttcgaagtttttagtggaaaaaggtagtacaaacacgcttcatggtcaagttacaattgggacgctaatacttcaggattgtgcagttggcctgctgtttgcactccttcctgttcttggaggtgctagtggcatttttggaggagtgatgtcaatggcgaaactgttgctagtgctatccgtatttgtagctgttacatatatgatgacatggtcaattgttcctcgattcttaaaactgatgattcagttatcttcacagacaaatgaactctaccaattggcctccgttgcattttgcttgcttctagcctggtgcagtgactattgtggattgagtcttgagttggggtcatttcttgctggtgttatgatatcaaccacagattttgctcatcatactatggagcaggttgaagccattcgcaatctatttgcagcactcttccttgcaagcattggaatgctcatacatgttaagttcttgtggaatcatgttgacatattacttgcagctgttatactggttataatagtaaagagtattgtcgtagctattgttgtaaaggcatttggatacagcatgaggaccgcttttgttgttgggctgtccttggctcagataggagagtttgcttttgtgcttttgagccgggcctcccatctccatcttgttggggggaaaatgtatctattattactgggaacaactgcccttagcttggtaacaactcctctcattttcaaactaattcctgtggtaatgcaccttggcatccttatgcgttggttcccctcggaaaacagtatgcagagtgagcttccattacaggaaaaggcggttatgcttgaagcccacaacagatcactctaacattgcctagccacaacattcttttgactgacggtgatttatttgtgcatcgactctttgcgcatgccatggaaacattggagaaacaattacacaccagtactccctttttgcggcgatatgggaacacgatgggatggacagagttaacagcttggccagccttggggctctccgtatagcattcttttttattgcgcttttgagttgtacatataggggatactgtacatgtcgtcaaggtagcatacagggggaaggcgccgatgggccttggttttgtatcattgttgccaactcgatcagtcgacagtctagaaagctagatagggatttttggtacctcgtgctcaaatgtacacttattgtcagaagacgatgggaaagttgtatgttatgtatttgttatgcccttgtgacgactaattgacc

SEQ ID NO: 91483 - DNA, 570 bp, Zea Mays
gtttttcaccaatcttgaaatgcatactcacactttctttcttatttggtcaaggttgggctgtccttggctcagataggagagtttgcttttgtgcttttgagccgggcctcccatctccatcttgttggggggaaaatgtatctattattactgggaacaactgcccttagcttggtaacaactcctctcattttcaaactaattcctgtggtaatgcaccttggcatccttatgcgttggttcccctcggaaaacagtatgcagagtgaggtaccctttactgccctctttgcttatcttattcaaagcttgacttatggacattgatgcctggagtgataaaggcagtaacgcctgtgtccaaacttcatgatctagaatcttttgacatgttaggttttgaagaagtgtcaacgacaaactgcttagtgaaataacacatttttcatttttcttttgttaatcagttgaggtactttatagtactccattccagtattttttattatgtacacttgaatatgaaatagatgtttccctcttaaatgaaaactgggaattgggatg

SEQ ID NO: 91484 - DNA, 869 bp, Zea Mays
cacatacggttctgcctccatccagatctcgcgctctccctaagcaccacccagcaccaggcgccatgcccgcccgccatctccgctgcgccaaatcgaggaatccgcctccgctatggaaggagatcgcctctgctgcgccccaattctcggttggcatcatcgtccgcgtcctggctctcggtccttcgcccacgttgtccatggaaggagatcgagaatcacggtcctcggccaggctctaaatggatggagatcgaggaatccgcctccgctgcgccctggcaccctctacgaccgccgcctctccctcacctgcccgcccgcgagacaatcgccatcgtccccctgccccgcgctgctcgcgatgaccccctcccccgcgattctagggtcttcgcgacccatggcgtgtcgctctgcgccgacctcctcctccatctggtaagcgaccacctcctctgtctggtaagcttcagagatccctgtgtgcctggtccggatcgtgatgttgagttgtgttgacccacgcgaatcgatgttgatgtgctttgttttgccagagatccaaacagtgctcgtgttaataatgaggtacacaaatgaacccccaatcctgctcgcctgcagctctagctacaacgatgtgtttgacgtttcttggtgttgtcgcccgcacggtgtctattgacgcggtgttccagcagaggctgatttgtgaagttccttgctttcgttcatgtttcttcagctaggatttgagtgagaaaataataaacttgtattggtcggtgtattgcgccgaggggattgggaccagcagcggcagccaggagtggaaggccaacctgagctgggtgctcgctgcc

SEQ ID NO: 91485 - DNA, 1643 bp, Zea Mays
agctttcagatttgttcttctcgtttgacttctcctttcactacatgaatgggtctcaggatccgagagaaagccgttgcgcgaaatggaatggcgcagctgcttagaatattgtgttctgaaactatcatgaaaaaagggggaaatgtacatgtttgctcaaattacatgtggaaatggcaatgcaccaacagattcaatgaagcaaggaccggaacagagcgggggagagagatcacagagaaacgggtatctgcttggatcggaggaagcagaggtcggaggagctgtcaagcaacaatgcatcacaagagggaggccagcacgacggagcacacggccaccgcggcgagcgcgccggccggtcgccacgcgacggcggacgacgccgacggcttcttggacttgtggtcggcgtggtccgcggccaccgacggggcgtccgccgcgggcggggacccctgtggcgcgtccgctggcgccggcgccggtgccgcctccggggcgccgacgtagagctccggcggcaccaggagggtgtccatggtgagcaggcagaacgggacgctgtcgacgacggtggacgcgacgcgggacctgctcttgccggtgtcgagcgagacgtcgtcgcccttggcgaccaccgtgacgtcggccttggcggccagcgtgcggagcgggcccttgacggacttgagcgaggtcttggtgttgtaggaaggcagggcgtggtactggaggagcttggtgaggttggccttggacatggccttgacgtcgggcgcgtccttggcctggaaggcgtcgtcgttgacggcgaacagggtgaggcccttgtccatggcggcctcgtacgtcttgagcacgcccgtggaggcggccagcgacgcgaagaccttgcagccggcgcgctccaggaggcgggtgaggttgtcggtggagggggtgtcgaagaggccgtcgaactcgatgggcgccgtgacctcgaggatggcgaacttgaaagggtgcgtctccacctccttggtgacggtgcagatcctggcgcccggcgtggcggccgagaagccgtagttcttgtcctcctggtccaccaccttgacgttccccgtggtgctggcggcgtcgcccgtggcctggtacagcgtggcggcgctctcgtcgccgtacttcttcaccttcttgcggtcgtagtagtcgagcaccgagtggaggcgcagcgcgttcttgatggcggggagcgagtcgccggcgtcggaggccagcgtcgtcatggcgtcgttggacagcaccaggacggacatcgacgtcgactgccgcgagttgatctcgtcgcacaccttcgtctccgacaggtactggttgtatagcttgtactccttgtacccggcgaggatggccgtgatgttgcgcccgcgcgccggcagcgccaggagcaggaggaggcaggccaccagcgccgccgtgaaccgctgcgtcgccatggttctctctcactaacacactcacacaaaccctggtagcaagcaagcaagcgaggacgaccacagctgctactgctagcctggctaattaaactatggtttggattgcgaggctggtgtggtgaggtctcgtctcggacgctggacggtaggtgcgtc

SEQ ID NO: 91486 - DNA, 3220 bp, Zea Mays
tccttttttatgataccagaaggagaatgatgagaaagacaggagtgctgtaataaagatttttcaagatatgctggaggttgtaacaagagatatatttgacgaccaccttagtattttagagtcaagtcatggaggctcatatcaaaagcatgatggcacaaccacgtgggataaagagtatcagttgtttcaaccatctggagctatcaagtttcctctacaagtcacgaccacagatgcttggctagaaaagataaaaaggctggaactgctacttacggtgaaggaatctgctatggatgttccttcaaacctagaagccagaaggcgtcttacattttttaccaactccttatttatggatatgcctgatgcacccaaagtccgaaacatgctctcgttttccgcattgaccccttattacaatgaaccagttcttttctctataaaagaacttgaggaagaaaatgaagatggagtttccaccctattctacctgcaaaaaatttatccagatgaatggaaaaactttaaggaaagggttggattggaggaagaacttaaagagagcgaagaaagcgaagaactaaaggaggaacttcgtctatgggcctcatacagaggccaaacactagctcgaacagttagaggcatgatgtactacaagaaagctttgaatcttgaagcatttctagacatggccaaacgtgaagatctcatggaaggatacaaagcagccgagtcagtaaatgatgaacaatggaagatacaccagaggtccttatttgctcaatgtgaagcagtggctgatatgaaattcacctatgttgtttcatgccagcagtatggaaatgataagcgtgctgcacttgctaatgcccaagacatattgcagctaatgaggaactacccttctctccgtgtagcatatattgatgaggtggaagatagagtaggagacaagaaaatggagacagcatattattctactttggttaaggttgctctaactaaggattctgaatctgcagaccccactcaaaatcttgatcaggttatctatcggataaaacttccaggccctgcaattctgggagaaggaaagcccgaaaaccaaaaccatgcaataattttcacccgtggtgaaggtttgcagaccatagatatgaaccaggacaactatttggaagaatcccttaaaatgagaaacctgctccaagagttccttacggagcatggagtgcggcgtccatctatacttggagttagagagcacatttttactggcagtgtatcctcccttgcatggttcatgtcaaatcaggagcacagttttgtgactattgggcagcgtctccttgcaaaccctctgaaggtccggttccactatgggcatcctgatgtatttgatagacttttccatctgacaacgggtggtgtcagtaaggcatcaaagagtatcaatttaagtgaagacatttttgcaggttataactcaactcttcgtggaggcaatgtaacacaccatgaatatgtacaagttggtaagggaagagacgtcggattaaatcagatctctaagtttgaggctaaaatagcaaatggaaatggtgaacagactcttagtcgtgatatctaccggcttggacaccgctttgattttttcaggatgctttcatgctacttcacaaccgtggggttttatttcagtacactgttgacggttgttacagtttatgtatttctgtatggacgcctttatcttgctctcagtggacttgaagaggggctatcgcagggaagattgattcataatcatccccttcaaattgctcttgcctcacaatctcttgttcaacttggttttctgatggctcttccaatgatgatggaaattggtcttgaaagaggatttggtcaggcactaagtgatctaatcatgatgaacttgcaattggctactgtctttttcacattttcccttggcactaagactcactactatggaagaatgttgcttcatggaggtgctcagtacagaggtactggcaggggatttgtcgtctttcatgctaagtttgcagagaattatagactctattctcgcagccactttgttaaagggattgagctgatgattctgctcattgtataccaactatttggtcaatcttatcgctcaacaattgcctatatttttattaccttctctatgtggcttctggtattgacatggctatttgcaccctttctgttcaacccctcgggatttgagtgggcaaaaattgttgatgattggtctgattggaacaagtggatcagcaatcgtggtgggattggtgtgtcaccagacaagagctgggaatcttggtgggaagtggagcaggatcatctaaaatattcaggaacaataggacgctttgttgagataatcttggctatacgttttttcatataccagtatggccttgtttaccacttacatgtcacacataacaaaagcatcttggtatatttaatttcttggctcgtaattgtggcggttctgctcgttatgaagactgtgtcggtgggaaggcggacattcagtgcagatttccagctattcttccgtctgatcaagtttttgatatttgttgctttcattgctattttgattgtcttgatagtattacttcatatgacctttcgcgatatatttgtgtgctttctagcattcttgcccacaggatgggggatacttctgattgcacaagcttgcaagcctcttgctcgacatgtaggattatggggatctgttcgtgcccttgcacgggcctatgagataattatgggggtgcttctctttagtccagttgctatattggcatggttcccctttgtgtccgagttccaaacgcggatgctgtttaatcaagcgttcagtagaggactgcaaatttctcgaattcttggtggtcaaaagaaggaacgctccgctcgtaacaaagattgattagtcttctttcatgtgtgttccaatatgcacttgtaaatatttgttactgtctcacggggtatagtgtgtttttatgattacaatatgtaaatatcagatcaaggtgtcataattgtattcgttagattactgtgtgtgtttctattgtaatagtctttgatccagcacatgtacttttactacatatatacgcaaagtctactctaatcagggtttcca

SEQ ID NO: 91487 - DNA, 172 bp, Zea Mays
tttttggtcgggttgttaccttgtgtgtgtgtggtgcgttgtgttattgccggaggggtctcggcctaggggcctttgtaattaggggttgacaagtcttgtctctcctatgttctttttttcttcttaatataatgacacgcagctctcctgcgtttgttcaaaaaaaaaa

SEQ ID NO: 91488 - DNA, 657 bp, Zea Mays
ttgccaacaattcagcaggagatgcaacaacgaaaattactgtatatgggcttgtaccttctcatttggggtgaagctgcaaacttgcgttttatgccagagtgcatttgctacatatatcatcatatggcatttgaaatgtatggtatgttagctggaaatgtcagtgccttgacgggtgaatatgtgaagccggcctatggtggtgagaaagaagcctttctgaagaaagttgttacaccgatttaccataccatagcaaaggaagctgaaaggagcaaaagagagaaagggaatcattctgagtggagaaactatgatgatcttaatgagtacttctggtctgctgactgctttcggcttggttggcctatgcgagctgatgctgacttcttttgtcagcctgatgaaagaaatgaaagcacaaggatcagcaaacagaagggaaaggtcaacttcgttgagctacgctcattttggcacatattcagaagttttgacagactctggagcttctttattttagctcttcaggttatgataattctcgcttgggacggaggttcactagccagtatttttgattatgctgttttcaagaaggttttgagtatctttatcacttctgctatactaaatcttggacaaggtgtgtaa

SEQ ID NO: 91489 - DNA, 942 bp, Zea Mays
ccgcatttaaatccgccgcgatctcccgccgctctcccccccgcatcccatgcccaccaccactcgaccaaggcacccagccctccttccctcagcgcttgccggccgacgcactgcttggtgcctgtctgcctttctccttccattgacagccgtcgatggcgacgccgcctcagcagaagcagcagccgcagcaggtgtcggtgcagcacgtgggcagggcgtcctcggacgagctcctccgcaagttcgcggacccggacgcgccccgcgccgccgccaccccgccgcgccgcagcctcaagcgctcgtcccgccgcgtggcgtcggggctctccgcgcgggactccgacgcgtcggcggccgcgggcgtcacggccgcggcgctggcggcgcccaagcggcggcggagcatcggcgggtccaccggcctgctcctgccgaccgcgtccgcgaggaaggcccgggcacgccgcgcgcgcgccgacgacgccgcgggcatcggcctcctcctggccgcgctggagcggacgtggaggaagacggtggcgggggcgtccaagatgttcgtggagaggcaccggaccaaccacgtcctgctcatcagcgacatggtctgagcgcagaccctgctggcgctccctctctcgtctgctcgggtttgatcgctgagatgttgttttattcggttggattcagcattcgttttagaagcaggtagcagaataaatcggctggcgcctggcggtgcagtccaggttcctcgttccctccctgccacttgccactgtgatttcccttgtgtttcgtttgtgatttcttttttttttgggttctctctctctctctctctggtggcgaatcattgtgccagcgaccacgttgtaaattgaagtttgcaaaccacgttaccagcgttgtgctaagaaatggatttacacc

SEQ ID NO: 91490 - DNA, 1368 bp, Zea Mays
atgttgatgcaggtgaacttggacgcgacagggtggtgttacatcgtcgaaccagagaaagacgaggtgatcgtctacttccacgaccgcttggcgtttgttgggctcctgcgctttctgtcgctcgatatgttggttggtctttacaagaggagaatgatgacaacaacgtgggcgtcaattaagcagatccgcattgaggttcaacggaggactggctcgataggcttaagctccacaggttcgaggagagagaccgtaggagcagctcttgtgccgacagcggcaagaagtgtggtggccacaagcgaggtcgtggacacggcaaaggcgagaggtttggctccgcatcgtccgatggctacaagggccaattcgacgatgaataggccctcaaccgcaaccagtgcaagcattgtggaaaatacgaccgttgggccagggattgctacgtcgcgcaagctgaagaagactcagagttcacgctgtttatggcttgagctactgtcttccccaatgtgccactgccaccatgagccgatgctgctctatctttattcgagccatggaccctacacatcgttgatagaaacgtcttcatgcagctcgatgcaggcgttgcagcccttccgtaagaagatttcatgggtttcagaatgcaataagctttgggaaggagcacaacaggtgtcaccgtgttccttcttgtcctctgggtcgttggatcggtcgttacctggattgtgggcttggtctttggcgctgcgaaatcttagaaggtggatgttttcgctgcaagatcattccttctgctgcgttgcacgaatgggcgaccaacagggaggtaggcaaccaagctagcacttctgcattgtaggcaacgtcccgttcctatacaacactatagctgttgcacaaagttagactttttgagctatattttaattcagaaaataaacaactgttgataatagaaggtgtatgccctgttcctatgcaacaccacagctgccacacatggacgtcactgtagcagaaaccttccgctgagctctggagcggaagaagagagaaatgtgcacagagcaagcccggagtgtcaggacgccaaaacagtttccatggcactgctcatgaatcagaccaccccaatccattcgtgccatcgctgtcgtcacgactcacgagcgagcgtgatcgcgtctaacggcccgaatcatcaagcgctggcagtcacgggagaaataaaaactcgcccgcccatccggcaggccgtcagtccggctgccaggcgcgccagcgcggtggaccagcgcgcggccgatgcagtcatgcagaccccccgcgtccggcaacgtcgcgcgggcg

SEQ ID NO: 91491 - DNA, 852 bp, Zea Mays
ttttgtgagttatgcatcagttctatggtttgtaaaacatagctaagagtctacagaattctatacacatagaaggagctatgcatgcagtttcattggcacattctattgtccctgcttgcatgacagtggtaaagagagctcattacattttgataggaattaagggcatcacatgtccattttcacgtgcatccacacacacacacatatgcatctttgagttagctacttggttcatgacagggaagttgatcgagccattatgatcataataacttctctatgtatggaatatgatcgcagaacttatgcactgcaacttgcatgttcatattcagtaatggcaaggagcaccaattgcattctctcagttattactcttgctatttttatacagcaggcgttgcagcccttccgtaagaagatttcatgggtttcagaatgcaataagctttgggaaggagcacaacaggcaagccctattcgcttcaggcagaggttctcctagctccagtgacgatggctcgagttctcctgatggcccacctgtcctgaccattctggcaggtgtcaccgtgttccttcttgtcctctgggtcgttggatcggtcgttacctggattgtgggcttggtctttggcgctgcgaaatcttagaaggtggatggtaggctaccaatcagttgtatatactttatttgtgttggaatcgttacattgaatagctgcatttgatgctcttttttttctgacggaaagtctcgtttatataattgcaattgccttttgtgccgttatctgtccgaggtactgcttagtttttattttttttcctcgtcctgaaaaaaaa

SEQ ID NO: 91492 - DNA, 1835 bp, Zea Mays
cgacggccggtcggccgccagggcgcgccgctcgagctaccagacgatttcggctgataaatttggacgcgcgggcgggagaaggggagaaaacgcggagccacaccccgtgtcgaaaccccagggcgccaagcttcccgcgggccaccgccgctgccgatgccggtgccgaagccgatggagaggaagcaagccgcctacagcaacctcgatgagaggtacgcgatccagggggagaagtaccaggggcagcagtacagccatatctacttcacgcgcctccaccacatgcggaatctcctccacgccctcgtcccctcctggaagccgcaactccctgtcactacagtgttaggacttgaagaaggaaaggattgcataattgttggaactttatataagcacatgaagttgaagccttcaattcttgatgaatatgccaaagagaggtctgcaattccccttgtcaaaccacataatttcatgcatcctgatgatcatctcattctggaagatgaaagcggaagagttacacttgcaggagccatacctccagcagcattcgtgactggggttgtagtggctctccatgggaaggaaacaagtgctggcaattttcttgtggaagatgttcttgaggctggtcttccaccccaaagtgcattgtctagcgcagaagaagacaagtatgtagtattcatatcagggctaagtgtaggaagtgacacattcaatcctctacagttccaacttcttattgaccatgtcacaggacatctgggtgacgagaatgagcaatccatagcatcaaatatagtacgcattgtggttgttgggaattcagtgcatatttcaccaaggtttgtcaatggtcagacggtaccatcaaaagatcaatcaaggatagcagaacctattaaggaactggatataatgcttacccagctcgtggcttcgttgcctgtagatatgatgccggggtgtcatgatccggcaaatttttctttgcctcagcagcctctgcacagatgccttttctctggggcatccacctacaacactttttcgtcttgttcaaatccccatcaattcgagcttgacagtgtccagtttcttggaacatctggtcagaacatagatgacctgtacaagtactctgatgctaaagacaagctggaattcatggaaagaacactgagatggcgccatcttgctcctactgctccaaatagcctaggctgttatccatacacagacaaggatcctttccttgttgaaagttgcccgcacgtctactttgttgggaatcaagataaatatgaaactcgactgttggaagggcaagaaaaacagaaagtgaggctaatctccatcccaaggttctcggagagtggagttgctgtaatgctcaatctgaggaacttggaatgcagcacattgagtttctcaacaagctttgatgcctgaatatgctctgatgtttggaagtgcagaagacttcaatgtacaatgttgagcggcatgaccacgagggtgtatttgtactagagcagttctttattagatgtatgatgatgaccttaggttttgccaagtagatcttttagaatgcagatgctgtaacttgtaaccacaaccgaaactgaggctggaccgagtgtagcgtttaacaatcgagttggtgctcatgcctcgttttgcaatcacaatcagcaggcacgtttgtcagatgtgctactcttttatcatcatttctgtgcgtctgtaatgaacactcgggccaaatatttggagtaaaaacatcaactcaccaggcggtagttgattgaacgatc

SEQ ID NO: 91493 - DNA, 1860 bp, Zea Mays
cgacggccggtcggccgccagggcgcgccgctcgagctaccagacgatttcggctgataaatttggacgcgcgggcgggagaaggggagaaaacgcggagccacaccccgtgtcgaaaccccagggcgccaagcttcccgcgggccaccgccgctgccgatgccggtgccgaagccgatggagaggaagcaagccgcctacagcaacctcgatgagaggtacgcgatccagggggagaagtaccaggggcagcagtacagccatatctacttcacgcgcctccaccacatgcggaatctcctccacgccctcgtcccctcctggaagccgcaactccctggcaaactttttcctgcacattgcagtcactacagtgttaggacttgaagaaggaaaggattgcataattgttggaactttatataagcacatgaagttgaagccttcaattcttgatgaatatgccaaagagaggtctgcaattccccttgtcaaaccacataatttcatgcatcctgatgatcatctcattctggaagatgaaagcggaagagttacacttgcaggagccatacctccagcagcattcgtgactggggttgtagtggctctccatgggaaggaaacaagtgctggcaattttcttgtggaagatgttcttgaggctggtcttccaccccaaagtgcattgtctagcgcagaagaagacaagtatgtagtattcatatcagggctaagtgtaggaagtgacacattcaatcctctacagttccaacttcttattgaccatgtcacaggacatctgggtgacgagaatgagcaatccatagcatcaaatatagtacgcattgtggttgttgggaattcagtgcatatttcaccaaggtttgtcaatggtcagacggtaccatcaaaagatcaatcaaggatagcagaacctattaaggaactggatataatgcttacccagctcgtggcttcgttgcctgtagatatgatgccggggtgtcatgatccggcaaatttttctttgcctcagcagcctctgcacagatgccttttctctggggcatccacctacaacactttttcgtcttgttcaaatccccatcaattcgagcttgacagtgtccagtttcttggaacatctggtcagaacatagatgacctgtacaagtactctgatgctaaagacaagctggaattcatggaaagaacactgagatggcgccatcttgctcctactgctccaaatagcctaggctgttatccatacacagacaaggatcctttccttgttgaaagttgcccgcacgtctactttgttgggaatcaagataaatatgaaactcgactgttggaagggcaagaaaaacagaaagtgaggctaatctccatcccaaggttctcggagagtggagttgctgtaatgctcaatctgaggaacttggaatgcagcacattgagtttctcaacaagctttgatgcctgaatatgctctgatgtttggaagtgcagaagacttcaatgtacaatgttgagcggcatgaccacgagggtgtatttgtactagagcagttctttattagatgtatgatgatgaccttaggttttgccaagtagatcttttagaatgcagatgctgtaacttgtaaccacaaccgaaactgaggctggaccgagtgtagcgtttaacaatcgagttggtgctcatgcctcgttttgcaatcacaatcagcaggcacgtttgtcagatgtgctactcttttatcatcatttctgtgcgtctgtaatgaacactcgggccaaatatttggagtaaaaacatcaactcaccaggcggtagttgattgaacgatc

SEQ ID NO: 91494 - DNA, 1796 bp, Zea Mays
ggagcatgcagagcagcgccgtcaccggcgataaaggcccaattcgcggtgaccactagctcgccgctgccaaccacgcccacacatgttttatctctagccggcttcacatacagccaagaggccaagaccgtagaaaagccaaggccatcgatcgataatgccgcttctccctacgcagttccgtctcctcccgctgtccctccccgacgcccgccagcgccgcggtattctcccgccggcggcggcagcgtccttgttgccatcgtggtcttgttcgccgccattgtctcggcttcgatcacgggggcggcaggctaaaacgaggctgcgagtcgtctctcccgagacctccagcaccgctgccaccgacgctgcgacgacgaccgccggcgcgccgccagataacagcaagtgggcagagttcgcgacgcgagtgtccggcgagtgggacggcttcggcgcggacttcacggcgtccggcgaccccgtggagctgccggagaaggtggtcccggaggcgtaccgggagtggggcgtgcaggtggtggactggcagacgcagtgccccacgctggcggacccgggcgcgccgtgcgcgctgcactaccgcctggtccgcctgctccccacggtggggtgcgaggccgacgccgccaccgtgcacacctcccaccagcgccacgcctcctccgccgccgccttcgcgtacgccgccgcggggtcctacgtcgccgcgtggcccaggggccccgcgctcgtgctcgaggtggagcactgcgtcgtgcgccccgacgcgcccgccgaggaggccggcagggtccgggtggtgcagaccgtggcgctgggcagggaggcgcgtctccgcgggctcaaggtcttcgccgagcagtggtacggcccgttccgcgacggcgagcagctcggcggctgcgccgtcggggagaccccgttcgcggccggggagaagctcgacgtcgccgaggtgatcgggcagtgggagaccacggacgccgccgccgcgaggttctccggcgacctggaccccgagacgggaaagttcgcggagctgtcgccggaccagccgaggaagctggtgagggacgcggagggcgtcgtgacgctgccgaagcagctgtggagcgcgttcaaggagctcggcgacggcgagttcctgtgcgaggtcggctgggctctgggcggcggcggcgccgtcacgtcgcgctgcgttctgtccaaggacggagacgtcaaggagatcgctgccgcccacgagcgccgggtgtcggagaccacttgacttcggggccaattggccatacccgatccaacagagaacaaaacgcgctgctcgatgagccaactcaatttggtatcttcgaatcgaaggtcgtgtggagaaacgatgaacacgagaagagaacaaaatctgtacatggcgagcgcatcagtgacagtgtacttgaggtgcatctctcaaggttacattcagagtggtttccatttgttgccacccaagtccaactttgctgccttgcatcatggctacgaattcggcgtagtcaatctgaccgtcctgaaaagcagatgcaagcaaggaacatcagtgcatgcattagttaaacagcacaataaaactcggcataggcactgttactacctggtagtcccaacaactgtatcgtggttttcaccatatatttaactctgtaacgtactcctatttactttctcctaccctttatttatggttgctgaaatcgacagctgtgggttaggtgtgactatgtggttga

SEQ ID NO: 91495 - DNA, 1470 bp, Zea Mays
ggagcatgcagagcagcgccgtcaccggcgataaaggcccaattcgcggtgaccactagctcgccgctgccaaccacgcccacacatgttttatctctagccggcttcacatacagccaagaggccaagaccgtagaaaagccaaggccatcgatcgataatgccgcttctccctacgcagttccgtctcctcccgctgtccctccccgacgcccgccagcgccgcggtattctcccgccggcggcggcagcgtccttgttgccatcgtggtcttgttcgccgccattgtctcggcttcgatcacgggggcggcaggctaaaacgaggctgcgagtcgtctctcccgagacctccagcaccgctgccaccgacgctgcgacgacgaccgccggcgcgccgccagataacagcaagtgggcagagttcgcgacgcgagtgtccggcgagtgggacggcttcggcgcggacttcacggcgtccggcgaccccgtggagctgccggagaaggtggtcccggaggcgtaccgggagtggggcgtgcaggtggtggactggcagacgcagtgccccacgctggcggacccgggcgcgccgtgcgcgctgcactaccgcctggtccgcctgctccccacggtggggtgcgaggccgacgccgccaccgtgcacacctcccaccagcgccacgcctcctccgccgccgccttcgcgtacgccgccgcggggtcctacgtcgccgcgtggcccaggggccccgcgctcgtgctcgaggtggagcactgcgtcgtgcgccccgacgcgcccgccgaggaggccggcagggtccgggtggtgcagaccgtggcgctgggcagggaggcgcgtctccgcgggctcaaggtcttcgccgagcagtggtacggcccgttccgcgacggcgagcagctcggcggctgcgccgtcggggagaccccgttcgcggccggggagaagctcgacgtcgccgaggtgatcgggcagtgggagaccacggacgccgccgccgcgaggttctccggcgacctggaccccgagacgggaaagttcgcggagctgtcgccggaccagccgaggaagctggtgagggacgcggagggcgtcgtgacgctgccgaagcagctgtggagcgcgttcaaggagctcggcgacggcgagttcctgtgcgaggtcggctgggctctgggcggcggcggcgccgtcacgtcgcgctgcgttctgtccaaggacggagacgtcaaggagatcgctgccgcccacgagcgccgggtgtcggagaccacttgacttcggggccaattggccatacccgatccaacagagaacaaaacgcgctgctcgatgagccaactcaatttggtatcttcgaatcgaaggtacaacgactgcttggccgtctaacctcaacactcttcgccttaacaatcatcatttagacgattgcaacatttctgttc

SEQ ID NO: 91496 - DNA, 1024 bp, Zea Mays
ccaacgacaggccaagccagccggctgcatcccagaccagagccttctctcgtcctctcccatttaaccaccatcggcaccaccactgccactacgcgcgaggcacggcacggcacggcacgaccgagctccagtctgcccccgcccccatccgcaccgcacgtccgccttggcccggcaaatggcgtcgccggcgcggcggctcctgcagaccaactccgtgcagtacccgacgctccccgcggccgacccgccgagcccgctggccgtcgactccgacgtggtggtcatcctcgccgcgctcctatgcgcgctcatctgcgtcgtggggctggcctccgtggcccggtgcgcgcgctcccgcgccgcgcccgccgccgccaggagggggctcaggaagaaggcgctcagggcgctgccgagcctcgcgtacgaggacgccgtggcggcccgggccggggacggggcggcggaggtcctggcggagtgcgccatctgcctctcggagttcgcgccacgggaggaggtccgcgtgctgccgcagtgcggccacgccttccacgtcgcctgcatcgacacctggctcgccgcccactcctcctgtccctcgtgccgccgcgtcctcgtcgtcggcgacgccgccagtaagcgcccgccccagcctaagcgctgccgcaagtgcgaggcggccatggacgaaccctcctcgtcgtccggttccgccggcgacacggctaccggttcctgacccttctcacgagtgccacagccacgccgccgccagtttctagcaactgggccggcaagcttagctccactggaattccgtcatcatcaggtgccgccggtttctagcaactgggttggcaatctttagctccactccagttcattccaaggattcgaacgttgatgctgtaaattgcaggttggtcgattatgtacatatttattttcagattagaaacatgttaaagtatcgtgtgaatgtgaatctcagaaacagaatctttcttcgcaactc

SEQ ID NO: 91497 - DNA, 2211 bp, Zea Mays
ccttggcagaatcgcagcgcagcgcacacgcacggacggccccgagggtttagagcccaacttctctcttcacatcgccgcgaagccagctccccgatgcgatctggccgagggaagatggcgactccgccgccgccaatccgccccgccgccgcgctcctcctcctcgtcctcgctggcgtcctcgcctccgccgcgagcgccgatctcgtcatctccaaggcagatcggagggttgatctgacctcgcatatcgttcgcgtcctcgcttccctcaaggctgaaaatgttggaccagaccctgtctctcaagttttactgccttttcccaatattcaagccaagaacttggcagctattagagcattcggcagtgaagggaaagtgaagggtcaaagtactgttctgccaattgaagttgttcaaccttctggagctcccccggagctgacattcttttcagcattgttgcccaaacctttggaaaaaggaaagactctgtacttggatgttctgactgtgttcacacactctcttcaaccattcccagaagaaatcactcaagccgaagcacaacttgttgtctatcaggatagtgctcactatctgtcaccttaccctgttaaggctcagacacttgctatcagattgcctggtggaagggttgaatcatacacaaggcatccaaacgcaaaacttgtggattcagaactgaaatatggaccatttcatgaccttcccccgttctcctacttacctgtgattgtgcattttgagaacaacaatccttttgcagttgcaaaggaagttataagggagattgagatatctcactggggaaatgtacagattacggaacactacaacattgctcatggtggtgccagactcaagggtgaattttccaggattgattatcaatctagaccttacgtaaggggtgtttcatcttttagacatcttattgcaaaactgcctccaagggcacactctatttattaccgagatgagattggtaatatttccacatcacatttgtggagtgattctatgaagacccaactggaaatagaaccaaggtttccattgtttggtgggtggcaaacaaccttcactgttggttatggtttaccacttgaagactttgttttctattctgatggaaagagatttctcaatatcacatttggttctccattggaggaaattctcattgaaaagcttatcgtaaaggttgttctacctgaagggtcaaaggatatcgaagtttcagctccctttccaacacagcagcagcaagaggttaagtattcacaccttgacattgtcggaagaccagttgttgtcttggagaaacctgatgttattccagagcataatttgtatttccaggtttactacagattcaacaacatatccttgctcagagagccgttgatgctgattactggtttcttcctcctgtttgtggcctgtattgtttacatgcgtactgatatgtcaatatccaagagctctccttcctacttggccaagctgcaatgggatgaggtgcaagcaactgttcagaaaatccagggtatctttgagcaatgcttagcagttcatgataaactggaggcctcattgcgggatttgtctaggacaggagacattcagtcttgcaaggcagctcgtaaagctgctgacacgcagtttaaggagctatcgaaagatctgaagccactgttggcgactctacagtcatctccccagtcttatcagatattgccaaaggtagaggacttgatcgtaaaggagagagagatgcaggagaagctcatgacaaggcattccaccgttgtcgacagctttgagaagaagctgcgcgggcaagatgtagagaacaggattgctttgcagcagcagaaaattgctgccctgaggcaggaggttgaatctcttttagagtacattagtgagatttgagcaaatgagtgctgctgtggcgtgatacatctttagcgattagactgcctttgtttggtttagggtttaccccaatattgaaatctactactctgagattgtgtcggtaaccatctagtttcccagttgagagacctggaagttgcaatgaccttgtaacatgataatcagtgtaattctggagctgactaaatttttgcatttaatatcaatatcacaggaaccgtcatcttttggactgaa

SEQ ID NO: 91498 - DNA, 2210 bp, Zea Mays
ccgagagacgacactctacgtgtgtgcctgcgagagcgagagcgcaccagcagagcagacagcttcctctgcggcctgctggtcgcttcgcttcgctccagtccagggcaaaggacggcacatggcggggggcgggggcggccgggacctgccgtcgacgccgacgtgggcggtggccctggtgtgcgccgtcatcgtgctcgtctccgtcgccatggagcatggcctccacaagctcggccactggttccatacgcggcagaagaaggccatgcgggaggccctggagaagatcaaagcagagttgatgctgatgggcttcatctcgctgctcctcgccgtggggcagacgcccatctccaagatatgcatcccggccaaggctggcagcatcatgctgccgtgcaagccgccgaaaggcgccgccgccgccgccgacgacgacaagagcgacggccgccggagactcctctggtacccgccgtaccctggatacgatgagcccgggcaccaccgccgtttcctcgccggcgcggctccggacgacaactactgcagtgaccaaggcaaggtgtccctcatctcctcggccggcgtccaccagctgcacatcttcatcttcgtgctcgcggtgttccatatcgtctacagcgtcgccaccatggcgctggggcgtctcaaaatgaggaaatggaagaaatgggaatcggagaccaactccctggaataccagtacgcaaacgacccttcacggttccggttcacgcaccagacgtcgttcgtgaagcggcacctgggcctctcgagcacccctggagtgagatgggtcgtggcgttcttcaggcagttcttcgcgtccgtgaccaaggtggattacctgaccatgcggcaggggttcatcaactaccatctgtcgcccagcaccaagttcaacttccagcagtacatcaagcggtccttggaggacgacttcaaagtcgtcgttggcatcagtctcccgctgtggttcgtcgccatcttcactctcttgatcgatatcaagggattcggcacgcttgtctggatctcttttgtcccgctcgttatactcctgctagttggggccaagctggaggttgtcatcatggagatggccaaggagatacaggacaaggcgacggtcatcaagggggcgcctgtggtggagccaagtgacaggttcttctggtttaaccgccctggctgggtcctcttcctcatccacctcacgctcttccagaacgccttccagatggcgcatttcgtttggacactgctcaccccagacctgaagaaatgctaccacgagaggctgggcctgagcatcatgaaagttgcggtggggctggttctccaggtcctctgcagctacatcaccttcccgctctacgcgctcgtcacgcagatggggtcgcacatgaagaagaccatcttcgaggagcagacggccaaggcggtgatgaagtggcgcaagacggccaaggataaggtgcggcagcgggaggcggcaggcttcctcgacgtgctgacgagcgccgacaccacgccgagccacagccgcgcgacgtcgccgagccggggcaactcgccggtgcacctgctccacaagtacaggggcaggtcggaggaaccgcagagcgggccggcgtcgccggggcgggagctcggggacatgtacccggtggctgaccagcatcgcctgcacaggctggaccccgagaggatgaggcccgcctcgtccaccgccgtcaacattgacatcgctgatgccgatttttcttttagcatgcggtgacctgaccttgaacgaattctgtgtccttactcttgtatagggaagcaaaagcatagacggagaacataatgacacgttacgttagggaaagtttcgtttattcatcataaaatagaatacgtaataaactagtatctccctcttctctgtggaaaaaaaactgaactgagacccttacaatgtacagctgcaaaaaaaaatattaaaaaagaatagagcaatcgaaccaggatgaagctatacattggaaacaaccagtactcacactaacaagataggttatcagcaaatacattgttcttgtgaacagctattaggacagctgcactcatcatccacaggaccacaggctagtcagcttttgcacgaacccttctattgtgaacagctactagga

SEQ ID NO: 91499 - DNA, 978 bp, Zea Mays
gttccgctcgctcgcccgccaccgagagacgacactctacgtgtgtgcctgcgagagcgagagcgcaccagcagagcagacagcttcctctgcggcctgctggtcgcttcgcttcgctccagtccagggcaaaggacggcacatggcggggggcgggggcggccgggacctgccgtcgacgccgacgtgggcggtggccctggtgtgcgccgtcatcgtgctcgtctccgtcgccatggagcatggcctccacaagctcggccactggttccatacgcggcagaagaaggccatgcgggaggccctggagaagatcaaagcagagttgatgctgatgggcttcatctcgctgctcctcgccgtggggcagacgcccatctccaagatatgcatcccggccaaggctggcagcatcatgctgccgtgcaagccgccgaaaggcgccgccgccgccgccgacgacgacaagagcgacggccgccggagactcctctggtacccgccgtaccctggatacgatgagcccgggcaccaccgccgtttcctcgccggcgcggctccggacgacaactactgcagtgaccaaggcaaggtgtccctcatctcctcggccggcgtccaccagctgcacatcttcatcttcgtgctcgcggtgttccatatcgtctacagcgtcgccaccatggcgctggggcgtctcaaaatgaggaaatggaagaaatgggaatcggagaccaactccctggaataccagtacgcaaacgacccttcacggttccggttcacgcaccagacgtcgttcgtgaagcggcacctgggcctctcgagcacccctggagtgagatgggtcgtgagtactccgacggatcgccagctctttgcagcctgttcctatcgttaagtttctccgcctcgttttatagcctaggctctctgaacactccccctcccccggcccgctgcaggtggcgttcttca

SEQ ID NO: 91500 - DNA, 3222 bp, Zea Mays
tcgccgccggctgctacacacacttctccgcgttcctcgccgccgccggagcaatcccgcggcgcactgtctaactcaccaccatgctgcagagcaagtcattcgtgaagaagacgaagcaaggccgcatccaaaaggtcgtcagggagcactacctccgcgacgacatctactgcggcttcgtcccctgcaccgcctgcgccgcagccgcggagcgaaagcttggcgccgctgccgccgccatcctcgtcgtcgacaccaacgtcgtgctccaccagatcgatttgctggagaacccggcgattgaggatgtcgtcctgctgtcagtggtgctggacgaggtgaagaataagaacctttcagttttcaacaggatcaaggcactgtgtatcaacaaagcacgtagattctatgttttcgccaacgagcagcatagggatacttacgtcaaagacatggttggggagagctctaatgatcgtaatgacagagcaattcgtgttgctgcacgttggtaccaaagtcatcttggtgagagcgtgaaggttctactgatcacaaatgacagagataacaaaaggaaagcgattgaagaaggccttaacgctgagacagttgagtcatatgtaagatcgcttgcacagcctggtttgcttgatttggttgttgttccaactagcggagatgtttctatggaagatgtagacgatcatagaccatcaaagaagaaagtaatctacaatgagcacaaacctatgtcagaaattacatctggtttgcggtgtggaatctaccatcaagggaagcttcgagttaatcgttacaatccgtttgaagcttatgttggaagcgagagcattggtgatgagattgttatccgtggccgctcaaatatgaacagggcctttgatggtgatatagttgctgttgagctcttgccacaagatcaatggcacgagtcaaagtcttttatagcagatgatgatgaagaagaagaagatgttcatttagtccctaatagtgctgatgatgctcctcggaacactaattccacacaatcaacagttggatcatcagctccttccatttctagtcgtccagttgggcgtgttatgggtataatcaagcgaaattggaattcgtactgtggatccttgcagccgatgcccatgcctgctggtagtgggggtgtcgctcatgctttatttgtttcaaaagatcgaagagttcctaagattcgaattcaaaccaggcagcttgagaatcttgtgaacaaaagaattgttgtcgcggttgattcatgggatgttttgtctcgatatccatcaggacactatgtacgaaccattggagatattggtgacaaagaaactgaaacagaggttgtcttaatagagaatgatatcaacaccaggcctttctctacacaagtccttgcttgtttgccacctttaccttggacattatcaccagaagatctggctaatcctaatagacaagacttacgccaagtgagagtctttagtgtggatccaccaggttgtcgagacattgatgatgcactacattgcacactacttccaaatgggaactttgaagttggagttcatatcgctgatgtcactaattttgttcaccctggtacccctcttgatgaggaagctgcgcaaaggggcacttctgtttatcttgttgggcagcggattgatatgcttccaaagcccctgactgaagatgtttgttcacttcgtgctgatgttgaacggttggcattctctgtcatttgggaaatgactccggatgctgatgttatatcaacgagatatacaaagagtgttatcaaatcttgtgctgcaatgtcttatgttgaagcccaggcaagaatggatgacagccgcttagttgatccactaactgtagacttgcggaacttaaattcattggcaaagatcatgcgacaacgccgttgtgaaagaggggctttgactcttgcttctgcagaagtaaaatttgagattgatagtgaaactcatgatcctcttgacataggaatttatcaaatccgtgaggcaaatcaaatgattgaagaatttatgttggctgcaaatgtttctgttgctgagaagattttgaagcatttccccttatgttcattgctaaggcgccatcctagcccaacaaaagagatgcttgagccattactccgtactgcctcttcgattggcctaaatctggacgtgtcatcctcaaaggcattagctgaatcacttgacaacgcaaagagcaatgacccatacttcaacaagcttattagaattttggcgactagatgcatgacacaggctgtttatttctgcagtggagatttgaccttttctgaatattaccattatgggcttgctgcttctctttacactcatttcacttctcccattcgcagatatgcagatgttgttgttcatagattgctagctgcagctctgaatattgcaaagctcccaccaatctttcaggatggtccacaacttacaggcattgctgacaacctgaattacaggcacagaaatgcccagatggcaagcagagcatcagttgaactccacacccacatatatttcaagacaaggccaactgacactgaagctaggatagtaaagatcaaggcaaatggtttcatagtatttgtcccaaagtttggcatagaagggcccatctaccttactccgaagggcgacaaaggcggtgattgggttgttgacgaggtgcaccagagagtaaccaagcccggaacaaacatcagctatgctatcctccagactgtcaggattcatatggaggttgttgaacctcagcctcatcgcccaaagctgcaactcaccctgatatgaaaaatgtacagctgaattgtagcaacattgtagtgttttcccgggcctctcacacctccagctcactctttagttcaacattggtgtgattttcgatttgtaaaactaatcagtaatcaccacatggtcaagattttgtagtatcagatagttttttctcaatacatggggctctatgcatggaagcttagtttctgaatggtactcacaatagagaaaatatacgacattgtattctgtttatgtgaaagagatgtatgttaatgtgacaagggtggttattgtgcgcacgcaccattcatttatatgggaagcgaacattatttttgcatgg

SEQ ID NO: 91501 - DNA, 3239 bp, Zea Mays
cccagaccaggcaggcaggcagccagccactcacctcgaaccaaattattagccccgttgtcgccgccggctgctacacacacttctccgcgttcctcgccgccgccggagcaatcccgcggcgcactgtctaactcaccaccatgctgcagagcaagtcattcgtgaagaagacgaagcaaggccgcatccaaaaggtcgtcagggagcactacctccgcgacgacatctactgcggcttcgtcccctgcaccgcctgcgccgcagccgcggagcgaaagcttggcgccgctgccgccgccatcctcgtcgtcgacaccaacgtcgtgctccaccagatcgatttgctggagaacccggcgattgaggatgtcgtcctgctgtcagtggtgctggacgaggtgaagaataagaacctttcagttttcaacaggatcaaggcactgtgtatcaacaaagcacgtagattctatgttttcgccaacgagcagcatagggatacttacgtcaaagacatggttggggagagctctaatgatcgtaatgacagagcaattcgtgttgctgcacgttggtaccaaagtcatcttggtgagagcgtgaaggttctactgatcacaaatgacagagataacaaaaggaaagcgattgaagaaggccttaacgctgagacagttgagtcatatgtaagatcgcttgcacagcctggtttgcttgatttggttgttgttccaactagcggagatgtttctatggaagatgtagacgatcatagaccatcaaagaagaaagtaatctacaatgagcacaaacctatgtcagaaattacatctggtttgcggtgtggaatctaccatcaagggaagcttcgagttaatcgttacaatccgtttgaagcttatgttggaagcgagagcattggtgatgagattgttatccgtggccgctcaaatatgaacagggcctttgatggtgatatagttgctgttgagctcttgccacaagatcaatggcacgagtcaaagtcttttatagcagatgatgatgaagaagaagaagaagatgttcatttagtccctaatagtgctgatgatgctcctcggaacactaattccacacaatcaacagttggatcatcagctccttccatttctagtcgtccagttgggcgtgttatgggtataatcaagcgaaattggaattcgtactgtggatccttgcagccgatgcccatgcctgctggtagtgggggtgtcgctcatgctttatttgtttcaaaagatcgaagagttcctaagattcgaattcaaaccaggcagcttgagaatcttgtgaacaaaagaattgttgtcgcggttgattcatgggatgttttgtctcgatatccatcaggacactatgtacgaaccattggagatattggtgacaaagaaactgaaacagaggttgtcttaatagagaatgatatcaacaccaggcctttctctacacaagtccttgcttgtttgccacctttaccttggacattatcaccagaagatctggctaatcctaatagacaagacttacgccaagtgagagtctttagtgtggatccaccaggttgtcgagacattgatgatgcactacattgcacactacttccaaatgggaactttgaagttggagttcatatcgctgatgtcactaattttgttcaccctggtacccctcttgatgaggaagctgcgcaaaggggcacttctgtttatcttgttgggcagcggattgatatgcttccaaagcccctgactgaagatgtttgttcacttcgtgctgatgttgaacggttggcattctctgtcatttgggaaatgactccggatgctgatgttatatcaacgagatatacaaagagtgttatcaaatcttgtgctgcaatgtcttatgttgaagcccaggcaagaatggatgacagccgcttagttgatccactaactgtagacttgcggaacttaaattcattggcaaagatcatgcgacaacgccgttgtgaaagaggggctttgactcttgcttctgcagaagtaaaatttgagattgatagtgaaactcatgatcctcttgacataggaatttatcaaatccgtgaggcaaatcaaatgattgaagaatttatgttggctgcaaatgtttctgttgctgagaagattttgaagcatttccccttatgttcattgctaaggcgccatcctagcccaacaaaagagatgcttgagccattactccgtactgcctcttcgattggcctaaatctggacgtgtcatcctcaaaggcattagctgaatcacttgacaacgcaaagagcaatgacccatacttcaacaagcttattagaattttggcgactagatgcatgacacaggctgtttatttctgcagtggagatttgaccttttctgaatattaccattatgggcttgctgcttctctttacactcatttcacttctcccattcgcagatatgcagatgttgttgttcatagattgctagctgcagctctgaatattgcaaagctcccaccaatctttcaggatggtccacaacttacaggcattgctgacaacctgaattacaggcacagaaatgcccagatggcaagcagagcatcagttgaactccacacccacatatatttcaagacaaggccaactgacactgaagctaggatagtaaagatcaaggcaaatggtttcatagtatttgtcccaaagtttggcatagaagggcccatctaccttactccgaagggcgacaaaggcggtgattgggttgttgacgaggtgcaccagagagtaaccaagcccggaacaaacatcagctatgctatcctccagactgtcaggattcatatggaggttgttgaacctcagcctcatcgcccaaagctgcaactcaccctgatatgaaaaatgtacagctgaattgtagcaacattgtagtgttttcccgggcctctcacacctccagctcactctttagttcaacattggtgtgattttcgatttgtaaaactaatcagtaatcaccacatggtcaagattttgtagtatcagatagttttttctcaatacatggggctctatgcatggaagcttagtttctgaatggtactcacaatagagaaaatatacgacattgtattctgtttatgtgaaagagatgtatgttaatgtgacaagggtggttattgtgcg

SEQ ID NO: 91502 - DNA, 2665 bp, Zea Mays
atgggaagaattaatagctttggtagatgcccatgttctgagaaggctacagcttcctaatgcaaaattgttaatgtgtgtatcattacttgcaagcttacactcttcttgacattgcatctttcaaagggatatagaaatggattagctgcatgaaaaaaggcaatagaactcctaattctacagaactaggtcaatcgcagcaatctatgttggcctgcaaaaatattctctgccgtctagaatgcaagtgcctatgaatgggaaattttgaaatctaattgcttcagcttctagttgtgtagtcctgtaaatcgtgtaagctttttatatcaatacttgtgtcttgatggcagccttctctttcatttgccattatatgttcaccttttactcaaaaaacagggatacttacgtcaaagacatggttggggagagctctaatgatcgtaatgacagagcaattcgtgttgctgcacgttggtaccaaagtcatcttggtgagagcgtgaaggttctactgatcacaaatgacagagataacaaaaggaaagcgattgaagaaggccttaacgctgagacagttgagtcatatgtaagatcgcttgcacagcctggtttgcttgatttggttgttgttccaactagcggagatgtttctatggaagatgtagacgatcatagaccatcaaagaagaaagtaatctacaatgagcacaaacctatgtcagaaattacatctggtttgcggtgtggaatctaccatcaagggaagcttcgagttaatcgttacaatccgtttgaagcttatgttggaagcgagagcattggtgatgagattgttatccgtggccgctcaaatatgaacagggcctttgatggtgatatagttgctgttgagctcttgccacaagatcaatggcacgagtcaaagtcttttatagcagatgatgatgaagaagaagaagaagatgttcatttagtccctaatagtgctgatgatgctcctcggaacactaattccacacaatcaacagttggatcatcagctccttccatttctagtcgtccagttgggcgtgttatgggtataatcaagcgaaattggaattcgtactgtggatccttgcagccgatgcccatgcctgctggtagtgggggtgtcgctcatgctttatttgtttcaaaagatcgaagagttcctaagattcgaattcaaaccaggcagcttgagaatcttgtgaacaaaagaattgttgtcgcggttgattcatgggatgttttgtctcgatatccatcaggacactatgtacgaaccattggagatattggtgacaaagaaactgaaacagaggttgtcttaatagagaatgatatcaacaccaggcctttctctacacaagtccttgcttgtttgccacctttaccttggacattatcaccagaagatctggctaatcctaatagacaagacttacgccaagtgagagtctttagtgtggatccaccagatgtttgttcacttcgtgctgatgttgaacggttggcattctctgtcatttgggaaatgactccggatgctgatgttatatcaacgagatatacaaagagtgttatcaaatcttgtgctgcaatgtcttatgttgaagcccaggcaagaatggatgacagccgcttagttgatccactaactgtagacttgcggaacttaaattcattggcaaagatcatgcgacaacgccgttgtgaaagaggggctttgactcttgcttctgcagaagtaaaatttgagattgatagtgaaactcatgatcctcttgacataggaatttatcaaatccgtgaggcaaatcaaatgattgaagaatttatgttggctgcaaatgtttctgttgctgagaagattttgaagcatttccccttatgttcattgctaaggcgccatcctagcccaacaaaagagatgcttgagccattactccgtactgcctcttcgattggcctaaatctggacgtgtcatcctcaaaggcattagctgaatcacttgacaacgcaaagagcaatgacccatacttcaacaagcttattagaattttggcgactagatgcatgacacaggctgtttatttctgcagtggagatttgaccttttctgaatattaccattatgggcttgctgcttctctttacactcatttcacttctcccattcgcagatatgcagatgttgttgttcatagattgctagctgcagctctgaatattgcaaagctcccaccaatctttcaggatggtccacaacttacaggcattgctgacaacctgaattacaggcacagaaatgcccagatggcaagcagagcatcagttgaactccacacccacatatatttcaagacaaggccaactgacactgaagctaggatagtaaagatcaaggcaaatggtttcatagtatttgtcccaaagtttggcatagaagggcccatctaccttactccgaagggcgacaaaggcggtgattgggttgttgacgaggtgcaccagagagtaaccaagcccggaacaaacatcagctatgctatcctccagactgtcaggattcatatggaggttgttgaacctcagcctcatcgcccaaagctgcaactcaccctgatatga

SEQ ID NO: 91503 - DNA, 657 bp, Zea Mays
gtcgccgccggctgctacacacacttctccgcgttcctcgccgccgccggagcaatcccgcggcgcactgtctaactcaccaccatgctgcagagcaagtcattcgtgaagaagacgaagcaaggccgcatccaaaaggtcgtcagggagcactacctccgcgacgacatctactgcggcttcgtcccctgcaccgcctgcgccgcagccgcggagcgaaagcttggcgccgctgccgccgccatcctcgtcgtcgacaccaacgtcgtgctccaccagatcgatttgctggagaacccggcgattgaggatgtcgtcctgctgtcagtggtgctggacgaggtgaagaataagaacctttcagttttcaacaggatcaaggcactgtgtatcaacaaagcacgtagattctatgttttcgccaacgagcagcatagtttcagcatgattgtatttctttttgaggaaaggggagtgcaaccgagtacggggaaacttacaaagaccagaatcggtgtcttaggcagaatgtgcctagcaactgaaacagctatcctattcagaacgcggatctctgaacaagaatgagtttcagcatgattgtattgatgaaatgtctttatccaatcaccatgaccgcacaattacttatcaaat

SEQ ID NO: 91504 - DNA, 833 bp, Zea Mays
cggcgttctccccggtggcctgtcacaggggtcaccagcaagcagggaattaagcatgcatactattcgagcttaactgcataacaactgcagtgtgaaaaatatacgagtacgcatttgttgtcgtccaactgttgtttcgttgttttaacactagcaactggttaattgaagaacagttagtatgtctatagtctttgaaggctatcatatccacggtgattcatgaatctagcaccagtacttaactttcccttgccatctggtgtattttgttgagtgccaattaacgtcttttgccgtgagcagacgatactgctatatattattccttaagctgcagcagcaacgcacgcgtgcatgaaacgcatacgtaccttggcgacgagctgcgcgccaaggacgtcggagaaggacgcctcccgcgcggcagcgctcacggagcacgaccccggcctgagcccggagaagtcggcgaagtccagcctctgcacgccgtgcctggacgacgccggcgccctgctgtgcagccgggcgccggcggggatgcgggaggcggcgagagctgcgtgggtggccattgcgcagcgccgctgccgggtgggatcggatgggtggccagacgggaaccgagccgggcggcggtgctgcgtatttatgcgctgtagtacctgccgggagaagacgacgacgggggcgtggccgcgcgagcgaggaggcgccgtgttcactgcttgcgcttgtggccgcggggcggcgggccggggggataaggcgattgcatgcgccgcagccacccgttcgggcgggcgatatccgatgtgtggcggctt

SEQ ID NO: 91505 - DNA, 1481 bp, Zea Mays
cgcgtccatgtgcagcatccagatctcctcgcacgcaagcctcgtactgcctccgtataacctcgcggcggcggcggcggcggcggcgactggtgagcgctcgtgtcatcggaagcatcatcaacctcccgatcaacccgcgcgttcgccagcgctcggatcctagccgggctgacttcctcgcgcgcccgcgcacgcgcgcacatggccgcgctgccgctgcccgtgacgcgcgccgccgccagtgaccagcagcagcagcagggtcacggcggtgcgggcgcggaggtgtggaggagggcggccaaggcgctgctgttcctggcggccgtcgcgctcccgtgcctcgtgctgtaccaccgcgccgtcgtggcgcccggggacctgttcggcgccgccgccattccgtggcggcgcgccgccgccgacctggacagcgaggacgggagtctggagcgagtcctgacggcggcggcgatgcggcggcccagcgacacggtgatcctgacgacgctgaactcggcgtggtcggagccggggtccgtgctggacgtgttcctggagagcttccggtccggcgagagcacgagggagctcctgcagcacctggtgatcgtgtcgctggacacggcggcgcacgcgcgctgcgggcaggtgcaccgccactgcttcgcgctcgtcacggacggcgtggacttctcgggccagaagaacttcatgaccgacggctacctcaggatgatgtggaggagggtcgatttcctcagggaagttctcgagaaaggcttcagcttcgtgttcacggacacggacatcgtgtggttcaggaacccgctgccgcacttctacccggacggggacttccagatcgcgtgcgaccacttcacgggcgacccgagcgacctgaacaacgcgcccaacggcgggttcgcgtacgtgcggtccagcgcggagacggccgagttctacaggttctggtacgcggcgcgggagcgccacccggggctgcacgaccaggacgtgctcaacgccatcaagcgcgatccctacgtgggcgagctcggcgtccggatcaggttcctcagcaccgagctcttcggcggcctctgcgagcccagccggaacctgagcagggtctgcaccatgcacgccaactgctgcgtcggcctgcgccgcaagatcggcgacctcaacgccatgctccaggactggaggcggtacagggcgctgccgcgcgaggagaagcgcgaggtgtcctggaccgtgccgcgcaactgcagtctttttcacacacaggaggagcgtggttgatgaggaagctgttttttatttaaattttttgcaagacttgtcagaacatggatgtgtgatgtgatgtaatgtaaacaaaacatgtatgggaagttcatatgtgttgtttctgtgacttatgcaagttttgcagggtttggaaatagacctagacaaaatgtttgtggttc

SEQ ID NO: 91506 - DNA, 668 bp, Zea Mays
tgattacatttcatacaagtactaaactactaataacttactgccctcttttaaaaaagcagctaacttatccaattaacgctagctaacgaagttgaaggtttgcaagcagatggtcggcacggctctcatcgctcatggcgcctctgccgaagcgcgctgcggcctggagacgccgccgaggctgcccgcagtggccgaacaagcaggcggcgatccctgctggacgtcgtcggcgggttcagaagacgaccacgacgaggaggaggacggctgctcgctctcgctgtccctagctacgagaagcagccgcagcagcggcgacgagggcggccggctctcgcctacggcggccacgtcgtgggggagccagatcagcctcgacctgtccttgtccacgctatagaatagacccgtcatgttggtatgatgcgagtttgtgaatgggatagcttcttgggccttgcggcggccgggctgccttcctggtgtagcgtttcctacaattttcgcttgctcttgttgttgttgaagctcttggctcgttaggttagtcccacgtagtaatatcagttataatttcattgttgggaggagctagatggtcttgatctttaccattccgattcgggccaatttggcaaggctcggtctagataaggtaaaca

SEQ ID NO: 91507 - DNA, 1830 bp, Zea Mays
ttcgttctctctctacgctgtcccctcctctctctctctctctctctccagcggcaaaagtgttgcactgcagcactgctagctaggagtatactatgagcttgctagctagcctggctgatggatggtcactactcatgtgcataaacgtgcatgtgaagtggctgggcatccaaccaaatatataagctactggcaaccggctgccggctgctggcaggtcgttcttcgtgttgtatgtagcttgaggctgaggccgggagatgaccatggtgagaacgacgatggtcggcgccagggagaggagcgggggagtgaggcagtacaacaggtccaaggtgcctcgcctgcggtggacgcccgatctgcaccactgcttcgtccacgccatccacaagctcggaggccaggacaaggctacgccgaagcgagtcctgcagctgatgggtgtgggaggactcaccatatctcatgtcaaaagccatctgcagatgtacaggaacatgagaaatgatcttggaatgcaagggacgacgatgcagctggtgcaccgggcggaggagcacgtatacggcctaggcggcatgcatatggaactctgcgccgatacacagcgacgacagccgcagtgcggtcatgatgagtgcgatggcccggcctgctgctgcatcgtcgtctgccgctcgccaccaccaccaaagcctggaaaggaggcgacgacgctgttccaacgccaactgaaaagtgtgtttgcaatggaggagccaaacaacagtggtgcggggaggaggcgtgagcgggaggagatggatgggagcgcgagccccaagagggtgctgctgcgaggaggcccaggcccaggaacatgtgagggcgacgggtcaccatcaccacccagcgccagcggcggcctgtgctgggcgctcgcaacagcagcagcaggtggctacaacagctacatgcgcatgatgcaagcggccatggggatggctgccggcgctcgtgctccgcctccgcgcacgcttcgtcatccacctcgtcacgcggagacgacggtggagcccagccgggggccgggaataaagcggcaggcgcagatgcagtcggcgtcggcgcggcccggcgcacaaggcggcgaacacgccgcgccagctcttcgtcctcgcagcaccagcagcagcgagcagctcatcacattctcgggcttcgtggtggcgcagaagcagccgcctcctcctcctcctccctgctgcagccgtgaccaccctttcgagatggtcggcacggctctcatcgctcatggcgcctctgccgaagcgcgctgcggcctggagacgccgccgaggctgcccgcagtggccgaacaagcaggcggcgatccctgctggacgtcgtcggcgggttcagaagacgaccacgacgaggaggaggacggctgctcgctctcgctgtccctagctacgagaagcagccgcagcagcggcgacgagggcggccggctctcgcctacggcggccacgtcgtgggggagccagatcagcctcgacctgtccttgtccacgctatagaatagacccgtcatgttggtatgatgcgagtttgtgaatgggatagcttcttgggccttgcggcggccgggctgccttcctggtgtagcgtttcctacaattttcgcttgctcttgttgttgttgaagctcttggctcgttaggttagtcccacgtagtaatatcagttataatttcattgttgggaggagctagatggtcttgatctttaccattccgattcgggccaatttggcaaggctcggtctagataaggtaaaca

SEQ ID NO: 91508 - DNA, 939 bp, Zea Mays
ttttttttttcgatcctaaggtccccggcggcccggccggaacaaaacccgttcgatgcgtctccgccgtttcaggacacaatcaagggctagaagccactacaggcccaaattcagcccatacccactctcccatccacgagaccacaagccacaccaaacccgcgttcatcgacggacgagctcgccggcgagagagcgactgagatggaggcggcggcagcggcggccggcgtggagctgggctcctcgaagccccagatcgcgacgcaggcggagatggcggaggcccgggtgccgctcgcctaccgcgatcagtgcgcgcacctcctcatcccgctcaacaagtgccgcgtcgccgagttctacctcccctggaagtgcgagcccgagcgccacgcctacgagaagtgccagtacgagctcgtcatggagcggatgctccagatgcagaagatccgcgaggcgcaggagaccaaggtcaagggcggcgcctccattggcctcatcccggccaccgccaagctcgcctgatacgggtcccagaccgatccgcttgatttaggtctgcctgttggctatagcagcgtccagaggcgttgcgccgtgcaaggatcctcaatgtttgttgtgtgaacagagatacgcgtttgaatttggcataaagttaactgttgtcttctttttcccttcccctctctctctatctccctgcctgatggctatcttcaggtttcaatttgatgatggaataaggaaaggtacttgtcctattaccgatgactggatgacttttttgaagttttgaaaacttgttcaccttgtggcttgtgttgctgcctcaagccaactactgcggcaggcatggcaattgcagcgattaattcgtgcatgtttacattgcgatatattaatgttgttgtgccccttggtctgaca

SEQ ID NO: 91509 - DNA, 231 bp, Zea Mays
atggggactgatggtggtagtctactcacctatgtctcttccatggaggacaccactggagcctccaacgccgtgcagatttggcgacacagggtgtggaggcacactgtgactcaccatgccatgccgaggacgaagacgccgatggagacggcgatgcccaaggcagagaagatgaagggcgatatctgcaccacgggtgtctgcctgctgtgcaacgacatccgctga

SEQ ID NO: 91510 - DNA, 1598 bp, Zea Mays
ggcctccttcagctccccttgccacccagagatggggctggatttccgattatacaatatgccgatgatacaattattgtcatgaaagcctcacaaagggagcttttctgcttaaaagctttgctcgagagttatgccctatcaagagggttaagaatcaactacgcaaaatgctttttagttcctatcaacactgatagtaaaaaaattgaacttcttgctggtctctttggttgcaagattgaatctcttccctttacatatttggggctaccgatggggacaacaaagccaagggttgaacactatggacccattatgagcaagattgaaaggaagttgacctccatctcttctatgttgtcacatgcaaggagacttcaacttgtcaactctgtcctctcgtctctgccaacatacgccatgtgcaccttacaagttccaacagcggtcttggaatacattgacacaaccagacgccactgtttgtggcgtaattccgatagcaatgcaaaatctaagcctctagtggcttggaataaatgcacacgactgaagaaaaaaggtggtcttgggggtcatcaacctaagaagccacaactcgtatctccgaatgaaaattcttgacaagctctacaacaggaaacaaatcccttggattaacctggtttggaatacctactactttgacgacaagacccctcatgcattcaagttcatgggctcgttttggtggagagacgtccttaaactttgtgatctcttcagaggaatctccaactgtaaggttggagatggtaaaaatgttctattttggcatgatttatggaatgacaacatccgcagaaacaagtatccaaggcttttcaccttcgcaaaaaatcaaagcatttcggttgcttcctttttgactcaggaaaacttgacagacattttccacttaccccttactgagcaagcaaacaccgagctgcaatagctcctagatgaagtgcagcaaatttgagaatcagtgattgaaccagaagagaaagactattggagttatatttgggggaataacacctactcgtcaactaaactttaccactacactttcaaaaatgtgaatcctccaaaaccatttctcaggatctgggagtccagatgttcaaacaagcttaaagtcttcacttggctgttgttgatggacatgctgaacactagaaacatcctaaagagaaagaactttaaggttcaaggcgacaactacagttgagctctttgtcaacttcaaagagaagaaattgccttccatttgttcttcaatcgctcttttagccaagactgttggagacatctgaatattcagtggaaccaccagattgacttctttgcaacctttcaacaagccagggacttgcacggttcaccattctttatggaggtctttatcatagcagcttggcaaatctggaagcaaagaaacaattttatctttgacagggggcgaccatctttcattggatggaaaaaaagaattccgtgtcgaagctcttctgcaagctaaccgcttttctgaaaagaattcaactcttttctcctcgcttgtaaattcc

SEQ ID NO: 91511 - DNA, 726 bp, Zea Mays
gcgggagcggggagagctagcgtcggaggagaaggacgatcaacggcgtcgtcggcgatgaacgacgcgcatgagtccggggtcccgtccggcatcgtccccatcctccagaacattgtatcaacagtcaacttggagtgcaaggtcgatctgcaacatgtcgccaacagtgctcgtaacgcagagtacaacccaagggtatgtatcatcatcagtgccgctgctgctttgtttttttttttttttgcatggaactatatacgttttgctgcggctatcatgaggataagggagcccaagacaacgacactgatatttgcttcagggaagatggtctgcaccggagcaaagagcgaagccgattcaaggctcgctgcgcgtaagtttgcgcgtatcgtccagaagctcggttccccagctcggttcaaagatttcaaggtccaaaatatagttgggtcatgtgacctcaagtttcctattcgtctggagggcctcgctttggccagtggtttgtctgccacttatgaaccagagatcttccctgggctggtctaccgtatggtggaccctaaggtcgtgatcctcgtcttcgtctccgggaagattgtcctcacaggagcaaaggtgcgggaagagatatgcgcggccttcgagaagatacacccgatgcttgtgcagttcaggaaacggtcgtagccagggacggttagcggtggggcgagtccc

SEQ ID NO: 91512 - DNA, 3729 bp, Zea Mays
ggaactgataactcgaaggggacgattgagaaatttgtccgctcaccatctcggtcggcgacagcgggaaaccactgggcctcctgcacctgcagccagcagccccgccgcgacacgctcccccgagatctccagcgcccgacttggcagatccagcaagctgcacccaccgcaggcgtgatctcctctcttggatcccgaagatggcggcgggaacggaggcctttgaggcatacttccgccgcgcggatttggaccaggacggccgcatcagcggccaggaagctgtcgccttcttccagggcgccaacctgccgcagccagtcctcgcccaggtatggatgcacgccgatcagaacaagactggtttcctcggccgcccggaattcttcaacgcgctgcgcctggtcaccgtagcgcagagcgggcgtcagctcacgcccgacatagtgcagtcggcactgtatggtcccgccgcggctcgaattccagctcccaagatagccgcgggggcggctcgttcacagatgggtgctgcgggggcgcctaggcctcaggggagcgctgcgatgacgcccgggcaggttggagcagctcagatgaatccggctggcacaccaaggccccagggaagcggtatgatgccgacatctacccaagttagtatgctgcaggtgaaccctggtgctgctccaaggccccaagggatcagttctatgatgccagctgcgagtcagggtggtgctctacaagcaactcaatttgctgcaccaagggcaatgcagccacagcctcctaacctgggaattactcaacagcaaccttctagtaccggtttcatgcggccaccacaggttggaactccagcagcttcatttcaagctcaagcgcctggaatcaatcaaggtttggtccatggaggcagcatggaaggatctatcagttggcaaggcggtaatgctgcctcagttggaggcatcccacgagctataccaggagctgctccttctcagacaacacgtggatttggtccaggtttacctagcacaatgggcatggtgcctggacaacaggtacaagcaatgtcttcatcgccattgcctccacagagcaacagtgctgttttgcctcagaattcaaaagctttggtactgtctggaaatggccctgccagcagctctggatcaagcacagacatcttctctgcacttacacagccaaagccaagcttatctgcacctcagacaagctcgattccgagttcatccagttttatggccacgcctactggctcccagaacctgactaatctcactcagtttggttctttgcaaggtagcagccaacctcaacagactcagcctatcgtaaagtccattcctgctccagctacacctgttgtctctgctgggatttctaattcagcttctcaatggcccaaaattactcaaccggacatccagaagtacatgaaagtctttggggatgttgatagggacagagatggcaaaataactggtgcagaagctcgcactctgttcctcagttggaggcttccaagggaggtcctgaagcaagtgtgggatttgtctgaccaagacaatgatggcatgctttctttgagagagttttgcatcgctctttatttaatggagaggcaccgagctggaattcctcttcccccagcccttcctgactctcttaggcatgatgagacactgttacgagctacaggcttgccttcaacagcatacaatagtccatcatggcaacacaatcaaggaggataccacaaagaggccctggagcacctggggtgcctgctggtggtgtgcggccacccttgccatcacatttgcattcacaaactgatggagctagcagacaagggcaaccaagatctcacatgcctgggatggataatcatgtggtaattcaaggaaacaaagatgacaaaagtgcgctgaaccaggctgcacaggaggtggtggatgctcctaagaaggttgaggtggagaagcaggtcctggattccagagagaaattggagtattaccgcacaaagatgcaagatcttgtcctgtataaaagtcggtgcgagaataggctgaatgagattacagaaagggcgtcctctgataaacgcgaggtggaatcattggctaagaaatatgaagagaagtacaagcaagtagctgagttagcttccaaactagcagttgaagaagctgcatatcgtgatgttcaggagagaaaagttgagctgcatgatgcactgattaaaatggtacaaggtggaagtgttgatggtttacttcaggttcgagctgatcgaatccaatatcaattagaagagatggaaaaagctcttagtgaacggtgcaaacactttgaacttaaattcaaaccatctgcatcagttgagcttccttccggttgggaacctgggccacaagagggactcattgagtgggatgaagactgggataaatttgaagatgaagggtttagtattgttaaggataatggtacaatacaggaaaacccagtttctgctgaaaatggaaaagtgccatctctttgggatgatggtgatatgtctcctgttgcatcctctaatggtcatatcaaggaagaaaggcgttacagtggaggtgatcaagtggctgagagtgaaatagcatatgattttggtgatgaatctgtgaggagtcctggcagtgctggaagaagtgcctcagggagtccatttaaatcttccggctttggcatgcatgactcatctcccagcaaaagagaaagttacagtgaccatggtggttctgaatccgtttttggtgacaagtttgctgatgaaacttcctggaactttgatgatcaagatactgactctgtttggggttctactgtactgaacactgaggccgaccaacgcggtggcacgcataactctttctttgggtcggaggcaggctcaccaagtggcgctagtgtatttggaaagaagaggaattcattcttcgacgattctgttccaagttctcctgcatacacatctgggttctctccaaaatttggcgaaagccgtgacgatagctcctcttataacttcgggaggtttgattccttcagatcccaagacactggatccttccctcaggaaagccgtttctccaggttcgactccattagcagctccaagggcgagaatgtatcaggatttgacacagggaatagctcacgaaattttggccggtttgactcttttgatgacgccgacccattcggttcaagtggaccttttaaagcatcgggaagccggtctccacccaagttctgatatgctctctgctctgattagggttttgtgtcttgcgtcttgatttgtcaatacaaggtttagattctttgagcgaactctggcgtaacatggatttttttacctgacatttcttccattttccttatgtgcaattttcgagtccatctcacgcacaaagtggacaggtttgggtttatatctttgtttttgtaaacattttttctgtatcttgtaaattacgccaagtctgtctttgtttatatagtttacatgtatgaaacaacttctcgccatataacctattatttccttcactatattaacgttgatatggtatagcagcaggaaatgctgtacttacgttgctatggtcaaagatattagggcagttgccccagcaaaactcc

SEQ ID NO: 91513 - DNA, 3196 bp, Zea Mays
cgtcgtgccaccataagcgcggcctcgcgccaacaagaacctcggcctcgggaggcagcagtagcaccgccgggggaggcgcagcgcagcgcaacggccggcgccgggacgagagatcctcgaatgtacatgacaaggaaacttttccgtccagctgacccctctctgatctcgccaccgaagcgcacgctggacacccgtggttggtggcaccatgctgcagtacctggacttctcgcacgccagcacctcaaggaagtgggcgcacaggagacagggcgacggacttgaagctccaaggaacagcatggagttcgctttggaggcttcccacagctatggcgtgtttcaggaagatgttccgcactatccctgcaatatgaggcagtacccaaaatcagggctcaaccacagctttaacccagtcaagaagctgatccaggaggacatctcgttccgaacgaatgaagtccagaagaggcccggcggcgtcatcgccagactgatgggcatggaatcgcctccactgaacgcagctactgaatccatcagtcgttcggagatcaccccgagaccaacaatgccaagaagagatcctcctgaaagggagacctcagccaagcatgtctccttcgtgcagcacggcaacagggactccaccaagcaggcgtcaaagcaggagatccgagcctatggcgaggagagggacgtgtttgggcagcagaacaagaggggcaacgagtggagtaagccgcagccgcgggagcacccgcaggaggaggagctgcagaagttcaagaaggagttcgaggcgtggcaggcgagcagggcgtgggagcactcgagaagcttcgagctggagagtagcaccctcggcgacgacgatgacgacggcaggtgcacggacatcgtgccgtacaggtaccagcaccaccaccaccaccaccacaaggggaaagatgccagccatggcggcaagcacatacgctcctccaacgaggacgtgcattgttggagaagaagcagcaaggagagcggcacgtccatctccgggagccgtacgttctctctgacgaccagcgcagacgccgccgcctgctccacgaggctgccgctctccaggttctaccacgaggaggagaggtcgctgtcgccgacgaggatcgtgatcctcaagccctgccccgagctgagcgcggacgacgtcgaggagtcctcgctcgggtcgccggagctggtgaagaaggagaacaacatggaggccttcctggaggaggtcaagaagaggctcaagatcgagctcgagggcggggtggcctccgacgacaaggcggaccgccgttggttcgccgccgcagccgccgccgacgttattccggccgacccgaagcagatcgcgcggagcatcgccaaccagatcagggagaacgtcacgagggacatgcacccggcgctgctgcggtcggagtccacgcgctcgtaccgcagcgacgtgccgttcgacgggcagggacagatggattacatcggccgagacgccaggaggcagctctccgacagctcaagaacgtgctgaggagggacccgccggacgccgagacgcccttctcgttctcccaccggagaagggccacctcgacgtcgttcgacgaggagccaacgaggcccaagccgacgaggcacgaggtggcgccgccgtcgtcgaggaaggggaaggtcaggagcaaggaggaggagaagaagtgcgcggtggagtccgacgtccggtcgttcagatacggaccgagcaacaccccgacgacgacccagctggactccgagcccgtgtcgccgcgaaacctcatgaggtcgttctcggcgccggtgtccgggacgaccttcgtgaagctcctctcggaggagccgcgggtgctgaccggagcgaggctgcagcgcaagcaggaaggccacgggagcagcaggccagcgtcgtcggaggagaggaaagggaggaaggacgcgttcagcatcagaggcaaggtgtccaacctgaggcagaactttgggctcagagccaagctgttcggcaagaagttccacgcctccgacgagccgttccccgacgacctcccgcccatcggcaccctcgtcaccgcaccatcggtcctcatacaccccggcgtcctgcaggagaactccaccgaggtaccaccgagcccggcgtcatggtgcagcagcccgcctgacgagatgagcaggggaggctacccaagccctgtctcgccattggaggcatcctttagcgagcaccggtctcccatgaggacggaagccaaagacatggcttcagctgcttctgaacctctcgcagaaccaggagaacaagcccatgctgaagaggggcgcgccgagacaagtcctgtcctggacgagcaggacgacggcgacatggacgatacagatcaccccatgaagtccttcgtcagagctgttctcgtcgtcgccggcatgtacgggcggaggcacaaccctggcaacgccaccatgtcagagtgcgaggtcaagcctatccccaagtgggtgctggaggaagtcgtgtccccgtcctcagccccggcgggcagcggcgcggcagccgtcatggaccaccggctcctcttcgacctcgtcaacgaggcgctgccgggagccgtccgggcctccacgacgctgtgcgcgttcgacaagtgccacgccatggcgccaaggagagcctccggtggcaaggcgctgctagaggcgctgtggaagtccatgcaggtgtggatagagccgccgagcgaccgcaggacggcgagctctgcctccgtggacgtgctgatcggccgtgacctgagcgtgtcggcgtggcacggcgcgttccgcgaggacgcggacgcgctggctggggacgtggaggcggagctgctggacgagctgctcgaagagacggtgtgggacgtgctcctcaatgtgggggactcatgatcggatcgtatgcctcttctgacgagtatacttgtacattttggggtgcctttttttctgcctcttttgggtgcttgccgggtttgtgaacggtgttgcattggcgagtgagatatgtaactatgcttgcgtgtggaagaatgctgaatttacactgagaaatgcttaaagaagagagagaaaaagatgaataataaaaggaacagctgtc

SEQ ID NO: 91514 - DNA, 879 bp, Zea Mays
ttgatgaatttaagagtttttgtaacctagatatcctcacacataccattaccttttggttcttttgcagcccggagtctgttagatggcctaccgtcgggaaatacaaagtagacgtagcatccttggaatcattagcagtacctgagctgcaggtaagcagttggtggtgggttatgaaagagctacgaaatgtcaatgatcatgggatgtgtgcttgttaggttaagcatgagtgcatgataacgttttaaagtttgttctcgattgataacggcggagaaggaaatatacttcatatttcatgttggatcaggttaaggaagaaacagatctcttcatcattgacgaagtgggtaaaatggagctgttcagttcagcatttttccctgcggtaatgagagttattgaatccaatataccagtgttggccaccatacccattcctaggcagggccgggacattccaggagttgcgaggttgcggaatcatcctggagcagctgttttcaccttagacactggtaacagagatacgatgagagatactatatgcagtcagctaaggagtttgttgcagaggtgatctgctaacctccctgtgtctatgtagccactgctttttttgacataagataacaagcaaacgatcaagagtagaagttttctctcagaacctcgagtatctgttttcaagtttagctctgaatggatgataagcatgtcgttcagtttgttcttagttccgtatgtggttattcaatcatgtatttgcattcggtgggggcaaggttttattgccacaataactctcgcttgtatggatgcggttagcatgtagtgactctacaacaggtatcacatgatttgcacaactaa

SEQ ID NO: 91515 - DNA, 970 bp, Zea Mays
gtcatgtttgcaaaattctctgtgatgatgtgaacgaaggtctgaaaaaatcacagaactcactcgaacgacggtgccgccgcttgcctcgccggaccatggccgctgtgccgtcggggttcctcctcatcactggcccgccgggcgtggggaagacgacgctggtcatgcgggtgtttgaaaccctcagaggctcccacccgaacctcaacattcgcggattctatacccgagaggtgagagagggcggagaaaggatagggttcgaggttgtcacgctcgacggtagaactggaccactttcctcatgcaaggtttccagcccggagtctgttagatggcctaccgtcgggaaatacaaagtagacgtagcatccttggaatcattagcagtacctgagctgcaggttaaggaagaaacagatctcttcatcattgacgaagtgggtaaaatggagctgttcagttcagcatttttccctgcggtaatgagagttattgaatccaatataccagtgttggccaccatacccattcctaggcagggccgggacattccaggagttgcgaggttgcggaatcatcctggagcagctgttttcaccttagacactggtaacagagatacgatgagagatactatatgcagtcagctaaggagtttgttgcagaggtgatctgctaacctccctgtgtctatgtagccactgctttttttgacataagataacaagcaaacgatcaagagtagaagttttctctcagaacctcgagtatctgttttcaagtttagctctgaatggatgataagcatgtcgttcagtttgttcttagttccgtatgtggttattcaatcatgtatttgcattcggtgggggcaaggttttattgccacaataactctcgcttgtatggatgcggttagcatgtagtgactctacaacaggtatcacatgatttgcacaactaa

SEQ ID NO: 91516 - DNA, 832 bp, Zea Mays
gtcatgtttgcaaaattctctgtgatgatgtgaacgaaggtctgaaaaaatcacagaactcactcgaacgacggtgccgccgcttgcctcgccggaccatggccgctgtgccgtcggggttcctcctcatcactggcccgccgggcgtggggaagacgacgctggtcatgcgggtgtttgaaaccctcagaggctcccacccgaacctcaacattcgcggattctatacccgagaggtgagagagggcggagaaaggatagggttcgaggttgtcacgctcgacggtagaactggaccactttcctcatgcaaggtttccaggttgctattatgcatttatgcttgttctaaattctgatattaataaggtaattgttggtatttgtttagcaccgtgtatttgggtatttggaattttgaaatgcgttatctgatactggagattgtcagtagtttaaattgtatctaacagcagcgcgaacacacttcactgaaatgtccacttcttaagtccatcttgcagaataagattcacaatatgtgtagcacatctcatatgaaggtactttcctacaagtatggtacctttactattatttagttgtttcttcagatatgataaaccactgttattagcactagcattatcaactgttactgtcataatttttcctaacccattccatcaagcatctatgtaagttcttcccaatgacatcccccttatgaccctttacttggaagaagctaatgaccttcttatgcaaattccaattatcatcaacgaagtgtgcagtcactgtaatatagtagtcttgttgttgagaagtc

SEQ ID NO: 91517 - DNA, 564 bp, Zea Mays
atggacgaaaccactgcatacactgtcgaagaagacgagtggacattgacttgtattgggacacagcctacagtggcgagtggccatggaattcatgacattgattgggattcaataatggtagaagaaaccaacaacgaagaaggaagaaatgatgttacaagtgaacaaggtctatattatcagcttggactggatactcaagatgatagaagggaagatgattcaagtgcttcccgttttggaaatagcattccatgtgaagatgaattgggagaaggcattccatgctctgatgcatttatgctattaactaatatctttgaaaacaggaagcgaaagcctaggaaaaattcaacaaaaggatggttcccaaaagatgtacctgagtcatcacaggcaggtgtccaagagaatgaagctaatgaagaccttgttgaaagatcacaccttgcaattataccagctaatgaagatcttgttgaaagaccttcgtcgccacccgaagaacgtgtagttcgtgtcctagttaaaaagatcacacctaggaagaagaacgtttga

SEQ ID NO: 91518 - DNA, 1302 bp, Zea Mays
atatatgcaaaagcagcatctgtaaatacctacactcgtgttgtcatcccgtggtcaagtgcctagtaagttctgtatgttgctgtttggtggctgtgtggcagaattggagagaaagtgattgttggtgttccctgtcagctcttgggattggtttgtatgcagtaagctgcatacagtctttgatataacagaagatgggacttctgtacctctagttcagtttgttaacagtacaggtagttcgttgaatgtaacaaactagtgtacaatattgtaggccggagggtggaatcagtaggaatttgtcgatatgaagctttggattaggttaagtaatcacgaccaagttgcatcgcgcttgtaagttcttttggattaggttttgaaattcaaaaactcgccaaaaaaccacaagctgtggaaagtggaatcaacagaagcatgcccatgccgtcatgtgtcgttttagtgggcacaatgaaatgtcttctcaccagtggcaaaaggtgtcgagcagagagcaactggctggagcaacactacgagctcatcacctggtcaaaatgagatttggttggttcaaggtcaatgttactttttcatgttcttgcttcaaccatgcagaaggggtggtggttttaggtatcctgaataattccacagttagaaagcaggagatgtcttagtctcctagacgacaatgcagcatagatattttcttttgtttcgctcttattaatttttgtccagcagtgtatttctcttgtgttttttgaggtagccttgtgtgtaatctgtcctcggattcgcagcatgtgtgtctgtttcataactcatagtctgcatgtatgttgctacgactgtggccatcctgtccgattccaagaacattgctgaacctatatactgctgtaataatgagggatcaatcgagtaaaaatgtgtactctgtggcgattagttgaatgaagctgaagaatcaatgccagtactgttctgagtcagcagctatagccttgctcaagccaagcaacgaccatgccgcatcagcaaggcctggaaaaatcatggtgcggcgacgaccggcgcgccccgggccgcggcggcaggtcccgctgccccaccgcccccctgctgcagggcctcgatgtcctcgagcgcggcgacgacgtcgtccatggaagggcggctcttgcggtcgctgttgaggcacttgccggcgagcctggcgaccccgagagcgcggccttggtgtggtactggccgtccatccgctcgtccatgaggctcttgagcttg

SEQ ID NO: 91519 - DNA, 4235 bp, Zea Mays
tgaaaatagatgtgtgcagtactgtgtttcttactgctaccactttctttctcgccattggggacgcacaggcgcgggagcgtgatggcgatgtgtctctctatccctttccgcaatggggacgtttcgtccgtaggctctgcctccccggctcgccttgcgtggtgcgaggcggagtagctagtggcttccgttgtggcagccatgcgcccaaaaagatcgccaattgcgtgctcgattccttggagtacttggctgaaaatattattagcgttttcttcttcttggtgcccaggctcttacgctcgtggcctggcttccttcgctgcgctgtgctgcggcgcccagttgcggctgcgcctttcgcttgtgctgttgcgtcccccgattggcatgccaagaagtccgtgaatcactgagctgcctggtgctgcttgtccgggcatggagcaggcgccgcagacccacggcggcggcggcttgctggcctgcggcgtcatggaggacgtcgcggtcggcgacctggatctcatggaggagctgtttatggcggcgccgggcttcgatttctccgacttctcccagcccggggccggcggcgagtccccgggggtctgcttctcgccgctgttcgacatctgcagcacaaccaccacggcaactcccccgccgccgccgccgtcaggcgacgacaacagggaccagcccaccccgccgcgccgcggctgggtgttccagccccggctggaggtcgatgccacggtgaaggagcggctgcggcgcgcgctagagcgcatcgcgtcgctgtcgcagacgcagcccggggagctgctggcgcaggtctgggtccccaccgtcatcggcgaccgccaggtgctcaccacgtgcggccagcccttctggctcgactgccggaacgagcgcctcgccaactaccggacggtgtccatgaagtaccagttctccgccgacgagaccgcgcgcaccgacctggggatgcccggccgcgtcttcgtcggccgcgtccccgagtggacccccgacgtccgctacttctccaccgaggagtaccctcgcgtacaccacgcgcagtacttcgacatccgcggcagcgtcgcgctccccatcttcgagccccgcagccgggtatgcctcggcgtcgtcgagctcgtcatgaccacggagaaagtcaactataatgccgagatccagaacatctgcagcgctctcaaggaggttgatctcaggagctctgatgtttcgagtgattcccgtgcaaaggtgactgatacttcataccgagcaatcataccagagatcgttgacgttctcagaactgtttgtgagacgcacaaactgccactggcccagacgtggataccctgcatctgccaggcaaagaggggaagccgccacaccgatgaaaaactcaagtattgtgtgtctaccctggacgaagcgtgttacgtccgcgacctgaatgtaaatggctttcacgaagcttgctctgagcatcatttgttcagaggtgagggtgttgttggcagggcctttgcaacgaacgagccatgtttctctgaagacattaccgcctccagcaagatccaataccctctctctcatcatgccaaacttttcagcttaagggctgcagtggccatccggttacggagtatcagcactggaagccttgactatgtcttggaattcttcctgccagtggactgcatagagattgaagagcaacgagccatgctgaattctttgtccattacaatacagcaaacatgctacacacttcgagttgtcagcttgaaagagctggtggatgaaggatcaattgaaacaagtgctctaactccaccagaatatgacaaatctatgcatgaaaacatagatgaggtttgtagtggcattggtgttcctgcaaggacagcatcactggaaacttccgaggaggtgtcctcatggatagcaagccttgtgtgcgctcaaaataagggagtgaaagaaatggatggtgacctgccatttggattcagcaagcaagaggatgaagggtttagtgttacagctggctggcatacctctccagtaatagagcctgaaggtagcatcttttcaggcttcaagcagcatgaagaatacaaggtcaaggaggtaacttgtctcagagatccaagctcatccaacttggaaaaaactgtagaaaagagacggactaagatggagaaaactgttagcctggaagaacttcggaagcattttgctggcagcctgaaagaagctgcaaagaatttaggagtgtgccccactacactgaagagaatatgcaggcagcatggaattaatcgttggccatcacggaagattaagaaagttgggcactccctgaagaaattgcaaatggtgatcgattcagtacatggtagcgaaggaacggttcagctcagctcgctctatgaaaactttaccaagaccacatggtcagaaagagagttacaaggggatgccacttatccattgtcagaggaaaaaggtcccttggaaccttctgttcctgatcggtattgcgagggcagattcacctcgcatacttctggttctaattccctctcaccctcttgtagccaaagctcaaattccagccatggttgttccagtggttcgaaatcacaacaacatgtcagtgctcctcaacttgcagtaaagaaagaagttttcatggaggagaatcagagctccacactactcaaagctgcaagccatgctgaactgcagatgcttcctgaagaaagacttgtcaccctgcctaggtctcatagccaagtgcttttaagtgaacaaaagccagtggaaaatataacaggtatgcaaatgtctaagcctgattctctcaagataaaagccatgtacggcgaagaaagatgtatattccgactgcagcctagttggggatttgaaaagctaaaagaagaaattctaaagcggtttggcattgctcgggaggtgtatgtggacctcaagtatttggatgatgaatctgagtgggttcttctaacatgcaacgcagacctgcttgagtgtattgatgtgtacaagtcatcaagtactcaaacagtaaggatcttggtacattctagtgaccagtaagtgcctgttcctttggtcaaactggtttgtcctgacaatggcgcaaagctcatcaggatgctgaagaaagcatacaatctctctttgaagtaaagtgcttgttgacatcgcgctcagtttcaagtcataatcatatatgcaaaagcagcatctgtaaatacctacactcgtgttgtcatcccgtggtcaagtgcctagtaagttctgtatgttgctgtttggtggctgtgtggcagaattggagagaaagtgattgttggtgttccctgtcagctcttgggattggtttgtatgcagtaagctgcatacagtctttgatataacagaagatgggacttctgtacctctagttcagtttgttaacagtacaggtagttcgttgaatgtaacaaactagtgtacaatattgtaggccggagggtggaatcagtaggaatttgtcgatatgaagctttggattaggttaagtaatcacgaccaagttgcatcgcgcttgtaagttcttttggattaggttttgaaattcaaaaactcgccaaaaaaccacaagctgtggaaagtggaatcaacagaagcatgcccatgccgtcatgtgtcgttttagtgggcacaatgaaatgtcttctcaccagtgtaagtatcgatgaaactgtctttctgagcattcattttgcaaaactccctacagtgccaccataagctaatgcagttttcatctccatatcccagggcaaaaggtgtcgagcagagagcaactggctggagcaacactacgagctcatcacctggtcaaaatgagatttggttggttcaaggtcaatgttactttttcatgttcttgcttcaaccatgcagaaggggtggtggttttaggtatcctgaataattccacagttagaaagcaggagatgtcttagtctcctagacgacaatgcagcatagatattttcttttgtttcgctcttattaatttttgtccagcagtgtatttctcttgtgttttttgaggtagccttgtgtgtaatctgtcctcggattcgcagcatgtgtgtctgtttcataactcatagtctgcatgtatg

SEQ ID NO: 91520 - DNA, 3216 bp, Zea Mays
tccgaggagaggacgcctgtgattgcactacacaacgtgcctctcgctcgctccccacgtcgctgtgagtgagatcgatcagacggaaccaccagggcaggagcaagctgctcatctccactccatccactgttttattggcgggcgcactgcttctgcgaccagagaacggcctcgctcgtcgtcgtgccactgtgccagtgaggctcttacgctcgtggcctggcttccttcgctgcgctgtgctgcggcgcccagttgcggctgcgcctttcgcttgtgctgttgcgtcccccgattggcatgccaagaagtccgtgaatcactgagctgcctggtgctgcttgtccgggcatggagcaggcgccgcagacccacggcggcggcggcttgctggcctgcggcgtcatggaggacgtcgcggtcggcgacctggatctcatggaggagctgtttatggcggcgccgggcttcgatttctccgacttctcccagcccggggccggcggcgagtccccgggggtctgcttctcgccgctgttcgacatctgcagcacaaccaccacggcaactcccccgccgccgccgccgtcaggcgacgacaacagggaccagcccaccccgccgcgccgcggctgggtgttccagccccggctggaggtcgatgccacggtgaaggagcggctgcggcgcgcgctagagcgcatcgcgtcgctgtcgcagacgcagcccggggagctgctggcgcaggtctgggtccccaccgtcatcggcgaccgccaggtgctcaccacgtgcggccagcccttctggctcgactgccggaacgagcgcctcgccaactaccggacggtgtccatgaagtaccagttctccgccgacgagaccgcgcgcaccgacctggggatgcccggccgcgtcttcgtcggccgcgtccccgagtggacccccgacgtccgctacttctccaccgaggagtaccctcgcgtacaccacgcgcagtacttcgacatccgcggcagcgtcgcgctccccatcttcgagccccgcagccgggtatgcctcggcgtcgtcgagctcgtcatgaccacggagaaagtcaactataatgccgagatccagaacatctgcagcgctctcaagctctgcaggctgttatgccgttacactcttaacctgttcgatgaaatgcccttaggaaaagacgtgataactaccgggcacgccaatccccgaagtaatcagtcttttcaccttactttgtttggtgatgttcttgtctcagtgactgatacttcataccgagcaatcataccagagatcgttgacgttctcagaactgtttgtgagacgcacaaactgccactggcccagacgtggataccctgcatctgccaggcaaagaggggaagccgccacaccgatgaaaaactcaagtattgtgtgtctaccctggacgaagcgtgttacgtccgcgacctgaatgtaaatggctttcacgaagcttgctctgagcatcatttgttcagaggtgagggtgttgttggcagggcctttgcaacgaacgagccatgtttctctgaagacattaccgcctccagcaagatccaataccctctctctcatcatgccaaacttttcagcttaagggctgcagtggccatccggttacggagtatcagcactggaagccttgactatgtcttggaattcttcctgccagtggactgcatagagattgaagagcaacgagccatgctgaattctttgtccattacaatacagcaaacatgctacacacttcgagttgtcagcttgaaagagctggtggatgaaggatcaattgaaacaagtgctctaactccaccagaatatgacaaatctatgcatgaaaacatagatgaggtttgtagtggcattggtgttcctgcaaggacagcatcactggaaacttccgaggaggtgtcctcatggatagcaagccttgtgtgcgctcaaaataagggagtgaaagaaatggatggtgacctgccatttggattcagcaagcaagaggatgaagggtttagtgttacagctggctggcatacctctccagtaatagagcctgaaggtagcatcttttcaggcttcaagcagcatgaagaatacaaggtcaaggaggtaacttgtctcagagatccaagctcatccaacttggaaaaaactgtagaaaagagacggactaagatggagaaaactgttagcctggaagaacttcggaagcattttgctggcagcctgaaagaagctgcaaagaatttaggagtgtgccccactacactgaagagaatatgcaggcagcatggaattaatcgttggccatcacggaagattaagaaagttgggcactccctgaagaaattgcaaatggtgatcgattcagtacatggtagcgaaggaacggttcagctcagctcgctctatgaaaactttaccaagaccacatggtcagaaagagagttacaaggggatgccacttatccattgtcagaggaaaaaggtcccttggaaccttctgttcctgatcggtattgcgagggcagattcacctcgcatacttctggttctaattccctctcaccctcttgtagccaaagctcaaattccagccatggttgttccagtggttcgaaatcacaacaacatgtcagtgctcctcaacttgcagtaaagaaagaagttttcatggaggagaatcagagctccacactactcaaagctgcaagccatgctgaactgcagatgcttcctgaagaaagacttgtcaccctgcctaggtctcatagccaagtgcttttaagtgaacaaaagccagtggaaaatataacaggtatgcaaatgtctaagcctgattctctcaagataaaagccatgtacggcgaagaaagatgtatattccgactgcagcctagttggggatttgaaaagctaaaagaagaaattctaaagcggtttggcattgctcgggaggtgtatgtggacctcaagtatttggatgatgaatctgagtgggttcttctaacatgcaacgcagacctgcttgagtgtattgatgtgtacaagtcatcaagtactcaaacagtaaggatcttggtacattctagtgaccaaattggagagaaagtgattgttggtgttccctgtcagctcttgggattggtttgtatgcagtaa

SEQ ID NO: 91521 - DNA, 1887 bp, Zea Mays
ggccgaccttgcgtacgtacgtcgtagcggccatggacccgtacaagcaccgcccgtcgagcgccttcaacgccccgtactggaccaccaactccggcgcccccgtgtggaacaacgacagctccctcaccgtcggcgcacgaggtcccatcctgctggaggactaccacctggtggagaagctagccaacttcgaccgcgagcgcatcccggagcgcgtggtgcacgcgcgtggcgccagcgccaagggcttcttcgaggtgacccacgacatcacccacctgacgtgcgccgacttcctgcgcgcgcccggggtgcagacgcccgtcatcgtccgcttctccacggtgatccacgagcgcgggagccccgagacgctgcgcgacccgcgcgggttcgccgtcaagttctacacccgggagggcaactgggacctggtgggcaacaacttccccgtcttcttcatccgcgacggcatcaagttcccggacatggtgcacgcgctcaagcccaacccgcggacgcacatccaggacaactggcgcatcctcgacttcttctcgcaccacccggagagcctgcacatgttctccttcctcttcgacgacgtcggcatccccgccgactaccgccacatggacggatccggggtgcacacgtacacgctcgtcagccgcgccggcaccgtcacctacgtcaagttccactggcgccccacctgcggcgtgcgctcgctgatggacgacgaggccgtcgccgttggcggcgccaaccacagccacgccaccaaggacctcacggacgccatcgcggcggggaacttccccgagtggacgctctacatccagaccatggaccccgagatggaagaccgcctcgacgacctggacccgctggacgtgaccaagacgtggcccgaggacgcgttcccgctgcagcccgtgggccgcctggtgctcaaccgcaacatcgacaacttcttcgcggagaacgagcagctggccttctgcccgggcctcatcgtccctggtatctactactccgacgacaagctgctgcagaccaggatcttctcctactccgacacgcagcgccaccgcctcggccccaactacctgctgctaccggccaacgcgcccaagtgcgcacaccacaacaaccactacgacggatccatgaacttcatgcaccgccacgaggaggtcgactacttcccctccaggtacgacgccgtcaggaacgcgccgaggtacccgatcccgaccgcccacatcgccggccgccgagagaagactgtgattagcaaggagaacaacttcaagcagcccggggagaggtaccgcgcgatggacccagcaaggcaagagcggttcataaccagatgggtcgacgcgctctccgacccccgcctcacccacgagatcaggaccatctggctctccaactggtctcaggccgacaggtctctgggccagaagctcgcgagccgcctcagcgccaagccgagcatgtaagatctaccagacaagggcgccgcgcgggggaggacggagctctctgtctgctttcgctcatgcatcatatgcatggaaccaagacaaattactctagcagactagcacgcaaactgaatcgcgtttagtttagtttttttggccccggataaaggctgctagcttggttgtaataatggctggctgtgtccagaactcttgtagaagacagaactcgtccaaaacaacatcgacactgcattcatggttattgtgcagaagcagaactcttggtttcagttgaatgtttggctgggtttccatccgaataagggctttgtttaatctcgatccatacgaattaaacgagattgagtgggtttaaatctctaac

SEQ ID NO: 91522 - DNA, 1628 bp, Zea Mays
ggccgaccttgcgtacgtacgtcgtagcggccatggacccgtacaagcaccgcccgtcgagcgccttcaacgccccgtactggaccaccaactccggcgcccccgtgtggaacaacgacagctccctcaccgtcggcgcacgaggtcccatcctgctggaggactaccacctggtggagaagctagccaacttcgaccgcgagcgcatcccggagcgcgtggtgcacgcgcgtggcgccagcgccaagggcttcttcgaggtgacccacgacatcacccacctgacgtgcgccgacttcctgcgcgcgcccggggtgcagacgcccgtcatcgtccgcttctccacggtgatccacgagcgcgggagccccgagacgctgcgcgacccgcgcgggttcgccgtcaagttctacacccgggagggcaactgggacctggtgggcaacaacttccccgtcttcttcatccgcgacggcatcaagttcccggacatggtgcacgcgctcaagcccaacccgcggacgcacatccaggacaactggcgcatcctcgacttcttctcgcaccacccggagagcctgcacatgttctccttcctcttcgacgacgtcggcatccccgccgactaccgccacatggacggatccggggtgcacacgtacacgctcgtcagccgcgccggcaccgtcacctacgtcaagttccactggcgccccacctgcggcgtgcgctcgctgatggacgacgaggccgtcgccgttggcggcgccaaccacagccacgccaccaaggacctcacggacgccatcgcggcggggaacttccccgagtggacgctctacatccagaccatggaccccgagatggaagaccgcctcgacgacctggacccgctggacgtgaccaagacgtggcccgaggacgcgttcccgctgcagcccgtgggccgcctggtgctcaaccgcaacatcgacaacttcttcgcggagaacgagcagctggccttctgcccgggcctcatcgtccctggtatctactactccgacgacaagctgctgcagaccaggatcttctcctactccgacacgcagcgccaccgcctcggccccaactacctgctgctaccggccaacgcgcccaagtgcgcacaccacaacaaccactacgacggatccatgaacttcatgcaccgccacgaggaggtcgactacttcccctccaggtacgacgccgtcaggaacgcgccgaggtacccgatcccgaccgcccacatcgccggccgccgagagaagactgtgattagcaaggagaacaacttcaagcagcccggggagaggtaccgcgcgatggacccagcaaggcaagagcggttcataaccagatgggtcgacgcgctctccgacccccgcctcacccacgagatcaggaccatctggctctccaactggtctcaggccgacaggtctctgggccagaagctcgcgagccgcctcagcgccaagccgagcataactcttgtagaagacagaactcgtccaaaacaacatcgacactgcattcatggttattgtgcagaagcagaactcttggtttcagttgaatgtttggctgggtttccatccgaataa

SEQ ID NO: 91523 - DNA, 1267 bp, Zea Mays
aaacccttctgtcctcccttcgcccggtccaccctctcgcggccgccaggagaagccgccgccacagcaggcgacaaagatgggggggttcgtcaagacccagaagaccaatgcgtacttcaagcgtttccaagtgaagttcaagagaaggcgtgctggtaagacagactacagggcaaggataaggttgattaaccaagacaagaacaagtacaatacacccaaataccgatttattgtgcgatttaccaacaaggacatcattgcacaaatcgtatctgcaagtatcacgggtgatattattcttgctgctgcatattcccgtgagctgccacgatacggtctagaagttggtctgaccaactatgctgcagcctactgcactggtcttcttttggctcgtcgtgttctcaagatccgtgatttggatcaggagtatgagggcaatgttgaggccactggtgaggacttctctgtcgagccagcggaagagaggaggcctttccgtgccctcttagatgtcggccttattaggactactactggaaaccgtgtctttggtgccctcaagggagctttggatggtggtctagatattcctcacagcgataagaggtttgctggcttcaagaaggatgataagcagctggatgctgatatccaccgcaagtacatctatggtctccatgttgctgagtatatgaagaatctggctgacgaggagcccgagaagtaccaggctcacttcagcgagtacatcaagaaggggattgaagccgatgacatggaagctctgtacaagaaggtccatgcggccatccgtgctgatcctagcatggccaagtcaacaaaggcgcaaccaaaggagcacaagaggtacaaccccaagaagttgacctatgagcagagaaaggccagactcgtggaaaggctcaacgccctcaattcctcgggtggtgtcgatgatgatgaggatgacgagtgaagtgctatcctatttggcgatcagaacttgcgcaatggcatttgttgttccctttactcctgtaacaggcatttttttgtttgagattagagctggatatatggggttcacgatgtgctgccggttgaccttgctctttttatccctggattttgtcagtctttgggctgaaacacaaattttggaatctcctcaattcccagggatgaatggacgtgtagctcacatgggacaagatccgcgtcacgtcttctactgaaaacaaaaaaaaaatctgtactc

SEQ ID NO: 91524 - DNA, 2320 bp, Zea Mays
ctgcgtgtggtgcgttgccttcttcctcctcgcacacgccaggcacgagaccaacacccacagcgcacgcactccaaatagcgagccaaaggcgggccgaggccacgagtcctccgcctctcctccgccgcgtcgctcgcgctccaggcacgccgaaagccgaatcggggccgcgaggcagcctccccgggcggatcgaccccagggccaggggcatgggcggaggggacgccgacgccggcggcgagcccgcggccgcgcaggccacgctgcacatccggtgcaccaacggctccaagttcgccgtgcgggccgacctgggcgccaccgtgggaacgttcaaggcgatcgtagccgatagctgcgacgtgccggcgccgcagcagcggctgatctacaagggccggatcttgaaggacgagcaaaccctagccagctacggtgtggagacagaccatacaatccacatggtacgtggtgctgcgccaccaccagcatccactgcacctgcagccaaccaagaacctaccactgctgctcctgccagttccccagcagcaggattgggtggcttgttgcaaaatctgggtgctacaggggctgctgctaacagtgggggtttgggtttgtttggatctggcctccctgaattagaccacatgcaacaacagctagctgaaaatcctaacttgatgagggaaataatgaatatgccactcatgcagaatttaatgaacagtcctgaactgatacgcagtataataatgaacaaccctcaaatgcgcgagctcattgatcgcaatccggatcttgctcatgtcctcaatgatccaagcatcatgcgccagacttttgaagcagttcggaatcctgaactcatgagggagatgatgcggaacacagacagagccatgagcaacattgaatcttctccagagggattcaacatgctccgtcgcatgtatgaaactgttcaagagccttttctgaatgcgacaacaatgggtagcgagggtgatcgaaattcgaatccatttgctgcacttctaggaaatcaggggtctaaccaagcaagagactcagctgcaaatggaacaactacagcttcagacaccacatcaggggctccagctccaaatactaatccacttccgaatccttggggtccaaatgctggatctgcccaaggagcagcaagatcccctcctgctaccaacactaggagtactacagcaggtggcccaggagggttgggttcagcagattttggaagtactcttggtgccagtggtggtggctctgatgctaccttcttgactcaagttttgcaaaacccaactatgatgcagatgatgcagaacattatgtctaatcctcagtccatgaatcagctgcttaatatgaatccaaatgtacgtaacatgatggaatccaatactcaaatgagagaaatgattcagaatccagaatttattcgccagttgacgtctcctgaaacattgcagcaattaatttcattccagcagtctttgatgtcacaacttggccaacaacaaactggacaggagcggacacaatcagcctctggtgcaggcaatgtgaacctcaacaccttgatgaacatgttcagtgggcttggtgctggtggtggcctaggtgttccaaatgctcctaatgtgccaccagaagaactgtatgcaacacaattagctcagctccaagaaatgggtttttttgacacacaggagaacatccgagccttggccgccactgctggaaatgttcatgctgcagtggagcgacttcttggaaacatgggccaatagaatatgatgacgaacataactgtgttctgatccatgcgatctgtagttggcattgtgagattatgtctggttcattggttttagacctgagattgagaggcggcatctagattctgtgtttaaggatgaataaagagtgtaccggtggaaccttacatataaatgtgggctggtgtcatggttaaaattgttgttgttggtacattgggttgctgtacatatggatcttttgcaatcttatttgcattgtacatggacaatgttttatgtaagagctgattccgtgaccaggggtcacggagggattggaggggattgaaagagaaatgaactaatttcccctcaacccctccaatctctttgtgatccctggtcatcaaatcagccctaaaggggtgggggtatgtagtactaacgatgttgtggtttcactttggattgaagctggtacaaaataaagctaaatgaacaggctaacgtgaactcataaaaaa

SEQ ID NO: 91525 - DNA, 2079 bp, Zea Mays
ctgcgtgtggtgcgttgccttcttcctcctcgcacacgccaggcacgagaccaacacccacagcgcacgcactccaaatagcgagccaaaggcgggccgaggccacgagtcctccgcctctcctccgccgcgtcgctcgcgctccaggcacgccgaaagccgaatcggggccgcgaggcagcctccccgggcggatcgaccccagggccaggggcatgggcggaggggacgccgacgccggcggcgagcccgcggccgcgcaggccacgctgcacatccggtgcaccaacggctccaagttcgccgtgcgggccgacctgggcgccaccgtgggaacgttcaaggcgatcgtagccgatagctgcgacgtgccggcgccgcagcagcggctgatctacaagggccggatcttgaaggacgagcaaaccctagccagctacggtgtggagacagaccatacaatccacatggtacgtggtgctgcgccaccaccagcatccactgcacctgcagccaaccaagaacctaccactgctgctcctgccagttccccagcagcaggattgggtggcttgttgcaaaatctgggtgctacaggggctgctgctaacagtgggggtttgggtttgtttggatctggcctccctgaattagaccacatgcaacaacagctagctgaaaatcctaacttgatgagggaaataatgaatatgccactcatgcagaatttaatgaacagtcctgaactgatacgcagtataataatgaacaaccctcaaatgcgcgagctcattgatcgcaatccggatcttgctcatgtcctcaatgatccaagcatcatgcgccagacttttgaagcagttcggaatcctgaactcatgagggagatgatgcggaacacagacagagccatgagcaacattgaatcttctccagagggattcaacatgctccgtcgcatgtatgaaactgttcaagagccttttctgaatgcgacaacaatgggtagcgagggtgatcgaaattcgaatccatttgctgcacttctaggaaatcaggggtctaaccaagcaagagactcagctgcaaatggaacaactacagcttcagacaccacatcaggggctccagctccaaatactaatccacttccgaatccttggggtccaaatgcaagatcccctcctgctaccaacactaggagtactacagcaggtggcccaggagggttgggttcagcagattttggaagtactcttggtgccagtggtggtggctctgatgctaccttcttgactcaagttttgcaaaacccaactatgatgcagatgatgcagaacattatgtctaatcctcagtccatgaatcagctgcttaatatgaatccaaatgtacgtaacatgatggaatccaatactcaaatgagagaaatgattcagaatccagaatttattcgccagttgacgtctcctgaaacattgcagcaattaatttcattccagcagtctttgatgtcacaacttggccaacaacaaactggacaggagcggacacaatcagcctctggtgcaggcaatgtgaacctcaacaccttgatgaacatgttcagtgggcttggtgctggtggtggcctaggtgttccaaatgctcctaatgtgccaccagaagaactgtatgcaacacaattagctcagctccaagaaatgggtttttttgacacacaggagaacatccgagccttggccgccactgctggaaatgttcatgctgcagtggagcgacttcttggaaacatgggccaatagaatatgatgacgaacataactgtgttctgatccatgcgatctgtagttggcattgtgagattatgtctggttcattggttttagacctgagattgagaggcggcatctagattctgtgtttaaggatgaataaagagtgtaccggtggaaccttacatataaatgtgggctggtgtcatggttaaaattgttgttgttggtacattgggttgctgtacatatggatcttttgcaatcttatttgcattgtacatggacaatgttttatgtaaga

SEQ ID NO: 91526 - DNA, 1650 bp, Zea Mays
ggtgttaatagatcgtataaagataaaaaaacatctattagctagaactccaaacatactctcgttaactattgctagctaattatttgtaggctaattattagccacctaggacccaaacgaacatgacctaaagccaagcgaaacatgcgtcaaacgatcgccaccgtacaaatccaaatcggatggcctgggacaccccagcatcccgaacccaatcgccttatccactagcacatcatcccagcaagcacaccaccgtgtttcgtgttcgctccacacgcgccaccaccagagacctcccgctggttacaccaatggaggccgtcctacggcatccatcgctctcgcgcaccaggcctccgaacctgaaccctcccacaacgccatctccatctcttcatgcaccatctcttctccgcctccgcgcgcgccggctcatcgccgccgcggtgttccaggaccagaagccgaaggagccagcaagcaagggaggtgatgacgaggaggaggcgtacggcgaggtggaccgcatcgtctccagccgcacagtcagcagcccggtgttcgcggaggacggctcggccaccgccgccgtcgccacggagttcctggtggagtggaaggacgggcacgagccgtcgtgggtgcccgcggaggccatagccgcggacgtggtggccgagtacgagacgccgtggtggacggcggccaagaaggcggactcggaggcgctggcggcgctgctcgcggacgagacgttgcggcgggaccccgacgcggaggacgcgcaggggcgcaccgcggcgcacttcgccgcggggctggggtccgaggagtgcctgcgcgcgctcggcgcggctggagcggacgtgggccgtcgggagcgcgcggggggcgggctcacgccgctacacatggcggtcgggtacggccgcgcgggcgccgtgcgcgcgctgctggagctgggcgccgacccggaggcccccgacgggcagggccgcacgccgctggagctggtccaggaggtgctcgccagggcgcccaagggcaacccggcgacgttccagcttcggcaggggctggaggcggcgcagaaggagctggagaaggccgtgtacgagtgggccgaggtggagaaggtgatcgacggccgcggcgaaggcaagtggcgggagtacctggtggagtggcgcgacggcggcgagagggagtgggtgaaggcggcgtgggtggcggaggacctggtgagcgacttcgaggccgggctggagtacgccgtggccgaggccgtgctcgacaagaggcaggcggcgacagcgacggcggaagaggaggacagctgggagtaccttgtcaaatgggtcgacattgaggaggccacgtgggagcccgccgagaacgtggacaccgagctcgtgcagaagttcgagcagcagcagtcggggtctgcaggcggtgattgatggcggcagcactgcaccaccgtcgccgcaggtgatagagattacttgatgaaggtgattgcgttttattcgtcgggtattcaaagcactgcccgggttgtattttaggatgaaacttttgtgagtatcatattttcaccggaattgcagtttcaaccttcccgcttggaaactctctcttttt

SEQ ID NO: 91527 - DNA, 816 bp, Zea Mays
atggcaacgacgacgacgcatgcagctaattcatgtacaggggagggagaggggtttcggggctctctcctctcgtcgttaaaagtgccactccggcaaaactcaaaaaaagaaaggcagcgagtgacactgacacggaggaggcagacagagcaactcaactccgcagcccgcaggctccagtcctcagcgagttccgttgcagcctctgctctgctggtgccgtcactcctcctcccactcgtgcgtgtcacacgggaagcagccctcctgggcgacgtccgtgatctggacgcccgtgtcgtagacctcgccggcgcgccgccaccgcggcagcacctcgcggtcggcccacacccacttgccgtcgtacccgcccgtcaccaccaccctgagctggagcgggcccggcggcgcctgcctcgtgctccacgccggcccgtcgtcgcgcgtcatgaacctccagttggacgaacccacctgcgcgacgtctacggcgacgatgtcggtctgcccgccctggtagaggaacctgatggcgaggtcgccgggggccggggccgcagcgtggctcctctcctccaccctcaccgacaggtttctgtgcttgtactcgcacggcaccctgcagtagtcagccatcgtcgtccggttgggtgggcgtttccagtcgcgattcattcaaatttcttgtacacaccgtatgttatgtgttttttttggtttacctcttgtactcgacgtcgactgcgcggcgtgctgcgaggcgtggggccatgccggggcgcgccatggccgcgaacgcggtgctgctga

SEQ ID NO: 91528 - DNA, 448 bp, Zea Mays
gctaacacagctcggcgccatagcctatggcgccgagcttcatgacgtggcagcccgcgtggcacacctagctcggcgccacagatcttggcgccgagctaggaaacttaaccgaaaccccctttcctcttcgtttcttctctgtttcgctcgaccgttttcatttcggttcctacgcctgccgccgcgcatatcgccgccgccgccgccagccgagctcgccgcccgcccgcctccagccgagctcgccgcccgcccgccgtccgccgagctcgcccgccgagctcgccgcccgcccgccgcccgccgccgagctccctccccgtctcggccacctccatcgccgccgagctccctccccgtcccggccacctccctcgccgccgagctccctccccttcccggccacctccctcgccgccgcgccacctcccccgtcccggcgacc

SEQ ID NO: 91529 - DNA, 1486 bp, Zea Mays
actcaaagacaggcccatgtttttgcaacggcccaacgcgcatctacatgtacgtcttcctagggttttggatgcgtcgcagataaaaagttccctccctaattacaatcttcctcagcgccgccgctcccagacaccgagcccgactgcccaaccccgatccggcgatccgtctctttcctttccttcgttctgcaggccccgatcgcttgcattcccgtcaaccatggcggcggcagcaggcggaggcgcggtgcgcgctctgtcccagaaggagcaggacatacagatgatgctcgccgccgacgtccaccttggcaccaagaactgcgatttccagacggagcgctatgtctttaaacgccgcaccgacggcatctacatcatcaatcttggcaagacatgggataaactccagcttgcagcgagggttatcgttgccatcgagaacccgcaggacatcatcgtccagtctgcccgcccatatggccagcgtgctgtcctcaagttcgctcagtacactggcgcccatgccatcgctgggaggcacacccctggtacattcactaatcagctccagacctccttcagcgagcctcgactgctcatccttactgacccaaggactgaccatcagccaatcaaggagtctgctctggggaacatcccaaccattgccttctgtgacactgactctcccatgcggtacgtcgatatcggcatcccagcgaacaacaaggggaggaacagcattggatgtctgttctggcttctgtccaggatggttctgcaaatgaggggcactatccttcctgggcacaagtgggaagtcatggtcgatctgttcttctatagagacccagaggaagcaaaggagcaggaggaggaagttgccgcggcccctgagtttgccgcaatcactgattaccaaggagctgatcagtggggtggtgaccagtggacctctgatgtggctgcaccacctgttgctcctactggtgctgattggggtgctgctccggctccagttcctaccggtgaaggctgggatcaagccggggcccctgtacctgcggacggcactgtacctccagtggttgctcctactggttgggaccaagcagccccgccgacagcccaaggctgggagtaggcatagtctactatgagacctgtcttatgcagcttaagttcagtattttttgtgaagtctagtcttctgcagcttaagttcagtattttttgtgaagtctagatgtccagaatcttttggcatctgctatagctatgctttgctttgctttgagcacttctgttttggggctttctagctgaccctgttgtccaacgttgctggcatggaaatttttggttaatcttaaaactggaaagagcgtgtgaaacgatccttgtgactctgttattccctgagtatgtgcaagtataaatcctgatccctgctgctgtatagatcattgctagggat

SEQ ID NO: 91530 - DNA, 1415 bp, Zea Mays
cccacccttctacaagtctatataagcgagcgagcccgcgaaacaccaccaggcagatcgtgttccagtgcagcaagcagagcagagcagagcagcgtcgtgcgtccgagaagaagacgactcacgagagcagaacgagcaccgatcgatggcagtgatggccggggcggcgtccatggaggtggagcaggacctcccgggcttccggttccatcccaccgaggaggagctcctcggcttctacctctcccgcgtggtccacggcaagcagctccacttcgacatcatcggcagcctcaacatctaccgctacgacccctgggaccttcctgcgatggcgaagattggcgagagggagtggtacttcttcgtgccgcgcgaccgcaaggccggcagcggcgggcggccgaaccgcacgacggagcgcgggttctggaaggccacggggtcggacagggccatccggagctccgccgacgccaagcgggtgatcgggctcaagaagacgctcgtcttctaccaggggcgcgccccgcgcggcaccaagacggactgggtcatgaacgagtaccgcctccccgaccactccgccgccggccgcgccgctccgccgctgcctcccaaggaggacatggtgatctgcaagatctacaggaaggccacgccactgaaggagctcgagcagagggcctctgccatggaggagatgcagaggcgcatcggcggggccacagcaacatccctggtccaggccgccggctccaccggcgacgactacctgtcgtcggacgacacctacgacacaagtttcctgcagttcccgtcctcgtcatctcccgcgccgtcgggcgacagctacggcgcgcccgcggccgcgcccagggaggccaagacggaggccgcggacgccacgacggtcacggtggcgtcgacgtcgtcgtcgtcctccctgctgcatgccgcgagcgtggccggcccggcggtgaggcacggtgacctgcccaccctgcaggtgccaacgcacctcggagtcgccgactggacgcagatgcaggacccgtttcagctgcgcagcccgtggcaggaccagctcttcttctctcccttagcccacctgctatactgaagtctgaactctgaagtgaggaaggtgcacgcgcaacttggaagaagtggtgaactgtatcaccgaaatgcggttcagctctgcaacggcgagccgcgatgctagcttagatgtgaattcggttgtagatatactgcacgagcaagttggaagtagaagaagagttgagtactcgtatatgctctttttatttctgcgtgatgttggtacggggcctctgacatgaaagtcataataaactagtcaaggttcattttctaatctctaacctgtacgaatctctgattta

SEQ ID NO: 91531 - DNA, 1979 bp, Zea Mays
ctcctggaaaccgcgtgacataacccacccttctacaagtctatataagcgagcgagcccgcgaaacaccaccaggcagatcgtgttccagtgcagcaagcagagcagagcagagcagcgtcgtgcgtccgagaagaagacgactcacgagagcagaacgagcaccgatcgatggcagtgatggccggggcggcgtccatggaggtggagcaggacctcccgggcttccggttccatcccaccgaggaggagctcctcggcttctacctctcccgcgtggtccacggcaagcagctccacttcgacatcatcggcagcctcaacatctaccgctacgacccctgggaccttcctgcgatggcgaagattggcgagagggagtggtacttcttcgtgccgcgcgaccgcaaggccggcagcggcgggcggccgaaccgcacgacggagcgcgggttctggaaggccacggggtcggacagggccatccggagctccgccgacgccaagcgggtgatcgggctcaagaagacgctcgtcttctaccaggggcgcgccccgcgcggcaccaagacggactgggtcatgaacgagtaccgcctccccgaccactccgccgccggccgcgccgctccgccgctgcctcccaaggtaatccaacgatcgtccgctccgttgcatttctgcacatgatctgcccgccatcctagctagaactcaactggcagcaaaatcacatcagacactagctagtacgtatatatatattatatgttgctggtttgggatgtaattgccaaactagtgtgcggttttgagcttgttcggctgccattttcatccagctgcagctgcaaacaaacactgttcctacagcagcaagcggcaggcggctgcagcagctgccactgtagaaactagcagccgaacaagccgtttaacactaaccggggggaggcaaattgctgatcatcttcctgtccgtgatacctctctcgtctatatatggtggtcagttcgggtaacagtcagtgatgtagacccatggacgcacgacgagacatgaagaaataggcgtggttgacttaggagttgacttgtttttgattaatagattgcatggaaactccttccatgaagtcactagtcaccgagacgaaaatggctgacatacgcttgcgtgcttccgcaggaggacatggtgatctgcaagatctacaggaaggccacgccactgaaggagctcgagcagagggcctctgccatggaggagatgcagaggcgcatcggcggggccacagcaacatccctggtccaggccgccggctccaccggcgacgactacctgtcgtcggacgacacctacgacacaagtttcctgcagttcccgtcctcgtcatctcccgcgccgtcgggcgacagctacggcgcgcccgcggccgcgcccagggaggccaagacggaggccgcggacgccacgacggtcacggtggcgtcgacgtcgtcgtcgtcctccctgctgcatgccgcgagcgtggccggcccggcggtgaggcacggtgacctgcccaccctgcaggtgccaacgcacctcggagtcgccgactggacgcagatgcaggacccgtttcagctgcgcagcccgtggcaggaccagctcttcttctctcccttagcccacctgctatactgaagtctgaactctgaagtgaggaaggtgcacgcgcaacttggaagaagtggtgaactgtatcaccgaaatgcggttcagctctgcaacggcgagccgcgatgctagcttagatgtgaattcggttgtagatatactgcacgagcaagttggaagtagaagaagagttgagtactcgtatatgctctttttatttctgcgtgatgttggtacggggcctctgacatgaaagtcataataaactagtcaaggttcattttctaatctctaacctgtacgaatctctgattta

SEQ ID NO: 91532 - DNA, 1520 bp, Zea Mays
cccacccttctacaagtctatataagcgagcgagcccgcgaaacaccaccaggcagatcgtgttccagtgcagcaagcagagcagagcagagcagcgtcgtgcgtccgagaagaagacgactcacgagagcagaacgagcaccgatcgatggcagtgatggccggggcggcgtccatggaggtggagcaggacctcccgggcttccggttccatcccaccgaggaggagctcctcggcttctacctctcccgcgtggtccacggcaagcagctccacttcgacatcatcggcagcctcaacatctaccgctacgacccctgggaccttcctggtatgtcgtcgtcgtcgatacgaccgccatgcaccatatcatccgggcaaacaacagcctgcgcgcgcgtgtgttcttgtcgctgatcggtcgagacgcacggtttcgcagcgatggcgaagattggcgagagggagtggtacttcttcgtgccgcgcgaccgcaaggccggcagcggcgggcggccgaaccgcacgacggagcgcgggttctggaaggccacggggtcggacagggccatccggagctccgccgacgccaagcgggtgatcgggctcaagaagacgctcgtcttctaccaggggcgcgccccgcgcggcaccaagacggactgggtcatgaacgagtaccgcctccccgaccactccgccgccggccgcgccgctccgccgctgcctcccaaggtaatccaacgatcgtccgctccgttgcatttctgcacatgatctgcccgccatcctagctagaactcaactggcagcaaaatcacatcagacactagctagtacgtatatatatattatatgttgctggtttgggatgtaattgccaaactagtgtgcggttttgagcttgttcggctgccattttcatccagctgcagctgcaaacaaacactgttcctacagcagcaagcggcaggcggctgcagcagctgccactgtagaaactagcagccgaacaagccgtttaacactaaccggggggaggcaaattgctgatcatcttcctgtccgtgatacctctctcgtctatatatggtggtcagttcgggtaacagtcagtgatgtagacccatggacgcacgacgagacatgaagaaataggcgtggttgacttaggagttgacttgtttttgattaatagattgcatggaaactccttccatgaagtcactagtcaccgagacgaaaatggctgacatacgcttgcgtgcttccgcaggaggacatggtgatctgcaagatctacaggaaggccacgccactgaaggagctcgagcagagggcctctgccatggaggagatgcagaggcgcatcggcggggccacagcaacatccctggtccaggccgccggctccaccggcgacgactacctgtcgtcggacgacacctacgacacaagtttcctgcagttcccgtcctcgtcatctcccgcgccgtcgggcgacagctacggcgcgccc

SEQ ID NO: 91533 - DNA, 2079 bp, Zea Mays
caaccggacacctaagcgtccaaagatgactagctccctcgtcatcttctaatgtcgttaatcacctcgtcatccacattgggtcgcgttgcgcttgatccgaaggagcacctgccacatctggccatctctcagtctcacacgcgctgccatggacggatccatgtggtgcgctgccaactacgtgcctctgacgccgctcagcttcctggagcgcgccgcggtcgtgtacggcgaccgcgcggccgtcgtttgcggcgataggcggttctcgtggcgcgagacgagggagcggtgcctcgccggggcagccgcgctcgctcgtctcggcgttggccgccgcgacgtggtcgcggtcatcgcctcgaacgtaccggcgatgtacgagctccatttcagcgtgccgatgaccggcgccgtcctgtgcacgctcaacacccgccacgacgcggccatggtgtccgtcctgctgaaacactcggaagccaaggtcttcctcgtggagtcgcagttccacgccgtggcccgcgacgcgctcaggctcctcgccgacgccaaagacaggcttcctctcgtcatcacggtctctgaccccagcagcagcagcagcaccggcgacggccgcggcagcaacgacggcagcgtcgcggtcgcggagtacgaagcgcttctgcggagcgcgccgcgcgacttcgaaatccggtggccggcagacgagcgcgacccgatatcgctgaactacacgtcgggcaccacgtcgaggcccaagggcgtcatctacagccaccgcggcgcgttcctcaacacgctggccacggtgctcgtcaacgagatggcgaccatgcccgtgtacctctggaccgtgcctatgttccactgcaacgggtggtgcatggtgtgggccaccgcggcgcagggcggcacgagcgtctgcatcggcagcgtgtcccccggggtggtcttcgaccacatcgtgcgccacggcgtcaccaacatgggcggcgcgcccacggtgctcagcatgctcgcgaacgcgccggcggcggatcggaagccgctgccgaggagggtccgcatctccacgggcggcgcgccgccgccgccgcaggtgctggccaagatggacgagctcggcttcgacgtcgcgcacgggtacgggctcaccgagacgtacggcccggcgacgacgtgcgtgtggaagcccgagtgggacgcgctgccgcccgcggagcgcgcccggatgaaggcgctgcagggcgtcgctcacgccatggtccaggaggtcgccatcaaggacccggcgagcatggagacgttgccctccgacgggcgcgccgtgggcgaggtgatgctccgggggaacacggtcatgggcgggtactacaaggacgcgggggccacggaggaggccatgcgcggcgggtggctgcgcacgggcgacctcggcgtgcgccacccgaacgggtacatccagctcaaggaccggtccaaggacatcatcatctcgggcggcgagaacatcagctccatcgaggtggagtcggtgctgttcgggcaccccgcggtgctcgacgccgcggtggtcgcgcggcccgacgaccactggggcgaggcgccgtgcgcgttcgtcacgctcagggacggcgcgagagccaccgcggacgacatcatccgcttctgccgggctcggctgccgcactacatggcgcccaggacggtggtgttcagcgacctccccaagacttcgaccggcaagacgcagaagtatctgctccgggagaaggcgagggccatgggaggcctgcgcaagccagatcgaagcaggctctagttgacctgttgctgggaacagtccactggctgcattcctggcagcctgctgatagttttatcttggtcaactacgcttagccatcatcgatcaaggggcagcattcagtcatgccctcgtgctttcacagccaccacgttgcacatggacctgtacggtgaaatagtattgcaggacttggccattcatggaatgctttattggatcatcccaattctaataaatacgtattcactcacagatgcaaa

SEQ ID NO: 91534 - DNA, 2430 bp, Zea Mays
atgagagccgccgcggcctctgcaatccgcaggctactcccccgctacagcatcagcagcggcggcgggttgcaccggcactcccaatcgcagaatcagtccggctactgctttaatccacattgggattacactaatcgcctcgcgcgacctcgtgcgctgcttgatttctcgccatgccacccgcgctggtcgtcgccttcttcccctcgttccgtggcgtctccgcaattcttctgcagcctctcgggaacagaggaggaggaagcggtggtgctggacatggacgccggcacggtgcggtgcgcggccaaccacgcgccactgtcccccatcagcttcatcgagcgcgccgccgccgtctacggggcccgccccgcggtggtgtacggggaccggcgccacacgtgggcggagacgcggggacgctgcctccgcgtggcggccgcgctcgccacacgcttcggcatcgcgcgcggtgatgtgcacgtcgtatggccagagatggcaatagatgttcacgttccaatacaatacccggcatgggtgatccgaccgatcactttgaccggtatgggtcaatggagatgggtgatcagatgcatggcaggatgggtatgggtacaagatccgatggtgatttacctattggcatctgtacttgtgggctctgaaggctataactccgatgggcctaaatatgtcgggacgtttgagaaaatttttagctatgggctcaacccagccaaatggcgcagagttttcttttatttaaacaaaaaatggccaaaactcaccaagtcaccatcgaatgaccatgatcgatctgaccatattcaggtcgctgtcctcagccccaacgtgccggcgatgtacgagctgcacttcgccgtgcccatggctggcgcggtgctctgcacattgaacacgaggcatgacgcggccatggtgtccgtcctgctgaagcactccggcgctaaggtgttcctcgtcgagtcgaacctcctcgacgtcgggagagccgcgatgaagcgcctcgccgagtccaactccgccgccgctcttccggtcctgctcaccatctcagacgacaccgactccgacgactacgaggatctcgtcaggaacggccccgcccggttcgacatccggtggccggcggacgagctggacccgatcgcgctcaactacacgtccggcacgacgtcgcggcccaagggcgtggtgtacagccaccgcggcgcgtacctcaacaccatcgcgacggtgctcgcgtacgacatcaccgccatgccgacgtacctgtggactgtgcccatgttccactgcaacggctggaacctgccgtggggcgtcgccatgcagggcggcaccaacgtgtgcctccgccacttcaccggcgaggtcatcttcgacagcatcacgcggcacggcgtgacgcacatgggcggcgcgcccacggtgctgaacatgatggccaacgcgcgtaccgcgaccgcggagcggaagccgctgccatggcccgtgcgcgtcatgacggggggcgcgccgccgccgccgcgcgtcctgttcgcggtggaggagctcggcttcgtggtgtaccagatctacggcctcacggagacgtacggcccggcgaccgtgtgcacgtggatgcccgagtgggacgcgctgccggcggaggagcgcgcgcggctcaaggcccgccaggggttccaccacgtcgcgatgcaggacgtggacgtcatgaacccgagcaccatggagagcgtgccgcacgacggccagacggtgggcgaggtgatgttccggggaaacaccgtgatgagcggctactacaaggacctcaaggcgaccaaggaatccatggccggcgggtggctgcacaccggggacctcgccgtgcggcatcccgacgggtacatccagatcaaggacagggccaaggacatcatcatctcgggcggcgagaacatcagctccatcgaggtggagtctgtgatcttcagccacccagccgtcctcgaggcggcggtcgtggcgaggccagaccaccactggggcgagacgccgtgcgcgttcgtcaagctcaaggacggcgccagcgccacggaagcggagatcataaacttttgccgggagaagctgccccactacatggcgcctaagacggtggtgttcgaggatttgcccaagacttcgacggggaagacgcagaagtttgttctccgtgacaaggctcgcgccatgggcagcctcacaaaggttgcctgtagcagcaaaatgtaacatcgtttgcctggttggaagtggaacattactatgatcgattcaactatacactattctctttggacatctggatctcgtcctatgatgttttgctctgctggtggctaaacaggcaagcacttctttcgactcgaagca

SEQ ID NO: 91535 - DNA, 2076 bp, Zea Mays
atgagagccgccgcggcctctgcaatccgcaggctactcccccgctacagcatcagcagcggcggcgggttgcaccggcactcccaatcgcagaatcagtccggctactgctttaatccacattgggattacactaatcgcctcgcgcgacctcgtgcgctgcttgatttctcgccatgccacccgcgctggtcgtcgccttcttcccctcgttccgtggcgtctccgcaattcttctgcagcctctcgggaacagaggaggaggaagcggtggtgctggacatggacgccggcacggtgcggtgcgcggccaaccacgcgccactgtcccccatcagcttcatcgagcgcgccgccgccgtctacggggcccgccccgcggtggtgtacggggaccggcgccacacgtgggcggagacgcggggacgctgcctccgcgtggcggccgcgctcgccacacgcttcggcatcgcgcgcggtgatgtggtcgctgtcctcagccccaacgtgccggcgatgtacgagctgcacttcgccgtgcccatggctggcgcggtgctctgcacattgaacacgaggcatgacgcggccatggtgtccgtcctgctgaagcactccggcgctaaggtgttcctcgtcgagtcgaacctcctcgacgtcgggagagccgcgatgaagcgcctcgccgagtccaactccgccgccgctcttccggtcctgctcaccatctcagacgacaccgactccgacgactacgaggatctcgtcaggaacggccccgcccggttcgacatccggtggccggcggacgagctggacccgatcgcgctcaactacacgtccggcacgacgtcgcggcccaagggcgtggtgtacagccaccgcggcgcgtacctcaacaccatcgcgacggtgctcgcgtacgacatcaccgccatgccgacgtacctgtggactgtgcccatgttccactgcaacggctggaacctgccgtggggcgtcgccatgcagggcggcaccaacgtgtgcctccgccacttcaccggcgaggtcatcttcgacagcatcacgcggcacggcgtgacgcacatgggcggcgcgcccacggtgctgaacatgatggccaacgcgcgtaccgcgaccgcggagcggaagccgctgccatggcccgtgcgcgtcatgacggggggcgcgccgccgccgccgcgcgtcctgttcgcggtggaggagctcggcttcgtggtgtaccagatctacggcctcacggagacgtacggcccggcgaccgtgtgcacgtggatgcccgagtgggacgcgctgccggcggaggagcgcgcgcggctcaaggcccgccaggggttccaccacgtcgcgatgcaggacgtggacgtcatgaacccgagcaccatggagagcgtgccgcacgacggccagacggtgggcgaggtgatgttccggggaaacaccgtgatgagcggctactacaaggacctcaaggcgaccaaggaatccatggccggcgggtggctgcacaccggggacctcgccgtgcggcatcccgacgggtacatccagatcaaggacagggccaaggacatcatcatctcgggcggcgagaacatcagctccatcgaggtggagtctgtgatcttcagccacccagccgtcctcgaggcggcggtcgtggcgaggccagaccaccactggggcgagacgccgtgcgcgttcgtcaagctcaaggacggcgccagcgccacggaagcggagatcataaacttttgccgggagaagctgccccactacatggcgcctaagacggtggtgttcgaggatttgcccaagacttcgacggggaagacgcagaagtttgttctccgtgacaaggctcgcgccatgggcagcctcacaaaggttgcctgtagcagcaaaatgtaacatcgtttgcctggttggaagtggaacattactatgatcgattcaactatacactattctctttggacatctggatctcgtcctatgatgttttgctctgctggtggctaaacaggcaagcacttctttcgactcgaagca

SEQ ID NO: 91536 - DNA, 1179 bp, Zea Mays
aaggaacctatgtatgcttgctttgcagtatcgcattactattttccctttagtttttcggaaatcttaaataaacttaatcctcggttgactagattcacatctgtatcctataattatgacctgattgctctatttctaaatattttcatgcgagttctttttttcatagttaaaaggaactaggtagcatttcattagaaataggcacccaaattcgcctggatggtctgggtatacatccacacccttgaccaactgagctagctcagctacctttttttcgtagttaaattctgtaagattccaaagttatcttagggaaagccgtaaaagaacagaagttcaccatcttatgagtcagacctttgatgcagggtgttacacttggaggtacaggcaaggaacatggagataggcaccccaagattggtcagggagctctaattggagccagtgctactatcctcggcaatattaatgtaggcgaaggtgccatgattgctgctggctcccttgttttaaaggacgtacctccccacagtatggctgtaggtaatcctgcaaaggtagttggttatacagagaaagaagatccttctttaactatgaaacatgatgcaaggagagattattttgagcatgctgccatcagattgagatgattgatacacctaatgacgagtcttctttctattcgtctgtggaatactgtggagtaaaaaaagttccaaatcgccttattggcaagaagttttgtggagttaaaaaaaggtttcgtcgtcttactcgcaggaaaccttgtgaagttaaaaaaaaaatgtttgacgaaacgcatacggatgccattccggacatttcgtcacaggcacaaggctggatagtcgatgagctctgtgtttccctttctgcccagacaaccaaatgaagatggaaaagggtcacccagggctccaaaatctagagtgtagacaagcatgtccttaatgcgccttaaattggtctggatggcacttttttgtgataaactatctatctaaaccattgactaatgtctactctactctcaacaagatcaattaattgtatatttgatattaaagttggaatgtttagtatgacaaatttaatattttaaaatagatatgcatgaaatttgatcttgatctttttctatta

SEQ ID NO: 91537 - DNA, 1795 bp, Zea Mays
ccgaacacgcatccccgtacggcgtctccccgcactcagtggccgtctcgggctcccgtcgattcactttgctcccaaccgctcttttttctactccactgtgtgcgcctttgcctctttgcgctctcacctgcccgcccgtcccgcctgcctcgccgcaagcgccaagcgcacgcgctcggctcgccgcgtcgggtcgccgcagggcgaacgaaaccctaggatcagggaggctccgggcatcgctgctcgacccccatgacgtcctgcgggtgtctgatgctcgagaaggtggagggcgacgcgtcggcgaagacgagggtgaaggccgcgccgggcgccggtgccggcgcctggtgcggctcgtgcgctggggactggcggggccggtcagaggccatcttccccatctacgtgatggggagctcgcgggagagcaccgtggcggcggcgcgcggcatagtcgactcccccgaggaccccatatgggttgccgtcaaggcggaggccaagtctgaggcagaaaaggaacctattttgagtagcttcttgtatgccagtgtgctgtctcatgattgcctagagcgtgcattgagcttcgtccttgcaaataggcttgaagatccaacattgcttgctactcagctaatcgatatttttaacgatgtcatgctgaataacaaagatatatgccgctccattcgccttgatgctcaggctttcaaagatagagatccagcttgtgcccaatatagttgggcactgttatacttaaagggctaccaatcgttgcaatcatacaggatagccaatatattatggaaccagggacgcaaagttttggcattggcactgcaaagccgtattagtgaggtctttgctgtggatatacatccagctgccaaaattggcgagggaatattgttggatcatggaacaggtctagtcattggtgaaactgctgtagttggaaactgggtttcattaatgcagggtgttacacttggaggtacaggcaaggaacatggagataggcaccccaagattggtcagggagctctaattggagccagtgctactatcctcggcaatattaatgtaggcgaaggtgccatgattgctgctggctcccttgttttaaaggacgtacctccccacagtatggctgtaggtaatcctgcaaaggtagttggttatacagagaaagaagatccttctttaactatgaaacatgatgcaaggagagattattttgagcatgctgccatcagattgagatgattgatacacctaatgacgagtcttctttctattcgtctgtggaatactgtggagtaaaaaaagttccaaatcgccttattggcaagaagttttgtggagttaaaaaaaggtttcgtcgtcttactcgcaggaaaccttgtgaagttaaaaaaaaaatgtttgacgaaacgcatacggatgccattccggacatttcgtcacaggcacaaggctggatagtcgatgagctctgtgtttccctttctgcccagacaaccaaatgaagatggaaaagggtcacccagggctccaaaatctagagtgtagacaagcatgtccttaatgcgccttaaattggtctggatggcacttttttgtgataaactatctatctaaaccattgactaatgtctactctactctcaacaagatcaattaattgtatatttgatattaaagttggaatgtttagtatgacaaatttaatattttaaaatagatatgcatgaaatttgatcttgatctttttctatta

SEQ ID NO: 91538 - DNA, 1856 bp, Zea Mays
ccgaacacgcatccccgtacggcgtctccccgcactcagtggccgtctcgggctcccgtcgattcactttgctcccaaccgctcttttttctactccactgtgtgcgcctttgcctctttgcgctctcacctgcccgcccgtcccgcctgcctcgccgcaagcgccaagcgcacgcgctcggctcgccgcgtcgggtcgccgcagggcgaacgaaaccctaggatcagggaggctccgggcatcgctgctcgacccccatgacgtcctgcgggtgtctgatgctcgagaaggtggagggcgacgcgtcggcgaagacgagggtgaaggccgcgccgggcgccggtgccggcgcctggtgcggctcgtgcgctggggactggcggggccggtcagaggccatcttccccatctacgtgatggggagctcgcgggagagcaccgtggcggcggcgcgcggcatagtcgactcccccgaggaccccatatgggttgccgtcaaggcggaggccaagtctgaggcagaaaaggaacctattttgagtagcttcttgtatgccagtgtgctgtctcatgattgcctagagcgtgcattgagcttcgtccttgcaaataggcttgaagatccaacattgcttgctactcagctaatcgatatttttaacgatgtcatgctgaataacaaagatatatgccgctccattcgccttgatgctcaggctttcaaagatagagatccagcttgtgcccaatatagttgggcactgttatacttaaagggctaccaatcgttgcaatcatacaggatagccaatatattatggaaccagggacgcaaagttttggcattggcactgcaaagccgtattagtgaggtctttgctgtggatatacatccagctgccaaaattggcgagggaatattgttggatcatggaacaggtctagtcattggtgaaactgctgtagttggaaactgggtttcattaatgcagggtgttacacttggaggtacaggcaaggaacatggagataggcaccccaagattggtcagggagctctaattggagccagtgctactatcctcggcaatattaatgtaggcgaaggtgccatgattgctgctggctcccttgttttaaaggacgtacctccccacagtatggctgtaggtaatcctgcaaaggtagttggttatacagagaaagaagatccttctttaactatgaaacatgatgcaaggagagattattttgagcatgctgccatcagattgagatgattgatacacctaatgacgagtcttctttctattcgtctgtggtgagcttatcattttagtcctagaacagtccatgaatggttggtgcatgaatgtcgaaggttgctgctgccctgaatgaactttttttttttgcaggaatactgtggagtaaaaaaagttccaaatcgccttattggcaagaagttttgtggagttaaaaaaaggtttcgtcgtcttactcgcaggaaaccttgtgaagttaaaaaaaaaatgtttgacgaaacgcatacggatgccattccggacatttcgtcacaggcacaaggctggatagtcgatgagctctgtgtttccctttctgcccagacaaccaaatgaagatggaaaagggtcacccagggctccaaaatctagagtgtagacaagcatgtccttaatgcgccttaaattggtctggatggcacttttttgtgataaactatctatctaaaccattgactaatgtctactctactctcaacaagatcaattaattgtatatttgatattaaagttggaatgtttagtatgacaaatttaatattttaaaatag

SEQ ID NO: 91539 - DNA, 2021 bp, Zea Mays
tgcgagcaccgtgcgcgcgaatcttccctgccggaaactcctataaatacggcccaccccgagctgcagctcataccacagcacaaacgcaacgcgacgcaccaagctctgagagtcgcaatggagagatcagctgagagctggtgggtgcttcccatgaccttgataccggccatctccggcgagcaacacggtaacatggcaaccgtagccactagcttcgcctacctcgccatcttcgcatgcctcgcatgggtgggcgcgtccctgctctactgggctcacccaggcggccctgcgtggggcaagtactggagggcgagggggaagaagccgtcggcggcgatcccggggcctaaggggctcccggtggtcggcagcctcggcctcatgtccgggctggcgcaccgctcgctggccgacgaggcgtcgcgccgcccgggggccaagcggctcatggcgctgtcgctcggccccgtccgcgcggtcgtcacgtcccacccggacgtggccaaggagatccttgatagcccggcgttcgccgcccgccccctgaaccacgccgcgtacggcctcatgttccaccgctccatcggcttcgccgagcacggcccgtactggcgcgcgctccggcgcgtcgccgcgggccacctgttcggcccgaggcaggtcgaagccttcgcgccgtaccgcgcggccgtcgccgagggcatcgtcgcggccctgctgcgcgccggctccggcggcgccgtcgtccaggtgcgcggcctcctgcggcgggcgtcgctctactacatcatgcggttcgtgttcggcaaggagtacgacgtgtcacgcgtggtgccgccgtccggcggggaggaggtggaggagctgctcgagatggtgcacgaggggtacgagctcctgggcatggagaacctgtgcgactacttcccggggctcgccgccctcgacccgcagggcgtgggcgcacgatgcgccgagctcatgccgcgggtgaaccggttcgtgcacggcgtcatccaggagcaccgtgccaaggcggtcgccggtggagacgcgcgtgacttcgtcgacatcttgctctccctgcaggagagtgaggggctcgccgacgccgacatagcctctgtgctctgggagatgatcttcagaggaacggacgccatggcggtgctcatggagtggaccctagctcgcctcgtcctccaccgcgacgtccaagccaaggcgcaccgtgagctcgacaaggtcgtcggcgcggacagccagaccaccgagtccgcggcgccgtacctgcaggcgttgctaaaggaggctctccggatgcacccgccggggcccctcctgtcgtggcgccacagggccatatccgacacgtacgtcgacggccacctcgtcccggcgggcaccacggccatggtgaaccagtgggccatcagccgcgaccccgaggtgtgggacgcgccgctcgagttccggcccgagcggttcctccccggcggcgagggccaggacgtgtccgtgctcggcgccgacggccgcctcgtgccgttcgggtccggcaggaggagctgccccggaaagtccctggccatgaccaccgtgacctcctggatggccacgctgctgcacgagttcgagtggctgccagcgtcagacgacacaggcgacgtcgacctctcggaggtgctccgtctgtcctgcgagatggcagtgccgctggaggtccgcgtgcgcccgaggagcagcgtgtgaatgaagtgctgcctgccgatagccatgacacacccccattgtgcaatgtgtagcagtgagcctaagcgttctgttagtgaactgtgaataagcagctggtgaggactgtgcacaccagctcagctcagcctttggttcagggtttcaacttgcccgtgtatatcgtatatttagtgtgaccgtgagtattaagttatccgcaaaaggtgtacaaatcacaaaagctatcgaatgaagattgtgtgaagtggtgtcatata

SEQ ID NO: 91540 - DNA, 1331 bp, Zea Mays
cacgcccaagcaatccaatggcagcagcacacaaccacactcgcattgcattgcattccttcagttcagtagtgtgctctgacagtgagatggcgagcgtgaaggttttcgggtcacccacctcggcggaggtcgcccgcgtgctcatgtgcctcttcgagaaggaggtggagttccagctgatccgcgtcgacgcctaccgcggcaccaagcgcatgccccagtacctcaagctgcagccgcaaggcgaggcgctcaccttcgaggacgagagcctcaccctctccgactccagggggatcctccgccacatctcccacaagtacgcgaagcagggcaacccgtacctgattggcacgggcgcgctggagcgggcgtccatcgagcagtggctgcagacggaggcgcagagcttcgacgcgcccagcgccgagatggtctacagcctcgccttcctgccgcccaccctgcccaagcagaacgacaacggcaacggcggcgcgttcaacgccagggacgccaccgtaggcagcaacgccgacgcgtccagcggcaagcgcggtgtggccgggtcacagccggcggcgagccagaccaaggtgagcgcgcagaaggaggaggagatgctgaagctgttcgagcagaggaagaaggacctggagaagctgctggacatctacgagcagcgcctggaggaggccacgttcctggccggcgacaacttcaccatcgccgacctgtcgcacctgccctacgcggaccacctcgtctccgacccgcgctcccgccgcatgttcgagtcccgcaagaacgtcagcaggtggtggcacgacgtctccggccgcgacacctggaagtacgtcaagaccctgcagcgcccgccgtccacgtccaccgacgccagcgccaagaacggccagctgggccagcagcagcacctgccgtcgtccaccgacggccacggcgtgaagacccaacggctggtccagaacgagcggcacttctagctgttgccgtcccttcccgccgacgaataaactacctgcgccgccgccaccgccgccatccatcaacatggttccttgtgctgttcgtgtcgttttcatacgtcatacgtgtcttgctgcttttgaagctccgttcccgggtgcagggacctacgagtccattccgtcgtttgctgattctgttcgtcgtgtaataaaatgaaaaccccaccccgttttgaatgaaattcaattctcagtgtcgtgtgaaatatactcgattgtaagatttttgatcttgctcttgtcaaaataacgtccacatgatcggaagtcttgcatagc

SEQ ID NO: 91541 - DNA, 1201 bp, Zea Mays
cacgcccaagcaatccaatggcagcagcacacaaccacactcgcattgcattgcattccttcagttcagtagtgtgctctgacagtgagatggcgagcgtgaaggttttcgggtcacccacctcggcggaggtcgcccgcgtgctcatgtgcctcttcgagaaggaggtggagttccagctgatccgcgtcgacgcctaccgcggcaccaagcgcatgccccagtacctcaagctgcagccgcaaggcgaggcgctcaccttcgaggacgagagcctcaccctctccgactccagggggatcctccgccacatctcccacaagtacgcgaagcagggcaacccgtacctgattggcacgggcgcgctggagcgggcgtccatcgagcagtggctgcagacggaggcgcagagcttcgacgcgcccagcgccgagatggtctacagcctcgccttcctgccgcccaccctgcccaagcagaacgacaacggcaacggcggcgcgttcaacgccagggacgccaccgtaggcagcaacgccgacgcgtccagcggcaagcgcggtgtggccgggtcacagccggcggcgagccagaccaaggtgagcgcgcagaaggaggaggagatgctgaagctgttcgagcagaggaagaaggacctggagaagctgctggacatctacgagcagcgcctggaggaggccacgttcctggccggcgacaacttcaccatcgccgacctgtcgcacctgccctacgcggaccacctcgtctccgacccgcgctcccgccgcatgttcgagtcccgcaagaacgtcagcaggtggtggcacgacgtctccggccgcgacacctggaagtacgtcaagaccctgcagcgcccgccgtccacgtccaccgacgccagcgccaagaacggccagctgggccagcagcagcacctgccgtcgtccaccgacggccacggcgtgaagacccaacggctggtccagaacgagcggcacttctagctgttgccgtcccttcccgccgacgaataaactacctgcgccgccgccaccgccgccatccatcaacatggttccttgtgctgttcgtgtcgttttcatacgtcatacgtgtcttgctgcttttgaagctccgttcccgggtgcagggacctacgagtccattccgtcgtttgctgattctgttcgtcgtgtaa

SEQ ID NO: 91542 - DNA, 1503 bp, Zea Mays
cgtccccgcgcgatctttctaattttcttcgccctggagacagagagcgtgcgcgcatgcatgcatggttgctcgatccaagcaagaaccctgacgctctttaatttgcctttgataagatgaggggcggatcggggagctttcgctttccgctgccgtgctgtaatcctcggcggcaaggcaagcatattacccacctgcataaataggcgccgatggaccgccgtctcgtcttcatcgaggcacaccgcatcagtgtctggctcacctcacctgcagcaggcctcgtctcggtcatccagcgcattgctctcaatcgctgcagcgcatccagtccaaacacacaccggtcgaatcgagcaatggccgcggggctgcaggtgttcggacagccggcttccaccgacgtcgccagggtgctgacctgcctcttcgagaagaacctcgagttcgagctcgtccgcaccgacaccttcaagaagtcgcacaagctccccgagttcatcaagctgagggatcctaccgggcaggtgactttcaagcacggtgacaagacaatcgttgattccaggactatctgccggtacctgtgcacgcagttcccggacgacgggtacaagaagctgtacggcacggggtcgctggagcgggcgtccatagagcagtggctgcaggcggaggcgcagagcttcgacgcgccgagctcggagctggcgttccagctggcgttcgcgccgcacctcaaggacgtgcggcccgacgaggcccgcgtcgcggagaacgagaagaagctgcacagcatgctgggcgtctacgacgacatcctctccaagaacgagtacctcgccggcgacgacttcacactggccgacctctcccacctgccaaactcccactacatcgtcaactcctccgacaggggcaggaagctcttcaccgccaggaagcacgtggccaggtggtacgacaagatctccacccgcgactcctggaggcaggtcatgaagatgcagagggagcaccccggcgcgttcgagtgatgcgtcgtgcttccttctctctgcatgcatgcgcgcgtcgcggcgtgttcctcgtcgtcgccggcttcgtggtcgtcaggcttcacaccgtggtgtgtggttgtcgagttcgtcgtatttcgtatcgtatcgtatcgtatcgtacgtacgtcctgtgggctaaaataacgtggagcctgcgcctgcctacggtgtctctcgtgtcttcctttcgctgcatatataagcagtgtctttttctgggtattgtatggtgacctaatcatcaactccttttgcaatattggccaattcaataaaaatatgtccgggcattttgctcgttcgcactatttctcaagaccacacaccacacacgacgtctagcttctattctatgtatacttttgatttggggagcgtggttttaaccacgccgtgacctgtgtatgtttatatctcttattcaaaatctggttgcatt

SEQ ID NO: 91543 - DNA, 1026 bp, Zea Mays
agacatgttggcatcacccctcgttgtcatctcatatcctgagccagagatcaaagaaaccagagggagcgaggcatggcagcaggcttgcaggtgtttggccagccggcgtctactgatgtctccagggttctgacatgcctgtttgagaagaaactggagttcgatcttgtccgcatcgatacattcaagacgcatcacaagcttcccgagttcatcaggcttcgggatcctaatgggcaagtgaccttgaagcacggcgacaaaactctcgttgattcgagggacatctgccggtacgtctgcacccagtttccaaacgatggaaacaagagcctttacggatccggcgctctagaacgggcgtcgatagaacagtggcttcaggcggaggctcagaacttcgggccccccagctccgcgctcgtcttccagctggcgttcgtccctcacctcactcacctgggcgttcgtcaggaccctgccgtgatcgccgagaacgaggataagctgaagcaggtccttgatgtctacgacgagatactctcgaggaacgagtacctggctggcgacgagttcaccctggccgacctctcccacctcccgaactcgcactacatcgtgaacaccgagagaggaaggaagctcttcactaacaagaagaacgtggccaagtggtacgagaagctctcgaagcgcgagacgtggaagcaggtcgctaagatgcagaaggaacatcctggtgcgttcgagtgattgcttgtcttggggggagctgcgagtgcaccatcatgaatggcttcatcgtctgtgtcggtctggctctacagttcattttgtttttgagtgatccattgtttaatttctcctatcagtgttgtcgtgtgaaccaaaaataatgtgaagcccagctgtgatgtatatgatccttttgctcaatctatcatgacgtataagctcgatctctgaccttgtacgcacagtattttttttactgatgatttcgatcgagacatacagtagaaa

SEQ ID NO: 91544 - DNA, 1307 bp, Zea Mays
acagtgaaccaaacaaaagcctcgagccagtgtggtgtggggtcgcgtgctctcttctatcctgctctgctagtgccaggattccgccctatccatcccatcaacctcagctaaggtccccagcggcggcgaggcgatggcggcgcctgtgacggtgtacggaccgatgctctcaccagctgtggcccgcgtggcggcctgcctcctggagaaggacgtgccgttccagatcgagccggtggacatgtccaagggcgagcacaagtcgccgtccttcctcaagctccagcccttcggacaggtccctgccttcaaggaccacctcacaaccgtctttgagtcaagggctatttgccgttacatatgcgaccagtatgcggactctggtaatcaggccctcttcggcaagaaagaagacggcgcggttggccgcgctgccattgaacagtggatagagtctgaaggccagagctttaacccaccgagcttggctattatcttccagctcgcatttgcaccgatgatgggccggaccactgacctggctgtggttgagcagaatgaagcgaagcttgcgaaggtgcttgatgtgtatgaccaacggctgggggagagccagtattttgctggtgatgatttctccctggccgaccttgtgcacttgcccaatgcagatttccttgtgaacagaaccagcaaggctggcttgatcaccgagagaaagaatcttgctagatggtgggatgatgtctcgtcccgacctgcatggaaaaaggtcactgagatgcagagcacgccgaggccctcttagagcttttttttgggtttctttgagcagcttctgatggcaattagttgcattctccttgttttgtcatcaagtccttgtctgtaccgtttcctgttctcttatttatcggtcttaattcttgatctatgtatggtttggatctgttcttctggtcctttagtttatataagtacctacaattcttcatatggtttgccatccagataagtagcctgattccgttgcaaatgcaccgatcaaaagcttggttcagaatgcttatgaatgtaatctacctcatctctcgaaagtgcaactacttgatcaacatattctatatctattgattaccctaaatatggagtgggttattttagttacttgtttacgttgcactggtgagataaaaccgtaaaattatgatgactggagcaacttcatgaacaaaggactgtatagttggttattgggcaatggctctggagcggtgcattagatatttttaaaagaatttact

SEQ ID NO: 91545 - DNA, 1546 bp, Zea Mays
agcctcgagccagtgtggtgtggggtcgcgtgctctcttctatcctgctctgctagtgccaggattccgccctatccatcccatcaacctcagctaaggtccccagcggcggcgaggcgatggcggcgcctgtgacggtgtacggaccgatgctctcaccagctgtggcccgcgtggcggcctgcctcctggagaaggacgtgccgttccagatcgagccggtggacatgtccaagggcgagcacaagtcgccgtccttcctcaagctccagcccttcggacaggtccctgccttcaaggaccacctcacaaccgtctttggtacctccacctctcagttcttctactactattgttacatatcaagtaatatcttttgggttttaagcattagtattgcaagagcacatgcaaatctcactttttttttcacttctaagcttctttcgtcagcaaagatgcaataagaatacagatctgcagttacgtgttcaagcagaaatgcatacttttgcaaaagggcaaattgctgaagcattaggatatattctaggagttaccagtgcatatgcatgcctagccggtaaaagaaaacctaagagatcttactatcttagacggccaatctctttactgtgtgtatggtgttcatctttgacagagtcaagggctatttgccgttacatatgcgaccagtatgcggactctggtaatcaggccctcttcggcaagaaagaagacggcgcggttggccgcgctgccattgaacagtggatagagtctgaaggccagagctttaacccaccgagcttggctattatcttccagctcgcatttgcaccgatgatgggccggaccactgacctggctgtggttgagcagaatgaagcgaagcttgcgaaggtgcttgatgtgtatgaccaacggctgggggagagccagtattttgctggtgatgatttctccctggccgaccttgtgcacttgcccaatgcagatttccttgtgaacagaaccagcaaggctggcttgatcaccgagagaaagaatcttgctagatggtgggatgatgtctcgtcccgacctgcatggaaaaaggtcactgagatgcagagcacgccgaggccctcttagagcttttttttgggtttctttgagcagcttctgatggcaattagttgcattctccttgttttgtcatcaagtccttgtctgtaccgtttcctgttctcttatttatcggtcttaattcttgatctatgtatggtttggatctgttcttctggtcctttagtttatataagtacctacaattcttcatatggtttgccatccagataagtagcctgattccgttgcaaatgcaccgatcaaaagcttggttcagaatgcttatgaatgtaatctacctcatctctcgaaagtgcaactacttgatcaacatattctatatctattgattaccctaaatatggagtgggttattttagttacttgtttacgttgcactggtgagataaaaccgtaaaattatgatgactggagc

SEQ ID NO: 91546 - DNA, 2151 bp, Zea Mays
cccaggcatgaacggtcggttaaaccggccaatcctcctctcaagcctcgacgcagcacggcgcgccggcgcgggacgacggcatgacgccgccgtccatcttccaccaccatcgctgcctcgtctccctcccctccgcttccccgacctggacctcgtcccgtcgtctcatccatcaactcgcaaaacccacagtcctgtccctacatctgcgtccagtcttatcctcttccttcgcggttgccgccgtcggcgacgacgaggatgtcgtagtcggggattgcctcgtgttcgacgacgacgctttcgaggaaccggacctggacctcccctcgtccccgtggccgtcggctagcgcctcacgccacggccggaggtcggaggcaggcgagagcgacagcctggtgccggagaggtggaggcatgccgaggaggagatcaacctgacgaagaaggataagcgccgcatcgcgcacgggctgcggttcgggagccgcctcgagcggcgggcgcccccagctgttgctgctcctgatgaattccgcgcgtaccgcaaggggatgctgagcgctgagcgtgagcatgtttctcatgtataccgggggccgctggagaggactcctccgccggaagtgaaggaacatccaccgccggagccggagcctgggacgcgtgtggccccgaggaatccgaggatggggatgggcgttggcacccttgacgacattgatgagtttttcagaagtagggaatatgttcaggatgagatggaggacagcaagagtcctaagggccgtcagaagttgttctcaaatgaggagaagattcttctgaacaagcgagtgcctgatctggaaacagctacttctagtaaatggcttccacttcacacccttgctgcatctggtgatttctatctattgaatagccttttaaaacataacgtggacataaatgcgcttgataaggatggcttaccagcgatccacaaagcaattctttcaaagaaggctgctattatcaattatcttttaaggaactcagcaaatccattcatccaagataaagatggtgcgactctaatgcattatgcggtccaaacagcatgtagtcagaccataaagacacttttactgtacaatgttgacatcaaccgtccagatgattatggatggacacctttgcatcttgcggtacaaacacagaggactgacattgtgaagctgcttttaataaagggcgctgatagaactattagaacccaagatggattgaccccgttggagttgtgcctccggttgggtcatgatgtgcggacgtatgagcttatcaaactacttaaaagtttccgaggacaaaagcagcatgatttagtttagcaactggagggtgtgtgaccctctttgaaccagtgaggttaaccagtgtggtggccttctgggaggccagttttcaatgtaccattcatgattcatggaatcgctcctggtttgagataggaaatagtttacccctagaactggaagcaaacgagcaaaccaggttacagtcgagccatgagaacgggatgaataaacctttctgtaggttggcgctcttcaattattagaggtgaggcgaggcatatgctattcgattattagaatggctctctcttgtccttttggcccattgaattcgtgtttgtgagagccattgatcctggcccacttcacgtggctgggctacgaatctgaactaaatttctggcccgccaacatgtaatgggtcaggattgcaccatcccaaacaggctgttcggtgagcgttcctcgcccattagaaccagagttgtacttatcttctttccatataatttgttgtgatgcattgggaaacttttcatgcactatttttttttgggttcggcattattattttttgcttctgttttggcattatcggtatttcatagattggtagctgactttggcacttttggaaacagggctcgtcaaaaaccgacctttatatgctatgaattcttgttccactaacctatcagctgctgacaattcagctcagatatgttgggaaacgttgatcatgaactaacaagaacgaggattctatgcactcttgtatgcccgatgcaacttcttttgaaatcag

SEQ ID NO: 91547 - DNA, 1606 bp, Zea Mays
gaatatccgggcatccggcccaggcatgaacggtcggttaaaccggccaatcctcctctcaagcctcgacgcagcacggcgcgccggcgcgggacgacggcatgacgccgccgtccatcttccaccaccatcgctgcctcgtctccctcccctccgcttccccgacctggacctcgtcccgtcgtctcatccatcaactcgcaaaacccacagtcctgtccctacatctgcgtccagtcttatcctcttccttcgcggttgccgccgtcggcgacgacgaggatgtcgtagtcggggattgcctcgtgttcgacgacgacgctttcgaggaaccggacctggacctcccctcgtccccgtggccgtcggctagcgcctcacgccacggccggaggtcggaggcaggcgagagcgacagcctggtgccggagaggtggaggcatgccgaggaggagatcaacctgacgaagaaggataagcgccgcatcgcgcacgggctgcggttcgggagccgcctcgagcggcgggcgcccccagctgttgctgctcctgatgaattccgcgcgtaccgcaaggggatgctgagcgctgagcgtgagcatgtttctcatgtataccgggggccgctggagaggactcctccgccggaagtgaaggaacatccaccgccggagccggagcctgggacgcgtgtggccccgaggaatccgaggatggggatgggcgttggcacccttgacgacattgatgagtttttcagaagtagggaatatgttcaggatgagatggaggacagcaagagtcctaagggccgtcagaagttgttctcaaatgaggagaagattcttctgaacaagcgagtgcctgatctggaaacagctacttctagtaaatggcttccacttcacacccttgctgcatctggtgatttctatctattgaatagccttttaaaacataacgtggacataaatgcgcttgataaggatggcttaccagcgatccacaaagcaattctttcaaagaaggctgctattatcaattatcttttaaggaactcagcaaatccattcatccaagataaagatggtgcgactctaatgcattatgcggtccaaacagcatgtagtcagaccataaagacacttttactgtacaatgttgacatcaaccgtccagatgattatggatggacacctttgcatcttgcggtacaaacacagaggactgacattgtgaagctgcttttaataaagggcgctgatagaactattagaacccaagatggattgaccccgttggagttgtgcctccggttgggtcatgatgtgcggacgtatgagcttatcaaactacttaaaagtttccgaggacaaaagcagcatgatttagtttagcaactggagggtgtgtgaccctctttgaaccagtgaggttaaccagtgtggtggccttctgggaggccagttttcaatgtaccattcatgattcatggaatcgctcctggtttgagataggtacatgccaacttcattgtatttgtatcatttatatatttcattggcctaaaccattaagtgatcgggtcaattggttgcaggaaata

SEQ ID NO: 91548 - DNA, 1733 bp, Zea Mays
cacggccactgctcgtagtcgtagtctcgtagctagctcccggctcccccccacacacggccactggcgcctacaagttgcgcatgtggtggtggtccgtgctgctgctgctggcctgctagctagctgctaccagccgacgacgacggccgcgcgcgtttggtgtgtgtgtgtgttataagcgcgagggtttctggcgaggttgctaaagcgttagcaaactagttagcggtcaccgggcgcccatggagcttgacgaggagacgacgttcttggacgagctcatgtcgctgcggcgggaggcggcggcggcggcgtccgcgcagtggcaagcagctgccgcctacacgggcggcggcggacaaggcatgatgatgggcgacctcctcttctacggcgggacgacggaggccgccgcgactgccaccagcggcggcggcatggaccagctctcgccgttccaccagcaggagccgctgcaggtgcaggcgcccccgcaccctcactcgcacgaggagttcaacttcgactgcctcagcgaggtttgcaacccgtacaggggcggcggcgtcgccgtaataacgggggccgaggccgccgcggtgcccggaagggcgctcgccgctctccacgacgccatggtggaggacgagacgagcggtcacctgcaggggcagcaatatggagccggcggctccccgacgttcgtgttcggcggtgccgccggcgagagctccgagcagacgcccgtcgtcgtcaggggtgccgccggcggcccccaccacaggagcaaggtccacggcggcggcgcgccgtccaagaatctcatggccgagaggcggcggcggaagcgcctcaacgaccgtctctccatgctccgctctattgttcccaagatcagcaagatggacaggacatccattctcggtgacaccattgactacgtgaaggagctgacggagcggatcaaagtcctggaagaggagatcggcgcctctgcggaggacctggacctcctcaacaccttgaaagcttcttcgtccagcggcagcaacgagatgatggtgaggaactccacaaagttcgacgtcgagaggcggggcaacgggagcacgaggatcgagatctgctgcgccacaaaccccgaggtgctgctgtccacggtaagcgcgctggaggtgctgggcctggagatcgagcagtgcgtggtgagctgcttcagcgactttggcatgcaggcctcttgctcacaagaggaggaggacggtaataataagaggcaagttctaagcaccgacgagataaaacaggccttgtttcggagtgctggctacggagggaggtgcctctaatatagctagcttagctaccatgcaagcagctccgatccaaacccaggccatcgatcccggcaaatactgtataaagctagctagtaagttgcatgcatctatgattgttattgctgtgtgtttgatgctttagttttcatcaatatatatatcccgtacgttaattggttttctccatgagttcatagcgctaataagtgtgcgtagtagtagtagcagcaagaggtatgtatgtatatatatctgaatcccagcaccaaattgaagatttgttgctcaggtattgtaagttgatcatttcttacggtctgtatcattgggtcatggtatgtatgcggattgatatattccaataataagcagattgttcctttctctgtg

SEQ ID NO: 91549 - DNA, 1959 bp, Zea Mays
cacggccactgctcgtagtcgtagtctcgtagctagctcccggctcccccccacacacggccactggcgcctacaagttgcgcatgtggtggtggtccgtgctgctgctgctggcctgctagctagctgctaccagccgacgacgacggccgcgcgcgtttggtgtgtgtgtgtgttataagcgcgagggtttctggcgaggttgctaaagcgttagcaaactagttagcggtcaccgggcgcccatggagcttgacgaggagacgacgttcttggacgagctcatgtcgctgcggcgggaggcggcggcggcggcgtccgcgcagtggcaagcagctgccgcctacacgggcggcggcggacaaggcatgatgatgggcgacctcctcttctacggcgggacgacggaggccgccgcgactgccaccagcggcggcggcatggaccagctctcgccgttccaccagcaggagccgctgcaggtgcaggcgcccccgcaccctcactcgcacgaggagttcaacttcgactgcctcagcgaggtttgcaacccgtacaggggcggcggcgtcgccgtaataacgggggccgaggccgccgcggtgcccggaagggcgctcgccgctctccacgacgccatggtggaggacgagacgagcggtcacctgcaggggcagcaatatggagccggcggctccccgacgttcgtgttcggcggtgccgccggcgagagctccgagcagacgcccgtcgtcgtcaggggtgccgccggcggcccccaccacaggagcaaggtccacggcggcggcgcgccgtccaagaatctcatggccgagaggcggcggcggaagcgcctcaacgaccgtctctccatgctccgctctattgttcccaagatcagcaagatggacaggacatccattctcggtgacaccattgactacgtgaaggagctgacggagcggatcaaagtcctggaagaggagatcggcgcctctgcggaggacctggacctcctcaacaccttgaaagcttcttcgtccagcggcagcaacgagatgatggtgaggaactccacaaagttcgacgtcgagaggcggggcaacgggagcacgaggatcgagatctgctgcgccacaaaccccgaggtgctgctgtccacggtaagcgcgctggaggtgctgggcctggagatcgagcagtgcgtggtgagctgcttcagcgactttggcatgcaggcctcttgctcacaagtgagtagtagtactacatgcatggttaagggatcggattcctttttcattctggaaactgtataaatcagctagaacgaacatgaaatgaaacagcagctgtatagtatagtagtacgtagtaataattaaacaaccacagctagcgttagtaatctctgcatatgcatggtatatgcattacacaaaggatctgtttaccaatgaataacctgtggtattatatacgtaggaggaggaggacggtaataataagaggcaagttctaagcaccgacgagataaaacaggccttgtttcggagtgctggctacggagggaggtgcctctaatatagctagcttagctaccatgcaagcagctccgatccaaacccaggccatcgatcccggcaaatactgtataaagctagctagtaagttgcatgcatctatgattgttattgctgtgtgtttgatgctttagttttcatcaatatatatatcccgtacgttaattggttttctccatgagttcatagcgctaataagtgtgcgtagtagtagtagcagcaagaggtatgtatgtatatatatctgaatcccagcaccaaattgaagatttgttgctcaggtattgtaagttgatcatttcttacggtctgtatcattgggtcatggtatgtatgcggattgatatattccaataataagcagattgttcctttc

SEQ ID NO: 91550 - DNA, 1999 bp, Zea Mays
ggccgaagaagttgccttccatggaatggacgactcggcgccgagaatatcctcacttcctcctcactatacattggcggcgcactcctgcctcctccgcatccactatatttggccgggttggagcagcagcgatcgatcgcccggggcgcggccaatggcaatggcgggcgggcagaacatgcaggtgctctcggcactggacggcgccaagacgcagcggtaccacttcacggcgatcgtcgtggcggggatgggcttcttcaccgacgcgtacgacctcttctgcatctccctcgtcaccaagctcatcggccgcatctactacaccgtcgacggctcgcccaggccgggcagcctgccgccgcacgtgtccgcggccgtcaacggcgtggcgttcgtgggaacgctgtcagggcagctcttcttcggctggctcggcgacagggtgggccggaagagcgtgtacgggatgacgctcctgacgatggtcgtctgctccgtcgcgtcaggcctctcgttcgggcgctcgccggcctgcgtcatggccacgctctgcttcttccgcttctggctcgggttcggcattggcggcgactacccgctatcggcgaccatcatgtcggagtacgccaacaaacggacgcggggcgcgtttgtcgccgccgtcttcgccatgcaggggttcggcatcctggccggcggcgccgtcgccataggcgtcaccgcgctgttccggagccgtttcccggcgcccccctacgacgtcgaccccgcggcgtccacgccggccgaggcagacctggtgtggcgcatcattctcatgttcggcgccgtgcccgcggcgctcaccttctactcgcgcatgaagatgcccgagacggcgcggtacacggcgctagtagccaggaacgcggagcgcgccgcggcggacatgtccagggtgctccaggtcgacatcggcaataaggagcagccgggggcagaggaagaagcgacgacgggtacagaggcgcggttgcgcggcgaacaggaagaagcgacgacggggccgccgttcgggctcttctcccgcgagtttgcgcaccggcacgggctccaccttgtgggcacggcgtcgacgtggctcctcctagacatcgcctactactcgcagaacctgttccagaaggacatcttcagtgcggtggggtggatcccggcggcggagacgataagcgcgctggacgagctgttccacatcgcgcgcgcgcagacgctgatcgcgctgtgcggcacggtgcccgggtactggttcactgtggcgttcatcgacatcgtggggcggttcgcgatccaggcggtgggcttcctcatgatgacggccttcatgctggggctggccgtcccgtaccgccagtggacgcgcccgggcaaccagacggggttcgtggtgatgtacgcgctcaccttcttcttcgccaacttcgggcccaacgccacgaccttcatcgtgcctgcggaaatctacccggcgcggctccgcgcgacgtgccacggcatctcggcggcgtcgggcaaggtgggcgccatcatcgggtccttcgggttcctgtacctggcgcagagccaggacccggccaagacggcgcacgggtacgcgccgggcatcggcgtgcgcaactcgctgctgctgctggccgggtgcagcttcctggggttcctgctcacgttcctggtgccggagcccaagggcaagtcgctcgaggagatgtcgcgcgagacggagccgggcgccgccgagccgtaagagaagggccgcccattcgtcctctctggcacctggatgcgtttgcgcgcgcgcagtattaagatttgttaggaatagtcacctagctagaattatattcatagtgtcagataagatagggtcatccaatgtataatgtattaagatttgttacttgtcattcgtcatgcaaaatttattttccaaaactatagcaaaacaaatcagaaa

SEQ ID NO: 91551 - DNA, 1076 bp, Zea Mays
aacgttattttatttcgtgttgacctaacaatcaggccccgcaccttttaacaagttccagtcgtggcgccgagccctactcctcctcccgccgccgcagactcttcctcgcgactcgccgctcgcccgactttccgagctccgacaccaaggtctgagtgtctgactaccacgctgcacctacgacctcgaggcgtctccaccgcgccattggcaaactaactcactttacaggagcaccatgggagagtcgagcaaggagctcctggacctgccctccgaccccaggcctcccgcctccttcatcgagtcgcttctcgctggcagggagcagcagcagcaggataaggagggaaagcgtaagttgggggcgtccactgatcccctgcccaaaagccaagttatcgggaaagtgaaggatttcttgggggagattgcaagggccaaccagaagttgcagcttgatgcacagaacaagcctcctgtggagtacgatattgaagcccttactgggaacgaggaggaatacattgagatggatctgcttctaggtgtcgctgatcttcattcagagcaggctgtggaggcagctgaagcaacaataaacggccgccagacttcagaaatgtcatttgcttgcagctcatctgactcggaagatgatagtgatgacagcgatgaagatgctgatgacaaacctctcacgtctgacaaagataataaatgtaaaagtcctgatgatgcggagatgggtccagcgaaaggaaagaagcccaataaaagacagaaaattgttgttctcaactagtacccttgtcttctgtacacctaagaacaagggctggagcgcaagtggtgaatgtgttggcctggtattatcagaagttacggagggactctctctgttcttttttatttgtcacggtttagtttaaaaatgaacgggcgacaaatattcgagaagggaggttgtatttttttcagtgttgtgcaatgttcaggccagctagggcaacttgcacgggggctaaaagaagtaatgcatattccagtttatacaatgtgttccaatgttc

SEQ ID NO: 91552 - DNA, 90 bp, Zea Mays
tatccgcgttctacccgcccgattgccatccctatgcgcagtgaagcagccaccagccaattcgcagtgctccagctgccgctgcccagt

SEQ ID NO: 91553 - DNA, 3655 bp, Zea Mays
agcgcacagaaatatccccatctcgcttccctctcccctacgaccgcccccacccatggccacgcctctcctcctcccctcccgcgcagcccatgccgcctccgctaccacctgcgcctcccagcacctcaaagccaccacctccaaggagcctccgccccgcgctcgcccgaagcacggcgagggaggggctccccgccccgtccccgttcccagctccgccccccgtcccaagtccctcgtcctctcccacatcgcggcgggccgaatggacgaggccgcggacgccttcgcgggcgtcagcagccccggcgcgttcctccacaacgtcatgatccgcggcttcgcggacgcgggcctcccgctcgacgcgctcgcggcgtaccgcgccatgctcgccgccagcgctcgccccgaccgcttcaccttccccgtcgtcgtcaagtgctgcacgcgcgccggcgcgctgggcgagggccgcgccgcgcacgcggccgtgatcaagctgggcctaggcgccgacatgtacaccgccaactcgctcgtcgcgctctacgccaagctcggcctcgtcggggacgccgagcgggtgttcgacggaatgccggcgcgggacatcgtctcgtggaacacgatggtggacgggtacgtgtccaacgggatgggagcgctggcgctggcgtgcttccgggatatgaacgacgcgctgcgagtgcggcatgacggcgttggggtaatcgcggcactcgcggcctgctgcctggagtcggcgctggcgcaggggcgggagatacacggctatgccatcaggcacgggctcgagcaggatgtgaaggtggctatgcgctgaacgagcggcctgtggatgcgtttgattgcttcatgcaaatgagagcggaggggttccaggtggaagccgtcactgctatcaatttgcttgccgcctgtggtcaaactgaaagctcactgtacggaaggagtgttcatgcttatgtggttcggagacattttcttccccacgtagtgcttgagactgctctcctggagatgtatggcaatgttggcaaagtggaatcatctgaaaagatatttggtcagatgacagagaaaactgtggtaacatggaataatatgatcgctgcctacatctacatggaaatgtaccaggaagccatcgcattgttcctggagctactgaatcaacctctttatcctgattatttcaccatgacaacagtagtaccggcgttcgtcttgctaggctcactaagacagtgcaggcaaatgcacagctacattatcaagttaggctatggagacagcactctgattatgaacgcagttatgcatatgtatgcaaggtgtggtgatattgtggcctcaagggagatctttgacaaaatgccaggcaaggatgtgatctcctggaatacaatcattataggatatgcaattcacggacaaggaaagactgcattggaaatgtttgatgagatgaagtgtaacggtattgaaccaaatgagagcacctttgtctctgtgctgactgcatgcagtgtttctggcctggagactgagggctggaaggagttcaattcaatgcaacatgagtatggtatggttccacagattgagcactatggatgcatgactgatcttctgggccgtgcaggtgacctcagggaggtgctgcggtttattgaaaacatgccgatagctccaacatccaggatttggggttccttgctgacagcgagcagaaataagaatgatatcgatatagcagaatatgcagcagagaggatattccaactggaacacaacaacacaggctgttatgtcgttctgtcttccatgtatgctgatgccgggagatgggaggatgtggagaggataagatctctgatgaaggagaagggactccgaaggacggaggcaagaagccttgtggagcttaatgctgaagagtgcagttttgtcaatggggacatgtcgcaccctcagagcgagaaaattcatgaattgtctgatatcctatcacgaaatattggagaagatttagatagcccaactaatctccgtgattcagatccttttgcctcagggaaaactgtacttcccaataagcatagtgtaaggctggctgttgcctttggtctgatttcatctgagcctgggaccccaattcttgtcaagaagaatgtgcgtgtatgcaaccactgccatcgtgcactgaagttgatatcaaaatattcaagacggaagattgtagttggtgacacaaagatatatcacatattttcagatggctcttgttgctgtggtgactactggtgaactgttaagattgatgacgaaatgcctgaatgagattctgcaagagcaggatacctggatctggatgtacacccgggttttcaaaatctgacacaaggtaaactgcaaggaattacatcacgtatccaagttgaggacacataccgccataccggagatatccattcccaggactcgtagtcatagtagatgctccgagaaggaaccaacaatttgggggagaattctaacctacaactgattacacacattggacaagaacgcaccaccacatttttgtagcaattggagcaggatgatgtacaaagttgttttttcccttcataagcaatgtaaaaaaggctgagctgattgtattcattgtatgacacatcatacatggatcaaatgcaagaaattgaagtgtttctctctcagattcttgtgaagtgaaaatcaaacatgcatagtagtactgcttgagctagcctaatccttgaaaccatttttataccagacattgagaattagagatcgtcgcttacaacaagattaagcaaatgctagcacatgacgcgtaagtttggaatacccgactccaaatctacgctccgccacggcgcttggcctcctcggtctcgatcgcgcggcgtgaggcgtcggcaaggcggtcgagcgcctgttgcacggcgtcgcggccgccgatgaggaggcgcgccaccacctccgggtcgcgctccccgcgggcatcctcgaactcgcgcctggcgttggcgcgcagcacctcccgccacggcaccccgcggtcgtcggtccacgcgaagagccgcgccgcccggaggatgtcccggtacagggccagcgcctcccgccgggagctcgtcagccgccgccgcgcctccgccgactcctcgtccgggcccgccgcgggcttcttcacgaggtgccggtccagcagctcctcgatggtgtccgggccctcgtggatgcaccgcgcccccgagccggcgggctgccaacgggcccgcaggaggagcgcggtgccgcggccgccatgtctggctacggccatagtcctccgctcctggcctctctgtttgggtcgcgattcgggattcgggaacacgggggaagggtctgtgcactgtgcagagtgcagaccaaaacgaacgatctagcactagagcttaacccaaggtcccagctcccagagacaaaataaactcctcagcagcgaaaagagaactgcatgaattccgtagactttcctatcccttggggcgcttcatgaaatcctccatgcggtgcgccactgttcttgcgacgctgttctccatct

SEQ ID NO: 91554 - DNA, 3192 bp, Zea Mays
gaaatatccccatctcgcttccctctcccctacgaccgcccccacccatggccacgcctctcctcctcccctcccgcgcagcccatgccgcctccgctaccacctgcgcctcccagcacctcaaagccaccacctccaaggagcctccgccccgcgctcgcccgaagcacggcgagggaggggctccccgccccgtccccgttcccagctccgccccccgtcccaagtccctcgtcctctcccacatcgcggcgggccgaatggacgaggccgcggacgccttcgcgggcgtcagcagccccggcgcgttcctccacaacgtcatgatccgcggcttcgcggacgcgggcctcccgctcgacgcgctcgcggcgtaccgcgccatgctcgccgccagcgctcgccccgaccgcttcaccttccccgtcgtcgtcaagtgctgcacgcgcgccggcgcgctgggcgagggccgcgccgcgcacgcggccgtgatcaagctgggcctaggcgccgacatgtacaccgccaactcgctcgtcgcgctctacgccaagctcggcctcgtcggggacgccgagcgggtgttcgacggaatgccggcgcgggacatcgtctcgtggaacacgatggtggacgggtacgtgtccaacgggatgggagcgctggcgctggcgtgcttccgggatatgaacgacgcgctgcgagtgcggcatgacggcgttggggtaatcgcggcactcgcggcctgctgcctggagtcggcgctggcgcaggggcgggagatacacggctatgccatcaggcacgggctcgagcaggatgtgaaggtggggacttctcttgttgacatgtactgcaaatgtggcaatgttttgtacgctgagaatgtctttgcaacgatgctgctgaggaccgtggtgacgtggaattgtctgataggtggctatgcgctgaacgagcggcctgtggatgcgtttgattgcttcatgcaaatgagagcggaggggttccaggtggaagccgtcactgctatcaatttgcttgccgcctgtggtcaaactgaaagctcactgtacggaaggagtgttcatgcttatgtggttcggagacattttcttccccacgtagtgcttgagactgctctcctggagatgtatggcaatgttggcaaagtggaatcatctgaaaagatatttggtcagatgacagagaaaactgtggtaacatggaataatatgatcgctgcctacatctacatggaaatgtaccaggaagccatcgcattgttcctggagctactgaatcaacctctttatcctgattatttcaccatgacaacagtagtaccggcgttcgtcttgctaggctcactaagacagtgcaggcaaatgcacagctacattatcaagttaggctatggagacagcactctgattatgaacgcagttatgcatatgtatgcaaggtgtggtgatattgtggcctcaagggagatctttgacaaaatgccaggcaaggatgtgatctcctggaatacaatcattataggatatgcaattcacggacaaggaaagactgcattggaaatgtttgatgagatgaagtgtaacggtattgaaccaaatgagagcacctttgtctctgtgctgactgcatgcagtgtttctggcctggagactgagggctggaaggagttcaattcaatgcaacatgagtatggtatggttccacagattgagcactatggatgcatgactgatcttctgggccgtgcagatccttttgcctcagggaaaactgtacttcccaataagcatagtgtaaggctggctgttgcctttggtctgatttcatctgagcctgggaccccaattcttgtcaagaagaatgtgcgtgtatgcaaccactgccatcgtgcactgaagttgatatcaaaatattcaagacggaagattgtagttggtgacacaaagatatatcacatattttcagatggctcttgttgctgtggtgactactggtgaactgttaagattgatgacgaaatgcctgaatgagattctgcaagagcaggatacctggatctggatgtacacccgggttttcaaaatctgacacaaggtaaactgcaaggaattacatcacgtatccaagttgaggacacataccgccataccggagatatccattcccaggactcgtagtcatagtagatgctccgagaaggaaccaacaatttgggggagaattctaacctacaactgattacacacattggacaagaacgcaccaccacatttttgtagcaattggagcaggatgatgtacaaagttgttttttcccttcataagcaatgtaaaaaaggctgagctgattgtattcattgtatgacacatcatacatggatcaaatgcaagaaattgaagtgtttctctctcagattcttgtgaagtgaaaatcaaacatgcatagtagtactgcttgagctagcctaatccttgaaaccatttttataccagacattgagaattagagatcgtcgcttacaacaagattaagcaaatgctagcacatgacgcgtaagtttggaatacccgactccaaatctacgctccgccacggcgcttggcctcctcggtctcgatcgcgcggcgtgaggcgtcggcaaggcggtcgagcgcctgttgcacggcgtcgcggccgccgatgaggaggcgcgccaccacctccgggtcgcgctccccgcgggcatcctcgaactcgcgcctggcgttggcgcgcagcacctcccgccacggcaccccgcggtcgtcggtccacgcgaagagccgcgccgcccggaggatgtcccggtacagggccagcgcctcccgccgggagctcgtcagccgccgccgcgcctccgccgactcctcgtccgggcccgccgcgggcttcttcacgaggtgccggtccagcagctcctcgatggtgtccgggccctcgtggatgcaccgcgcccccgagccggcgggctgccaacgggcccgcaggaggagcgcggtgccgcggccgccatgtctggctacggccatagtcctccgctcctggcctctctgtttgggtcgcgattcgggattcgggaacacgggggaagggtctgtgcactgtgcagagtgcagaccaaaacgaacgatctagcactagagctt

SEQ ID NO: 91555 - DNA, 2708 bp, Zea Mays
gaccgcccccacccatggccacgcctctcctcctcccctcccgcgcagcccatgccgcctccgctaccacctgcgcctcccagcacctcaaagccaccacctccaaggagcctccgccccgcgctcgcccgaagcacggcgagggaggggctccccgccccgtccccgttcccagctccgccccccgtcccaagtccctcgtcctctcccacatcgcggcgggccgaatggacgaggccgcggacgccttcgcgggcgtcagcagccccggcgcgttcctccacaacgtcatgatccgcggcttcgcggacgcgggcctcccgctcgacgcgctcgcggcgtaccgcgccatgctcgccgccagcgctcgccccgaccgcttcaccttccccgtcgtcgtcaagtgctgcacgcgcgccggcgcgctgggcgagggccgcgccgcgcacgcggccgtgatcaagctgggcctaggcgccgacatgtacaccgccaactcgctcgtcgcgctctacgccaagctcggcctcgtcggggacgccgagcgggtgttcgacggaatgccggcgcgggacatcgtctcgtggaacacgatggtggacgggtacgtgtccaacgggatgggagcgctggcgctggcgtgcttccgggatatgaacgacgcgctgcgagtgcggcatgacggcgttggggtaatcgcggcactcgcggcctgctgcctggagtcggcgctggcgcaggggcgggagatacacggctatgccatcaggcacgggctcgagcaggatgtgaaggtggctatgcgctgaacgagcggcctgtggatgcgtttgattgcttcatgcaaatgagagcggaggggttccaggtggaagccgtcactgctatcaatttgcttgccgcctgtggtcaaactgaaagctcactgtacggaaggagtgttcatgcttatgtggttcggagacattttcttccccacgtagtgcttgagactgctctcctggagatgtatggcaatgttggcaaagtggaatcatctgaaaagatatttggtcagatgacagagaaaactgtggtaacatggaataatatgatcgctgcctacatctacatggaaatgtaccaggaagccatcgcattgttcctggagctactgaatcaacctctttatcctgattatttcaccatgacaacagtagtaccggcgttcgtcttgctaggctcactaagacagtgcaggcaaatgcacagctacattatcaagttaggctatggagacagcactctgattatgaacgcagttatgcatatgtatgcaaggtgtggtgatattgtggcctcaagggagatctttgacaaaatgccaggcaaggatgtgatctcctggaatacaatcattataggatatgcaattcacggacaaggaaagactgcattggaaatgtttgatgagatgaagtgtaacggtattgaaccaaatgagagcacctttgtctctgtgctgactgcatgcagtgtttctggcctggagactgagggctggaaggagttcaattcaatgcaacatgagtatggtatggttccacagattgagcactatggatgcatgactgatcttctgggccgtgcaggtgacctcagggaggtgctgcggtttattgaaaacatgccgatagctccaacatccaggatttggggttccttgctgacagcgagcagaaataagaatgatatcgatatagcagaatatgcagcagagaggatattccaactggaacacaacaacacaggctgttatgtcgttctgtcttccatgtatgctgatgccgggagatgggaggatgtggagaggataagatctctgatgaaggagaagggactccgaaggacggaggcaagaagccttgtggagcttaatgctgaagagtgcagttttgtcaatggggacatgtcgcaccctcagagcgagaaaattcatgaattgtctgatatcctatcacgaaatattggagaagatttagatagcccaactaatctccgtgattcagatccttttgcctcagggaaaactgtacttcccaataagcatagtgtaaggctggctgttgcctttggtctgatttcatctgagcctgggaccccaattcttgtcaagaagaatgtgcgtgtatgcaaccactgccatcgtgcactgaagttgatatcaaaatattcaagacggaagattgtagttggtgacacaaagatatatcacatattttcagatggctcttgttgctgtggtgactactggtgaactgttaagattgatgacgaaatgcctgaatgagattctgcaagagcaggatacctggatctggatgtacacccgggttttcaaaatctgacacaaggtaaactgcaaggaattacatcacgtatccaagttgaggacacataccgccataccggagatatccattcccaggactcgtagtcatagtagatgctccgagaaggaaccaacaatttgggggagaattctaacctacaactgattacacacattggacaagaacgcaccaccacatttttgtagcaattggagcaggatgatgtacaaagttgttttttcccttcataagcaatgtaaaaaaggctgagctgattgtattcattgtatgacacatcatacatggatcaaatgcaagaaattgaagtgtttctct

SEQ ID NO: 91556 - DNA, 1361 bp, Zea Mays
gacgcgcgtgggctcggtgttcccagacggccagacggctctcgtcgtgccccaactcggcaactccccatcagctcaccccgatctagggtttgtgcaccctccgcttacgcgcctccccaccaagcaactacccatggcggctacagggcaggagggggatgacgtcgaccactacgaggtactctgcctcccgtcgggggaggaaggcgcggcgctgaccatcgagcatatcgagaaggcctaccggacgcagtcgcggctgcgccaccccgataagcgccccgacgaccccaacgccaccgccgacttccagctcctctcgagttcctacaaactcctccgcgacgagtcccttcgccgccagttcgacgcgcgcctccgcggccgccgcgaggccgcagcccgcgccgccgccacgggcgttaagcgccggaaggccgtctccgacctcgaggagcgcgagcgcgccgccgccgcgggccaccccgccgatcccgaggagctcgccaagcgcgaggcccagcggatggccgccgacattgagcgcgagctcgcagcgttccgcgccgccaagcaggcttctgcatttggtgccacatcgacttcggcacatggagataagaagggtggaaccccacaggatggggtgaaaacggacaagggaaaaatcttgaaggtttcatgggatgggagtgctgattcgtacagtgcggcaaagttggaggagatcttccagaaatttggcaaagttgaagacattgttatcaagacaaggaaatcaaggagtaagggctcagcaattgtagtaatgggctccaaagaagctgcattattagcaatacagaaccatttctctctgtttccgttaaatgttgctcctgttcaagaatctggtggattatcaacaagaccaacagaaacatatgaatcaaggacaaacaatactgatggaactggatttaacgatttggaagcgtcggtgttccgtaaacttcgagaggcccagaaaaggaaacattttggttaattgctttgttctgatgcatgatttggtactatgtatatgacgtcacacagctgaaaaatatctgaggatcgtgatggtagctgagttacagaaatatgaactacacatttgtttagttcgagtcttgtcgcagataaaattctctgaatcatagcaacgtcagatcaatttttctgtcactgtacaagctgtaccatgtatctatgaatagtttgtaaccacaaattcatgcatgacatggcgctacacatctttttgctggaaattgggaacacaacccctttcaaaattcttatgcaagcaatcaaactggaatatttggagttctcat

SEQ ID NO: 91557 - DNA, 1163 bp, Zea Mays
atgacgcacgcaacagggccgtccctgtgggggtgccaagggtgccgccgcaccgggcccccaaaaatagagggccccgtagccactgatatgtcacgactcacgacgacggaaacagtagtgctgccagtagagctctcagaactcgggaaaaaaatgtcagaggccgccgtgcgtgtgatcggcctatggccgagcccgttcgtgatccgcgtcctgatcgccctgaagctgaagggcgtcgagttcgagttcgtggaggaggtggtgggcaggaagagcgagctgctgctgaggtcgaacccggtgcacaagaagatccccgtcctgctccaccacggcaagcccatctccgagtctctgatcatcgtccagtacatcgacgaggtctggtcctccggcgcgccggccttcctccccgtcgacgctcacgcccgcgccgtccagcggttctgggcgcagtacgtcgacgacaagctgccttgggcgatccgcatactgaagggaacggacgacgggggcatggagcaggcggcggggcagctgtccgcggccctgcagctcctagaggaggctttcgcgcagctcagccaggggaagcgctacttcggcggggacagcgtcgggtacctggacatcgctctggtgtcgcatgtcggctgggtgaaggcggtggagaagatcgccggggtcaccctgctggacaaggccaaggtcccgaacctggtggcgtgggctgatcgtctgtgtgcccacccggccgtggtcgacgccatccctgacgcggacaagttcgttgagttcagcgtcacctatggctccttctccaagcctatcaatgctcccgccaagtgagcaaaaagggtccgtgcatgcttcgtcattttcactttcactgcgccccttccaaggggaatcgacgcatacactagtggctctgtattctttagtgcaaagcttactgttctgaactcagttgcagagtttcattaactttttcaaatgtgactaaagataataaagcaaactgaactgttagtaacctattacaagagagaaatttactcctcctgcaaggctgtggctgttagtggcttggcctagctttgcccggatatgaacatagtcttcttaatttagtactcccatcaccatcagaagaa

SEQ ID NO: 91558 - DNA, 1142 bp, Zea Mays
atgacgcacgcaacagggccgtccctgtgggggtgccaagggtgccgccgcaccgggcccccaaaaatagagggccccgtagccactgatatgtcacgactcacgacgacggaaacagtagtgctgccagtagagctctcagaactcgggaaaaaaatgtcagaggccgccgtgcgtgtgatcggcctatggccgagcccgttcgtgatccgcgtcctgatcgccctgaagctgaagggcgtcgagttcgagttcgtggaggaggtggtgggcaggaagagcgagctgctgctgaggtcgaacccggtgcacaagaagatccccgtcctgctccaccacggcaagcccatctccgagtctctgatcatcgtccagtacatcgacgaggtctggtcctccggcgcgccggccttcctccccgtcgacgctcacgcccgcgccgtccagcggttctgggcgcagtacgtcgacgacaaggtgaagcaaaaactaactagctagctagtcgtagtcgaccgagacctcttacgcatacgcatacgcatacgcatgcatgcagctgccttgggcgatccgcatactgaagggaacggacgacgggggcatggagcaggcggcggggcagctgtccgcggccctgcagctcctagaggaggctttcgcgcagctcagccaggggaagcgctacttcggcggggacagcgtcgggtacctggacatcgctctggtgtcgcatgtcggctgggtgaaggcggtggagaagatcgccggggtcaccctgctggacaaggccaaggtcccgaacctggtggcgtgggctgatcgtctgtgtgcccacccggccgtggtcgacgccatccctgacgcggacaagttcgttgagttcagcgtcacctatggctccttctccaagcctatcaatgctcccgccaagtgagcaaaaagggtccgtgcatgcttcgtcattttcactttcactgcgccccttccaaggggaatcgacgcatacactagtggctctgtattctttagtgcaaagcttactgttctgaactcagttgcagagtttcattaactttttcaaatgtgactaaagataataaagcaaactgaactgttagtaacctattacaagagagaaa

SEQ ID NO: 91559 - DNA, 3603 bp, Zea Mays
ccaccgcggcggcagcggggcgaggggcttcgaagacccgcacgagccaaggacgaaacgaaaccccatctccgcaaagggcagcaagcaacccctaccgggagctctcgctcgccctgcgcagcgccgcgccttcccaccacgcgtctcccaaaatccgcggccgtgtatataagacccgccaccaccacttttgccatcccccctctcccgtcgtccccacctcctccctttttggctcagtggccatgcctcccctcacaagctccctcctctcccgctccaccaccggcggctcctctacccgcgccgcggcagcggtcgcagcgatctccaggcccgccgcaccttcctcctcgtccccgcccgcccgctcgaccccgaggccgcgctccagcccggcgtcgcccttcgcatccggcctcgcgagccgcctctttcggcggccaccgcgccgtcgcccgctccgcgtcgtctgcagccgccgtcttcgagcgccggtttgcctcagcggcgaccaggaactcgtacgatgaaatcctgacgggcctcgctaagccaggaggcggagaggagttcggcaagtactacagcctgcctgcgctctccgatccgcggattgatcggctcccatattctataaggattcttctcgaatcggcaatcaggaactgcgatgacttccaggtcaccggaaaggatgttgagaagatcctggattgggagaaaagtgcaccgaagcaagttgaaatcccgttcaagcccgctcgtgtcctcctccaggattttactggtgtcccagctgttgttgatcttgcttgcatgagggatgctatgagtaaacttggcagtgacccgaacaaaattaatcctctggtacctgtagaccttgttattgatcattcagtacaagttgatgtggcaagatcagcaaatgctgctcaggcaaatatggagcttgagttccatcgtaacaaggaaaggtttgggttcttgaaatgggggtcctctgcattccgtaacatgcttgttgtccctcctggatctggcattgtccaccaggtattttgattctatgattgtttttttaaataacttggtccagccaaggttattttattttttatctatcaaaaacttataatcctccatttcactgtgtcaggtgaatcttgaatatctggccagggttgtgtttaacaatggtgggatcctttaccctgacagcgttgtaggcaccgactctcacacaactatggtagatggtcttggagttgctgggtggggagttggtggtatagaggcggaagctgcaatgcttggccagccaatgagcatggtcttaccaggtgttgttggctttaagttatcaggcaagctgaggaacggagttacagccacagacttggttctaacagtaactcaaatgcttcggaaacatggtgttgttgggaaatttgttgagttttatgggcaaggcatgagtgagttgtcacttgctgatcgggcgaccatcgcaaatatgtctccggaatatggtgcaactatgggattcttcccagttgatggaaagacgctggactatttgaagcttactggccgaagtgatgatacagtggccatggttgagtcctacctgcgtgcgaataagatgttcgttgatcacagccaggttgacgctgaaagggtatactcttcctatctagaacttaacttggaagaggtagaaccatgtctatcaggaccaaaacggcctcatgatcgagtgacattgaagaatatgaagtctgattggctttcttgcttggacagcgatgtaggattcaagggttttgctgtccccaaagaatcacagggcaaagttgcagaattttcgttccatgggactcctgcaaagataaagcatggtgatgttgtaattgcagcaattaccagttgcacaaacacatcaaatcctaatgtaatgctgggagctgctttggttgccaagaaggcttgtgagttgggcctggaggtaaagccatggattaagacgagccttgcacctggttccggtgttgtgaagaagtacttggataagagtggtttgcagaaatatctcgaccagcttggctttcatattgttggctatggttgcacaacctgcattggaaattctggagagcttgatgaatctgtgtctgctgcaattactgagaatgatattgttgctgctgctgtgttgtctggaaacagaaattttgaaggacgtgtgcatcctttaaccagagcaaattaccttgcttcccctcctttagttgtggcttatgcattggctggcacagttaatattgattttgagaaagaacctattggcatctcgaaagatggaaaagaggtttacttccgggatgtttggccatccacagaagagatagccgaggttgtcaagtcaagtgtgctccctgacatgttcaagagcacatatgagtcaatcaccaaaggaaatcctatgtggaatgagctgccagtctcaacaagcactctctacccctgggatccatcatctacatacatccatgagccaccttacttcaaggatatgaaaatgagtcctcctggcccgcggcctgtgaaggatgcatattgccttttgaattttggtgacagcatcacaaccgatcacatctcacctgccggaaacattcacccagacagcccagctgcaaaatatctgaaggagcgtggcgttgaaaggaaggacttcaactcatatggtagccgaagaggaaatgatgagatcatggctaggggaacctttgccaacattcgtcttgtgaataagttcttgaagggtgaggttggacccaagacaatccatgttccatctggggagaagcttgcagtttttgatgctgctatgaaatacaagaatgaagggcatgacactattatcctggctggtgccgagtacgggagtggaagctctcgggattgggctgcaaagggcccaatgctgcagggagtgaaggctgtgatagcaaagagcttcgagaggattcaccgcagcaatcttgctggcatgggaatcatccctctatgctacaaagcaggggaggatgcagacaccctgggcctaaccggccatgagcgctacacggtccaccttccaaccaatgtgagtgagatcaagcctggccaagatgttaccgtgacaactgataatggaaagtcgttcacttgcacactcagattcgacactgaggtatgattgttcttttcaatgcataaatcgctgatgctgtctattgatgttttcgttactgatcaccttcacctccaggtggagcttgcttactacgatcatggtggcattctaccatatgtcgctagaaagatagcggaacaatagattgtaccgtcgagatggttgcgatgcttgcggtgaatcgtaattggtgtaaacggtttgtttagtagtacaacccatttttgcggactacttataataacctctgagtatctcagagtgagctgtctgaaatttgatgaactgctacaattctggtgcgccatgaggatgggatccttttgccttctatgttaataatatgctaacttctg

SEQ ID NO: 91560 - DNA, 6464 bp, Zea Mays
taaatggagaaagttctcatcataagatcagccaatagaagaaaaaagtccctaattctgcagaacattctgagcacgtgaaaagtgaatagcctaaagataaaaaaaagtttatcatttttttaacagcagttcttattgcccctttggcctttttggcccattgttgtatccgattcaacaattgatacatatttgttctcttcttaacaaaaaaaatggaacttccggactttggtttggtgagtcgtacgagatcgtgtttacatacctatgaacttagcctcttcaagtgtatccgatatatataataatttttgggtgtgtcaattctctgttcatgtattttattatacatgatatgtatatgtatttatttatataataataaatacctatactttgtgcaagtgataagagataatatgaaagattttcttatttttcttaattttctcaagattttaaacctcgccataaataaacttcgatatctcgatctcgatatatagaaaagaaaatctctacatatctctatatatacatatattatgtacattaatatatacatgtaatatgtacattatgcagtagacccataatggtaaatgaaagtggctaattattgaataaaaagcccttttaactcagtggtagagtaatgccatggtaaggcataagtcatcggttcaaatccgataaagggcttttcgcttagtggtagaataatgccttggtaagacagaagtcatcggttcgaatccgataaagtacttttctactaaattcattcatttcttttttgaaaatgtctccattttttttttgcaattttatgacttagtttagtgcgagatgcccacatttttggtctgaacactaaacgaagcacagagttaaaattacaaaaaaaatgaaattggactctttttcctgttatagcaatcaatacctgtactgaactaatttagattcctttttattagtctattcgtattctataccctttaaacgaatttccttaaccttaaaaagcttaaaaagtaggggatgctccgtgaattaacctaaccatcaactaaaaaaaatcctatgaaagcataacagaaaagtagtaaagactcttttctttgatctagttcgaagagtatattgacaattccaaaaaactgctcatactatcattatagtataatgacgagtggttgtatatggtgctatcgtctagtgatgcccccatcgtctagtggttcaggacatctctctttcaaggaggcagcggggattcgacttcccctgggggtagggagtattataaaaagaggttaatcatagattatcaaaaagcctagaaaaaattcttcctgggtcgatgcccgagcggttaatggggacggactgtaaattcgttgacgatatgtctacgctggttcaaatccagctcggcccaaaaatttagggcttcgtgaatatgaactaaatctattttttttatggaagaaaaaagatgtattatctatagaaataaaggataaagagaaacggggaaattgatttctaatccgtatctctctgattctttgtcttacaaagaaaagacaaagaaaagagcttttcttatggaaaagcggattatcgtttatttttagggataaaaaatcgcaacatactagttatgccactctcactatacccgcataggatatgcgggtatgtagtatatgattcgtctatttcttagagcacgacagacggatcgaatcttctatttaagaataggcatgccatacaccctgcagggattgtagttcaattggtcagagcaccgccctgtcaaggcggaagctgcgggttcgagccccgtcagtcccgaactagggttcaatgaatggacaaattcatcttttcttttttcatggaaatttttgatgaaaaaaggggggggggacaggaggcaagatcaaatatctatggggcacccttacttcacttttatttttttgcatttctcagtaaaaagagagcagtgcagtatagaattttttttgcactacttccggttgataaggaaaggcatacatatcatacgtggattagtataatttaggatactactccatttttatgatgataccaccctcatcttaacttcctattcgactcttatgaaatcgagtaccggtattttaccggaatccatacataaaccgtattcgtttattgttagagaatgaatttcatctaattagttactttttgggggttaaaccgcaccccttccattttctagttccaactttgtttgtgtatataattggaaagaatccacctcattctcactccatttgccgactcctttttttatggatttgctctcatctttagaccccaaaaagcgtatatggatagtaacctaataaaataaaaaccaagcaaacgctctttttcctaaatttaaatatgggatcctttttatttaagatcctcttttctccatctcatttctacttctactgcttattgggatgtctatgtgacccatagaaagttggtcatataatacatacataattgtatgtataactataagaaaaaggaagtgaaattggataagataagaaagattttgggttatacatatagaaaagcaaaagtagaaaagaatgaaaaaagaatagagggggtttcgaatccaatcaaaaaacctattttggtcttagtatggataagagatcttcctatgttatattattccactatccaccatgaattgatttgatagatgcaatattcataatattgaattgattcagtattatcagaatgcaagtcctccccttgaatttacaggatacccctttttcctctccatgggattacatcccgagttattgtgaaaaaaaataaataaataaagaggttatggaagtaaatattctcgcatttattgctacagcattgttcattctagttcctactgcctttttacttattatttatgtaaaacagccagtcaaaatgattaattggaattccaattaatcattgaagaaatgaaaaagggattaaagaaaataaaaaatccaagtcttaaatgaaagggtctggttggaatcataaagtgtggtagaaagaactacatatagttttttctaccacactttagattctttctattatattatcttgaatctacatagaatcgattagtagattgaaatagtagtctaattcaacttcttttttcactgcatccacttaatttcaatcaagtcaaaatcaaaaaaatcgaagataattcttcattgaaagaatccaaggagggggagaaaaataatacgagaatagactagaatagattatagtaaaagaaaaaaagtaaaaggaaaaaacctacgaatctttcatgcttaaaaaaggtgcgagatgcttcaatcgagatccttcaaaaaaaaaaagaacatcaaaaattttctaagaataagaaaatagtataaatggaaaatgtgcgatatattgtgaatagcttcgtgtaagaaagtctaattttcttatgttctaattttcttatgtatagaactttctttttactcataatttctagtagaatagaagttatgaattactataatcgccctttctattctattatactggaatagaacgactctttcttactttcttaaaagagtttcttacaagagtgaaacaaaactaaagaaagagagaaaaaataaagtttggcaaaattattaatgcaaaacgatcaattaaagaaaagagttgatactacaattcgactactcaatcaattggtagtatccctagagtccactcctcccccatactactagcgaaagagaaaatgtaaagactaccattaaagcagcccaagtgagacttactatatccatgtaaattatgtctcctatttctatgaaagaattcttctactattgatcaataatcatagtggaatcaagggtacagagtcaaaaggccattctgccctaagactatggatgaatccgttaaaggaatttactcctaacaaattcttatatgatttctggtagaattggagagcattaagtagaaatatgatacatcgctctttccctaaaaaagagtaggggatgctctgaatagaagacgcgggaatagagagattttttctttcgtttgttaccttttttataagcaaaggacgtaagaatacaccataaaattaggatagataaatatttattggatacctaacttacccatgtttatttttatttttgacctaaaccctactgctgccccgctttctatctttctatgaaagagtaaggaggtcttatccacaatccaaaaattgatttttgatcagcctattcaatctaattctcgacagaatcagtagcctttactttagtgtatgtaggtagcataagatgtacgaagtgtatgtagtaagatgtacgataaagtgtatgtagtaagatgtacgataaataaaatgtatgataattaggaagtctttctatttcttcgcaaagtcccttcttcaatcttagattgaaaaaagaatgccccttagggacctttggctacgaagatttctgacatcttagtctcgtagttttaaattcccgaatcgaatcgatttaaattaataaaagaataaggaaacgctacctcatccctattggtagccgtttgggccactgcccacaaaacaaaccctagtttgagggtagaactatggtatggattctcaaaatccagtatcgccaaacctagttactctcgtgccccaacttaggggggtacgaatttgtcgagtttgatcagtactataatcctaagtattttattgatcaggcggcacccagatttgaactgggggtaaaggatttgcagtcccctgccttaccacttggccatgccgccaaaaaatccgatctaaaatcgagaaaagagcaagtattcattcacatttttttactaattactaaaacctttttttcttttatcttgaatctaattctacttacttttttagaatctttttcaaaaaatagatttctgcttttttggatccagtttcgcttattctcctcgatggattctatcttaaaacacacattgctaacactagaaaacttcccgcttctttctattctattgagatgacaaagaagaaaagaagaaaaagtggatttccagtcgcaggctgcaaaattcagaacaaattagaaccattaactataatataataaaattagaatataataatataattaactataatataataaaataaaactataatataataatataataaatataatattattattattattttttgaattgcagtagtgaacgactcttaaatcggtattcccccccattattttgaatggcataataaaatagaataagaataaatgtttccctaatctgtatatagggaaactccaggtccgaacaacattattatctacagatcccccttatgtacatattcctatggggaatcgtgctttaatttttcattgtattaaatatcttgaataaaaaaaagagggaatttgctctgatatagattatagccaggccttcttggcccacctaagtgcaattacgataaaagaaaggatatgtagataggtggataactagattggcaagtacttaaaaaataaagtactttatctttattttaggattctacaacgaaatcctttattttctagcaattctactactacgaaacaaaaaagacccttcaaattctttttgaaaaagaaactaagcgtgctattctaaatcgaactaaagtcaaactttctagtgcttataaattcttatggctttatccctttcatagaaaggagataaaacgagaaatctttgctatccaatctttttagaatatcataaagtttcagtggcagaatttttttctaggactgttttatcaattcatttttattccatttcaacccctgctaaattcgaactttcgtcgaaatcgtctctattcatatgtatgaaatacatatatgaaatacgtatgtggagttccctagaatttcatgtgattcagtaaacagaatatggattccatgattgctagattgatccgtagggattgatgaagagtgagctgataatggaatttttcttctataaataggaaacttaagattcaaatgctccggaatggaaatgagggaatgtccacaatacccggatttagtcagatccaattcgagggattttgtagattcattaatcaaggcttggcggacgaacttgagaagtttcccacaattaaagatccagatcacgaaattgcatttcaattatttgcgaaaggatatcaattgctagaaccctcgataaaagaaaggaatgctgtgtatgaatcactcacctattcttccgaattatatgtatccgcgaga

SEQ ID NO: 91561 - DNA, 318 bp, Zea Mays
atgaaggattggatgcacttcagtgttgccttctggcacacgttctgtggtactggcactgatccttttggtgctcctacaaagacttggccttgggaggatggcacaaattcgttggccatggctaagagaagaatgagagctcactttgagttcatggagaagttgggagtcgacaaatggtgcttccatgacagggatattgccccggatgggaagacacttgaaggtttccctctgcttctcatctaccatttcatcactattggtgaactttgtgttcgcaaagtcttcaacattgttcgacttttcctgtga

SEQ ID NO: 91562 - DNA, 816 bp, Zea Mays
atggcgcacggttctgcctgcgtccgcgcccctacgctacgccacctcctcctcctcctctccccctcactgcgccgccacctcctcggttccgtgcgtccgctgcgccgccacctcctcctcctcctctcccacacgaattcgacctccagctcgagcacgacatcgaccacaccggaaaagtacgccccctcactgcgctgccacctcctcggttccgcgcgtccgctacgccgccacctcctcctcctcgtctcccccacgaatccgacctccagctcgagcacggcatcgaccacaccggaaaagtatgccagcgactccgacctacacctcgagcgcatcaacgtctactacaacgaggccagcggcgaccgcttcgccccgcgcgccgtcctcatggacctcgagcccggcaccatggactccgtgcactcgggccccttcggccagatctttcgccccgacaatttcgtcttcggccagtccggcgccggcaacaacttggccaagggccactacaccgagggcaccgagctcatcgacttcgtgctcgacgtcgtgcacaaggaggccgagaactgcgactgcctcccgaaatcggccgccgcggcgccgcacgccacgactcctgccccagcccacctccctacagcagctgcagctccctccggcctccggtggtctggcacgccgcctcctcgcccagatccgtccgtggtccgcccctccggcctcgcccaaaatcagagccgcccttccatctacgctctcgattggatccctccctcgcgcgctctccgcgtctccaagtga

SEQ ID NO: 91563 - DNA, 154 bp, Zea Mays
caaacgccataaccattaattgatttcacagcaatggaaaaaaaagagtaacaacacgacgggctgtaggatgcgctggtcactgcactgcaccacgcctacgttttacagcctgcaaaccacggcgcgctccgcaaatcaacatgagcagagc

SEQ ID NO: 91564 - DNA, 2008 bp, Zea Mays
cacaaatcaggattggtagagcccatctctgcgccctgccttgctggctctgacctctccctcccttccccttcctcgattgttcctcccccttcttttattagggttttttttgtctccttagatttgcgcctgttctcacctgtgcgcatactagtctctgcatcagagagtagagacctcggagccgatcttcaacacgcagattgggcagagctgcctgccggagggagagtggagagagagagagagagagagagagagagagctcaaggggggcaaaaggagtttttttttatccagcttgttagcttgattctctttgatccgggagagcagccgccagtccaactaatcctagctattggtgtgccggggctttgattgttctccagatccgagccacctgctgggtggactccaggaatccgagcacgaagttgacaggggagttctcagggaaaagttgcgcaggggaggaaggaagagcctgaaagggcggtgcggagagaaagactataagagcgacctgggtcccttgaggatgccgtcaagaaaccgcgtggagaggagggcgatgagatgagggatgctggccgcggtgatggactatttcagctcctgctggggcccgcgatcgggtgacgggcacagggggaagggccccgacgccgccggccggcaggacggtctcctctggtacaaggacgccggtcagctcgtcactggggagttctccatggccgtggtgcaggccaaccagctgcttgaggaccagagccaagtggagtccggatcgctctccctggctgacccgggcccgcagggcaccttcgtcggcgtctatgatggccatggcggtcctgagacgtcccggttcatcaatgaccacctcttcaaccatctcagaaggtttgcaactgagcacaagtttatgtcagcggacgtgatccggaaagctttccaagcaactgaggagggctttctttctctagtcagcaaggaatggtctttgaagcctcagattgcttcagtgggctcctgctgccttgttggtgtaatctgtgctgggactctctatgttgcaaacctgggtgactcacgtgcagttcttggaaggcttgttaaggcaactggagaggtcgtggccatgcagttgtcatcggagcacaatgcgtgctatgaggaagttagacaagaactgcagtcatcacatcctgacgatccacatattgtggttctcaaacacaatgtttggcgagtgaagggtctcatccagatctcaagatctattggagatgtatatctaaagaaaccagagtacaacagagaaccacttcacagcaagtttcggcttcgagaaaccttccagaggccgatccttagttctgaacctcaaattactgaacatcgaatacagccaaatgatcaatttgttatatttgcttctgatggtctatgggagcacctcagcaataaggaagcagttgaccttgtccaaagtagtccacacaatggaattgctcggagactagtgaaagcggcgatgcaagaagctgccaagaagagggagatgagatactcagacctcaagaagatcgaccgtggtgtgagaaggcatttccacgacgatataacggtcgtcgtggtattccttgatttgaatgccatgagcaaagctagctggagcaaaagcccctcggtttctctccgagggggcggtgtcaccgtccctgcgaagtccctcgcacctttctcagctccggcacggctgaacagcacctactgaagttgctaccactcttgaaaggaagaacacggtgcagatctgcagtggtgagagaaaaaaaaacagcaatcaagtgtagcgttacagttacacctgctgtgttgttgctctttgcaaaactactgtctagactccgcctggtaattagtgtactgatagcgaggtaaaaaaaagttagattatttgttagcagcggcagtgatttgacatctaaggaac

SEQ ID NO: 91565 - DNA, 831 bp, Zea Mays
atggccacggcgacggccctctccctcagcggcggcgggggcggcactcccctgctccgggggcacgcggccttggcctcggggcggtgctgcgcgttcccgcgctcgcggtggaggccgccgcgcctgtcggcctcccgcgcggacgactcctcaccggcgccgttcgagatgacggtggagggcgcgctgaagctgctcggcgtcgctgagggcgcgtccttcgacgaaatcctgcgcgctaagaactccgtcctggcctcctgcaaggatgaccaggacgccgttgcccaggtcgaagcagcctatgacatgttgcttatgcagagcttatcacagcggagggctggaaaggttgctaataacagcatccgctatgctgatgttaaacctgtaaagagtgcaggagctggggcagtcccacagtggatgcaggcaaccatgaagaatgcacctattacattcgagactccatcttcgagtagcttgggcatccagtcttgtgtttatggtgcactaatggttttcacgtatgctagtggaagctcgacatctttgccatctgcatacactagccctgatgtcccaggttttatcctagcaacaggatttggtgcatcactgtatttcctggcaaagaaaaatatgaacttaggtaaggctgcattgatcactgtcgggggacttgcagctggtgcaactgtcggatctgcagtggaaaatttcctgcaggttgatatcgtgccctttctaggcatccactcccccgccgtcgttgtcagtgaatttattctgttctcccagttgttggtatcactgtttgttaggtag

SEQ ID NO: 91566 - DNA, 473 bp, Zea Mays
ccaccgccattggtcgtaaaaccctagatcacgagacaaagcgacacagagctaaggatgtcgtggaccatcacggtggagagccccggctgcccgccacttcgagccctcaccaccgacatccttggcctcgtcaaagccgtcgaggcccacgcgaggctgacgggtgccgctaaggtcgtcgagacgtggggcacacctaatgcctctcgcgccatcatcgttgcaccccttaccgatcatgccactgaccctatgagtattcattgtcatgactcctcgtcgattgattctttatcatatttgctgataatcaaggtgtgcctctaattgctgctcttctgcatgtcttgactgtggcgaggaagaacaacatggttgagttgttgaatcccctcaatggacattctttagctgctgtcaagacagtgggggcaccaccaaatgatggtggcattgtaggtgatcccctc

SEQ ID NO: 91567 - DNA, 1786 bp, Zea Mays
aagcgcccgcccgacctagtgggctccgccggccgccaaacctctcgctctccactgactccgccgctccgcccggtccaaaaccccaccgctgcctctccgccggctcctcactgtgttcctcgccgatcgccgtgccgccgggcgatggggaggttatcgggaagcgggtccaggaagccgcctcccttcctctcgccctcctcatcattctcctcctcgtcgtactccaagcgctcccgcactgttcggcgcctcccgtcgctgcccaggccgcctctcgcgccgccggcgccgcaccccgccgggaggacgaggaggaggaaggcacccgcccggctgtggatgaggatggatcggtggggcaggtgcgaggtgttcatgactaacggggccttcgtcgcggaacgctccggggtgcacgcgcgcgacctgcgcatcgttgggccccttctctctcgctgccccggcatcctcgctcgagagaaggccatggtaatcgatctagagttcataagagctattgtaactgcggacgaagtcctgctgctggaacctcttgctcaggaggttatccctttcatcgataaattgaggcggcattttccattgaagagcctggaggttgatgttggggccacacaagtgggtaatgtgaatggcaagcatgctaaaactgctgcagagtgtgagctccccctcccctttgagtttcaggtgttggagctcgccctagaagctgtatgcttgtcatttcattcaagcctatctgatctgaataggcacaccatctttgtgatggatgagttgactaagaatgtgagcaccaggaaccttgaacgtgttcgaagtctgaaaagaaatctaacctccctgctcgctggtgtgcaaaaggtcagagatgaagtagagcatcttttggatcataatgagaatatggcacaactgcacctatccaggaagcaaataaaatgtccgcaggatgaaattctactggcttctgctgctttaaatagcaatcttccttcaaaaacaaagctgggtacaccaaattctgttgttaaccaagccatgggcattgctatgactgcgccactggccgacaatgtaggagacctagagatattacttgaatcttatttcatgcagctggatggaattcgcaacagaattatgatggtccgaggatatattgttgacacagaagactacatcaacatacaacttgacaaccaacgcaatgaactcattcagttccatcttgtactgatcattgtatcatttggcatagctatgaacacattgatagctggagcgtttgccatgaacatgcctcacaatggggagatgaagaagtttgtaggcccgttttggccatttgttggggccacatcatctttctgcttgttggtcagcgttgttttactgggatatgcaagggggaacaggctacttggcagttgaaggcggcgttagataaatctatgcaagatcatcttcacattgcctcctgacttggcggaaactaacgtggcataatatgggtgaaggcaagtgcctggtccatctgtatattgatgctttccaatcatacccttttggagtttgcatcgggcattgcatgccatatatgtataccgacactgtctactactattataacaatgagagacgcgacaaaaaattcctgtcattagcacaccagaactcaattgtctgattcttcagaatggtgacatagaaacaagtgattgataacagcatgttactttctgcgtttaagatc

SEQ ID NO: 91568 - DNA, 647 bp, Zea Mays
aagcgcccgcccgacctagtgggctccgccggccgccaaacctctcgctctccactgactccgccgctccgcccggtccaaaaccccaccgctgcctctccgccggctcctcactgtgttcctcgccgatcgccgtgccgccgggcgatggggaggttatcgggaagcgggtccaggaagccgcctcccttcctctcgccctcctcatcattctcctcctcgtcgtactccaagcgctcccgcactgttcggcgcctcccgtcgctgcccaggccgcctctcgcgccgccggcgccgcaccccgccgggaggacgaggaggaggaaggcacccgcccggctgtggatgaggatggatcggtggggcaggtgcgaggtgttcatgactaacggggccttcgtcgcggaacgctccggggtgcacgcgcgcgacctgcgcatcgttgggccccttctctctcgctgccccggcatcctcggtgagctgtgaattgctagctagtgaaatcctcactctagcatatcgtcgagtgaatcatatctgctattggtgagattaggctttgctcgtttcgcagctcgagagaaggccatggtaatcgatctagagttcataagagctattgtaactgcggacgaagtcctgct

SEQ ID NO: 91569 - DNA, 231 bp, Zea Mays
atgggtaagatgccttcctcttgcttccctgaacctttggcgcgcgtcctggccctgatcgttctcttctttcttctactagcctttaaggccgagctctgggactgggagctacggcaccatctagtccaggttctggatttttttgggacacgtggctcttccatggtggagcatgttgataacgtctcgcgacgtgtttggagcgctgttggtcttggtgctcgttga

SEQ ID NO: 91570 - DNA, 104 bp, Zea Mays
gcaaggacagggttgcccataaccagcagcaatttcaggcagcaatgctggaagccatctttggtttgaagagagagagaaaaacgaacaggaaagcggcaaag

SEQ ID NO: 91571 - DNA, 390 bp, Zea Mays
atgatagaatccacctgtgcaagatgtatttacatgattgagcatatgcatgtatccaaatattcatcatctgagtcacttgagtcactaggctggaactccctgacatcggtgagcttgctgccatgcttatctttccactgcacgcggcggttggaccccttgcggcccttccgcgccatgccgccaggaggctgccgcggcagcagcgccttgcgctcgccggcagcggcgtcgtccttggagccgatgcccccggaggacgcaggccgtgagaccgccgcgggagaggaaggggacgggttcttaccgctgccgttgcacgacgaggtcctgaggatgcggcgatccatcgccgggtggcatcaactgcccgtcgcgcaagcttga

SEQ ID NO: 91572 - DNA, 695 bp, Zea Mays
tacacaaaaacaatcgatcatattgacaaaagaatgacattgaagctacaaaaaataccatcctagaatatggatggcaatgtaatgtttacaaacatatgaaagaaatatgatcacacaaatctatctggtttcacgatctcgcattctcacacatacttgtatatctttgcattcccacccaggttcggtaccctctctctctctctcctcctagcgggaggtgttccattatttcaacagaagataatagcaaacatggattacaacagtcaagtcagactaccgagacaaagctgctcacctgacctggccaaatctggttctggtcctcataaaccctcctctcgtgaccggatcagactccttggcactgcagttccagtaagcccccaccgtccccaggatcggcatgtcatcgggactcgggctcggggacctcgacctccgaggcgttgagttggcggacgataccttgatgtcctccacggtgagggcgccgaggatcggccgttcgtcccggctgatcggcgagtaggaccggaccgagttgctctcgggcgtcgccgaggaaccgagccacgtggagaggctggcgtccacggaggcctcctgtttgctcggcgtgctgggggtgtagctgttgtccgagaccgccggcctcggttcctccttcctcttggccgccaccgcgg

SEQ ID NO: 91573 - DNA, 4104 bp, Zea Mays
cgcggcaagcggctacggccatatgccagccacccgcccgcggtaaccccctccgcctccccttcctctcctggcgtgcccccggcctctccctgaggccgaaagagccagcacgttctgctgctcgatcggacgtggggaagaggacgacatggggcgcctccagtaccaacaccgctcgcggtccgactcctccttcgcgcgctcctccgagaccaccgccgccgacctcgatgcgcgcagcctcggctccaccgccgccgcggaaaccgtggagtgccccttcggtcacatcgatggcctctcccgtgccgagctgcgggaggccgcgtacgaggtcttcttcatgtcgtgccgcgccggcggcggaaggggaggaggagcaggcggcggcggcgggctgaactattacccggcaggcggggacggcgggggagacggcgggtcgccgacgattggagccggcccaagaggcggcacggggataaatgtcgtcagcagcagactgaagaaggcgctgggactcaaggcgcggcggtcgtcgcagcccaccatcttgcggagcagcatgaacccgtcgtccgcgccggggtcgcctggccggatgcgcggggtgagagaccaggcgcccgggtcacccgggaagcccaggcgcccgatgacctcggccgagatcatgcggcagcagatgcgggtcccggagcagaccgacgcccgcctgcgcaagacgctgatgcgcgcactcatcggccaggtggggaagaaggcggacacgatcatcctgccgctcgagctgctccggcagctgaagccggccgacttcgccgacggcggcgagcaccaccagtggcagcgccggcagctcaagctcctggaggcgggcctcatccatcacccatccctcccgctagaccgcctcaacgcccccgtgctccggttccgggagatcatgcaggtcgccgacgctcgcgccatcgacaccggcaaggcctcggacaccatgcgcgccatctgcgatgccgtgctcgccctcgcctggcgctgcgctcccggcacggggtccccgggcgaggcctgccactgggccgacgggtacccactcaacgtgctcctctacgtctcgctgctccaggccatatttgacctcaaggaggagaccgttgtgctcgacgaggtggatgagctcctggagctcatgaggcgggcatggcagacgctggggatcgacaagatgatccacaacgtgtgcttcgcttgggtgctcttccagcagtacgtggccaccgggcagatcgagccggacctcgccggcgccgcactcacggtgctcggtgatgtggcagccgacgcgaagcaggagcaccgtgacccggtgtacacccaggtgctctcgagtgttcttggctcgatacatgactggtcagagaaacggctgcttgattaccatgaatggtacgggaagggcatggctgccaccggcgctggggcaatggtgattccgctgtctctggcactttccacgagcaagatcatcgcagagagtgtgcctgggatgggcatcgatctggcagactccgagcacgacggcatcgggagcttcgctggcaaccgtgtggatcactacgtcagatgctccatgagaaatgccttcgctaaggcattggagaacgagctcggacaagggaacagcatggtcatccaacgcgacgacgaccccagcgagaccatggcacggctcgccaaggacacggagcagctggctcagttcgagctggagaacttcagcccggtgctgaagcggtggcacccgttcccgggcgcgtccgcggtggccacgctccacagctgctacggcgtcttgctgaagcagtacgtggccaaggcgacgtgcctgaccaacgagctcgtgcacgtgctgcacgcggcgggcaggctcgagaaggccctggtgccgatgatggtcgaggacgtggcggacagcgacgacggcggcaggtcgttggtcagggaggtcgtcccctacgacgtggactccctcgtggcgcgcttcctccggacttggatcgaggagaggctcagggttgctagggagtgcctcctgaggtccaaggacactgagagctggatacccaagtccaaaggcgagccgtatgcgcgatccgcggtggagctgatgaagctggccaaggcgaccgtcgacgagttcttcgggatcccggtgaccgcgagggacgacatggttcagaacgtcgccgacggcttgggcgccatcgttcaggagtacatctccttcctcgcgtcttgcggcaccaagcagagctacctccctccgctgcctccactgaccaggtgcaaccaggactcgacgatcatcaggctctggaagagggcggcgacgccgtgccgagaagccgggacgaacccgcgcggccgcgcccaccacggccagagcgagtccatctcgggcggcaacaacccgcgcccgtccaccagccgcggcacgcagcgcctctacatccggctcaacaccctccactacctgctcagccacatccaggcgctcgacaaatccctctccttcttctcgcacggcgggtgcgcgtcgccggcgtcggtctcgaaccgccaactggcgccgtccggccgtttcgaccgtgcgcgcgccgcggcgcagtcggccatcgtccacgtcgccgaggtcgccgcgtaccgcctcgtcttcctggactcgcaccactccttctacggcgggctctacgtcgggggcgtcgccgacgcccgcatccgccccgcgctccgcgcgctgaagcagaacctgtcgctgctcgtctccatcctcgtggaccgcgcgcagccggtggccgtccgggaggtgatgaaggcctcgttccaggggttcctcatcgtcctgctcgccggcggcagcgacaggagcttcacggtggaggaccacgcgatggtcgaagaggacttccggagcctgaagcgggccttctgcacgcgcggggaggggctcgtgtccgagcaggtggtcgaggccgaggcccgggccgcggagggcgtcgtcgcgctcatggcgctgacggcggagcagctcgtggaggagtttggaatcgcggcgtacgagtgcaccgaggcggtctccgagaggcagcgcctaccgttgccgccgacgaccaggcggtggagccgcagtgagccaaacaccatcctgcgcgtgctgtgccatcgcgacgacgaggtcgccagccacttcctgaagcgcacatttcagcttcccaagaggcggtaactgctgactaggcttcgcatcgcagggtgcttttttaatcgttgcggccagtgtgcgtgcgtgtgtgtgtgttgcaattcagcacgggggagcatatagtcgaggaagggggtaacatacacaaaaacaatcgatcatattgacaaaagaatgacattgaagctacaaaaaataccatcctagaatatggatggcaatgtaatgtttacaaacatatgaaagaaatatgatcacacaaatctatctggtttcacgatctcgcattctcacacatacttgtatatctttgcattcccacccaggttcggtaccctctctctctctctcctcctagcgggaggtgttccattatttcaacagaagataatagcaaacatggattacaacagtcaagtcagactaccgagacaaagctgctcacctgacctggccaaatctggttctggtcctcataaaccctcctctcgtgaccggatcagactccttggcactgcagttccagtaagcccccaccgtccccaggatcggcatgtcatcgggactcgggctcggggacctcgacctccgaggcgttgagttggcggacgataccttgatgtcctccacggtgagggcgccgaggatcggccgttcgtcccggctgatcggcgagtaggaccggaccgagttgctctcgggcgtcgccgaggaaccgagccacgtggagaggctggcgtccacggaggcctcctgtttgctcggcgtgctgggggtgtagctgttgtccgagaccgccggcctcggttcctccttcctcttggccgccaccgcgg

SEQ ID NO: 91574 - DNA, 3367 bp, Zea Mays
tgccagccacccgcccgcggtaaccccctccgcctccccttcctctcctggcgtgcccccggcctctccctgaggccgaaagagccagcacgttctgctgctcgatcggacgtggggaagaggacgacatggggcgcctccagtaccaacaccgctcgcggtccgactcctccttcgcgcgctcctccgagaccaccgccgccgacctcgatgcgcgcagcctcggctccaccgccgccgcggaaaccgtggagtgccccttcggtcacatcgatggcctctcccgtgccgagctgcgggaggccgcgtacgaggtcttcttcatgtcgtgccgcgccggcggcggaaggggaggaggagcaggcggcggcggcgggctgaactattacccggcaggcggggacggcgggggagacggcgggtcgccgacgattggagccggcccaagaggcggcacggggataaatgtcgtcagcagcagactgaagaaggcgctgggactcaaggcgcggcggtcgtcgcagcccaccatcttgcggagcagcatgaacccgtcgtccgcgccggggtcgcctggccggatgcgcggggtgagagaccaggcgcccgggtcacccgggaagcccaggcgcccgatgacctcggccgagatcatgcggcagcagatgcgggtcccggagcagaccgacgcccgcctgcgcaagacgctgatgcgcgcactcatcggccaggtggggaagaaggcggacacgatcatcctgccgctcgagctgctccggcagctgaagccggccgacttcgccgacggcggcgagcaccaccagtggcagcgccggcagctcaagctcctggaggcgggcctcatccatcacccatccctcccgctagaccgcctcaacgcccccgtgctccggttccgggagatcatgcaggtcgccgacgctcgcgccatcgacaccggcaaggcctcggacaccatgcgcgccatctgcgatgccgtgctcgccctcgcctggcgctgcgctcccggcacggggtccccgggcgaggcctgccactgggccgacgggtacccactcaacgtgctcctctacgtctcgctgctccaggccatatttgacctcaaggaggagaccgttgtgctcgacgaggtggatgagctcctggagctcatgaggcgggcatggcagacgctggggatcgacaagatgatccacaacgtgtgcttcgcttgggtgctcttccagcagtacgtggccaccgggcagatcgagccggacctcgccggcgccgcactcacggtgctcggtgatgtggcagccgacgcgaagcaggagcaccgtgacccggtgtacacccaggtgctctcgagtgttcttggctcgatacatgactggtcagagaaacggctgcttgattaccatgaatggtacgggaagggcatggctgccaccggcgctggggcaatggtgattccgctgtctctggcactttccacgagcaagatcatcgcagagagtgtgcctgggatgggcatcgatctggcagactccgagcacgacggcatcgggagcttcgctggcaaccgtgtggatcactacgtcagatgctccatgagaaatgccttcgctaaggcattggagaacgagctcggacaagggaacagcatggtcatccaacgcgacgacgaccccagcgagaccatggcacggctcgccaaggacacggagcagctggctcagttcgagctggagaacttcagcccggtgctgaagcggtggcacccgttcccgggcgcgtccgcggtggccacgctccacagctgctacggcgtcttgctgaagcagtacgtggccaaggcgacgtgcctgaccaacgagctcgtgcacgtgctgcacgcggcgggcaggctcgagaaggccctggtgccgatgatggtcgaggacgtggcggacagcgacgacggcggcaggtcgttggtcagggaggtcgtcccctacgacgtggactccctcgtggcgcgcttcctccggacttggatcgaggagaggctcagggttgctagggagtgcctcctgaggtccaaggacactgagagctggatacccaagtccaaaggcgagccgtatgcgcgatccgcggtggagctgatgaagctggccaaggcgaccgtcgacgagttcttcgggatcccggtgaccgcgagggacgacatggttcagaacgtcgccgacggcttgggcgccatcgttcaggagtacatctccttcctcgcgtcttgcggcaccaagcagagctacctccctccgctgcctccactgaccaggtgcaaccaggactcgacgatcatcaggctctggaagagggcggcgacgccgtgccgagaagccgggacgaacccgcgcggccgcgcccaccacggccagagcgagtccatctcgggcggcaacaacccgcgcccgtccaccagccgcggcacgcagcgcctctacatccggctcaacaccctccactacctgctcagccacatccaggcgctcgacaaatccctctccttcttctcgcacggcgggtgcgcgtcgccggcgtcggtctcgaaccgccaactggcgccgtccggccgtttcgaccgtgcgcgcgccgcggcgcagtcggccatcgtccacgtcgccgaggtcgccgcgtaccgcctcgtcttcctggactcgcaccactccttctacggcgggctctacgtcgggggcgtcgccgacgcccgcatccgccccgcgctccgcgcgctgaagcagaacctgtcgctgctcgtctccatcctcgtggaccgcgcgcagccggtggccgtccgggaggtgatgaaggcctcgttccaggggttcctcatcgtcctgctcgccggcggcagcgacaggagcttcacggtggaggaccacgcgatggtcgaagaggacttccggagcctgaagcgggccttctgcacgcgcggggaggggctcgtgtccgagcaggtggtcgaggccgaggcccgggccgcggagggcgtcgtcgcgctcatggcgctgacggcggagcagctcgtggaggagtttggaatcgcggcgtacgagtgcaccgaggcggtctccgagaggcagcgcctaccgttgccgccgacgaccaggcggtggagccgcagtgagccaaacaccatcctgcgcgtgctgtgccatcgcgacgacgaggtcgccagccacttcctgaagcgcacatttcagcttcccaagaggcggtaactgctgactaggcttcgcatcgcagggtgcttttttaatcgttgcggccagtgtgcgtgcgtgtgtgtgtgttgcaattcagcacgggggagcatata

SEQ ID NO: 91575 - DNA, 1497 bp, Zea Mays
atgatggtcatgggaataggagttgagaaaacgctaatggaggtcattctgtgcattcgtgaggatatggacatcatagatcttgaggatgagacaatagatacaaagatattgaactcgatggctgttacaaatgaccatttcaagactgcgcttggaacaagcaacccatctgctctccgtgaaactgttgttgaagtcccaaatgtctcttgggaggatattggtgggctagagaatgtcaagggagagctccaggagcgagaacgagcagttccaaattgcagtctgatgaagcatttgttacttgcctttagattgttgataagcatgttggataggagagtacctccaaatcatagaagaccagttcatacagaagaaacatatagaagcctaccaagttgtcaaattgccgatgtcgcttgttcttctcacatcaaccctcctatacccgtccaccatggagggtcagcagtgaggcatgttcccctatctcagaacaatgatggtgagaagatcacaagggtgggaataagttcctccaatcctacagttgaacctttgccttcaaattctctggggaatgctattgttgatggtatgtcacaaggaagtgctgaaatgaactgttcagatgatgatgttaataccgtttcacgaattccaactacaaataagcctcatgatgagtcaatggggaatgtcgcaatcagcaaggatgatatcaatactaataataacttaagcatagagctaaagaaagaacacgacagtgatctgcatcaagattgttcatctatgacaaataaggttactattgatgctattgatggtgacaagtgtattaaaactaaagttggtgttttcagccatgcaggtcagcaggggctccggaatgaggtttctgctagcgaaaactctaaagacaaacgatctttgaattctgagaagaatactccagtaaataatactgacaatagcatgcaagatgctaagactgctgcaggctccagtaccacagatctccagaagtcatcagctttgccaaaatctgcttctcctataatgcaacctactaagcaacctcataagactttagatagctgtcttgggaagactagaagcccagatataaagtcagagatgtctcaaaatgatatcattcattcagtcctccagcgaataatggatccatccatccactccgctgccaaaacttactcctattcgattgatccggatcggttgggagatggcaccggccgacaggcggttgcagttgcagctgcatgcgtgtatgggattgtagataatgttgataaagaaaagatgagggataccacatacttgtttttgagttttgatcttttcctgttgcatgatcatctaactatgtttgctgtcgaggagtgcgttgtgaccggcggtgctgacaacagggccatggcgcttagggtccatgggtgcgaccagttcgacgcctactactcgtga

SEQ ID NO: 91576 - DNA, 2207 bp, Zea Mays
agcaggccagtccccgccccggccgggaccgacgggcgagagagcggaagcgacccagcagcgaagcgacgactagctctgcggcctctgcctgccccaagcgccgacgatgggtgccggtgctactgccagggacgaggaggctgctaccggccgccaccatgggaggaagccgcatggcgcggcggcggagtacgcgcaggacgggtccgtggacctgcgcggcaaccccgtgctccgctcccagcgcggcggctggaccgcctgctccttcatcgtcgtgtacgagctgttcgagcggatggcctactacgggatctcgtccaacctcatcatctacctgacggacaagctccaccagggcaccgtcgaggcctccaacaacgtcaccaactggtccggcaccgtcttcctcacgccgctgctcggcgcctacgtcgccgacgcctacctcggccgctactggaccttcgtcgtcggctccgccatttacctgctggggatggtgctgctggtgctgtccgtctcggtgccggcgctgaagccgccgccgtgcggcgccggcggcgtgtgcccgcaggcgtcggcgctgcagctcggggcgtacttcggcgggctctacatcgtggccctgggcaacggcggcaccaagcccaacatctccaccatcggggcggaccagttcgacgagttcgacccgcgggagcggacgcacaagctgtccttcttcaactggtggatgttcaccatcttcctgggcatcctcttctcctccaccgtcctcgtgtacctgcaggacaacgtgagctggtccgtgggctacggcatccccacgctgggcctcatggtctccatctccgtcttcctcgccggcaccaggctgtaccgccacagggtgccgcagggcagcccgttcacgagcatgggcagggtcctggccgccgcgctctggaagtggagcgtcccggtcccggccgacgccaaggagctgcacgagctggacgtcgaggagtacgccaggaagcgtaggttcaggatggactccaccgacgccatggccttcctcaacaaggccgccgccgtggccgtgcccagcggcgggccggcgtcgacgccggcgtggagcctctgcacggtgacccaggtggaggagacgaagcagatcctgaggctggtgcccctcctggtggccatgatcgtgccctgcacgctcatcgcgcagaccaacacgctgttcgtgaagcagggcacgacgatggaccggcacatgggcccgcgcttcgagatcccggcggcgagcctgggcgcgttcgtgacgctgaccatgctggtggctgtggtggtgtacgaccgggtgttcgtgagggccgtgcggcggtacaccaaggacccgcgcgggatcacgatcctgaggcggatgggcacgggcatgctgctgcaggtggcgaccatggcggtggcgtcggcgatcgagagccggaggctggcctacgcgcggagccacggcctggacgccacggggggccagctggggctcaccatcttcgcgctgctcccgcagttcgtgctgatgggcctggccgacgcgttcctggtggtgggcaagatcgagttcttctacgaccaggcgccggagagcatgaagagcctgggcaccgccatgtccctcaccgcgtacggcatcggcaacttcctcagcagcttcctgctgtccacggtcacgcgcgtcacgcgggaccgcggccacgcctgggtcaccaacaacctcaacgcctccaacctcgactactactacgccttcctcaccgcgctcggcgccgtcaacttcgtcgccttcctcgcgctcagcgccaggtacaggtacaaggcccagtccaccgacaggatcgacgctgccgtcggcctggggaccgagaaagccaagcttcaggcggagccactgggctgacgtcgacgacgacgacggggtgcgtctgcctctgctgttaaaagcggagaagatcagccatgaatgcgtatcgtccaaggcgacgtgtgtatgtgtagcatcaactcacttgtaaaaaaaaagcacaggatttccacccgaaaccaaaagcagtgtctgcagtatcaactcccttgtaaaaaaagacagtccatgatctttcatttcattcacacgcaaaaaagaagagtatagatcgatccctggctttcttaacaac

SEQ ID NO: 91577 - DNA, 1832 bp, Zea Mays
gcgtcaacgacgttgtctcgtcttgcaagatttttccccttctaaaaatacatttggacctgaactgttgttaagctaaagtggcgggcggaactgtttttaaaaatgtacgacgtaactactactacaggggatggtgctgctggtgctgtccgtctcggtgccggcgctgaagccgccgccgtgcggcgccggcggcgtgtgcccgcaggcgtcggcgctgcagctcggggcgtacttcggcgggctctacatcgtggccctgggcaacggcggcaccaagcccaacatctccaccatcggggcggaccagttcgacgagttcgacccgcgggagcggacgcacaagctgtccttcttcaactggtggatgttcaccatcttcctgggcatcctcttctcctccaccgtcctcgtgtacctgcaggacaacgtgagctggtccgtgggctacggcatccccacgctgggcctcatggtctccatctccgtcttcctcgccggcaccaggctgtaccgccacagggtgccgcagggcagcccgttcacgagcatgggcagggtcctggccgccgcgctctggaagtggagcgtcccggtcccggccgacgccaaggagctgcacgagctggacgtcgaggagtacgccaggaagcgtaggttcaggatggactccaccgacgccatggccttcctcaacaaggccgccgccgtggccgtgcccagcggcgggccggcgtcgacgccggcgtggagcctctgcacggtgacccaggtggaggagacgaagcagatcctgaggctggtgcccctcctggtggccatgatcgtgccctgcacgctcatcgcgcagaccaacacgctgttcgtgaagcagggcacgacgatggaccggcacatgggcccgcgcttcgagatcccggcggcgagcctgggcgcgttcgtgacgctgaccatgctggtggctgtggtggtgtacgaccgggtgttcgtgagggccgtgcggcggtacaccaaggacccgcgcgggatcacgatcctgaggcggatgggcacgggcatgctgctgcaggtggcgaccatggcggtggcgtcggcgatcgagagccggaggctggcctacgcgcggagccacggcctggacgccacggggggccagctggggctcaccatcttcgcgctgctcccgcagttcgtgctgatgggcctggccgacgcgttcctggtggtgggcaagatcgagttcttctacgaccaggcgccggagagcatgaagagcctgggcaccgccatgtccctcaccgcgtacggcatcggcaacttcctcagcagcttcctgctgtccacggtcacgcgcgtcacgcgggaccgcggccacgcctgggtcaccaacaacctcaacgcctccaacctcgactactactacgccttcctcaccgcgctcggcgccgtcaacttcgtcgccttcctcgcgctcagcgccaggtacaggtacaaggcccagtccaccgacaggatcgacgctgccgtcggcctggggaccgagaaagccaagcttcaggcggagccactgggctgacgtcgacgacgacgacggggtgcgtctgcctctgctgttaaaagcggagaagatcagccatgaatgcgtatcgtccaaggcgacgtgtgtatgtgtagcatcaactcacttgtaaaaaaaaagcacaggatttccacccgaaaccaaaagcagtgtctgcagtatcaactcccttgtaaaaaaagacagtccatgatctttcatttcattcacacgcaaaaaagaagagtatagatcgatccctggctttctt

SEQ ID NO: 91578 - DNA, 3110 bp, Zea Mays
ctttcacatggcctgccgtgccgcgtctctcccacgccactctcgccggtcaccagatcgtcgctcgcttccgttattaacccgttttgtagctgattccggggctcctgctgcccgcggtccacccttcggtcagctaataacgcctccgcctcttcccttccctcccttcccccttgggcttgggccctgcccattaaactcgagcagggcactgtttctacaacgtttgccgttctcgaccgaccattgatggccacgaagagttaagccctgctctgggaagggcactgtttctttagcttccatgcgtagtaggcacgcggcgcacgcaggcaggcaggcgggcatggaaaagggaactgtagcgcccacgcgttaccgaccgagagagagagagtcgagcgagtcctccacgtccgcctccgccccccaaaccaaaggcatacaagccgtcgtgtgttaatggaaacggacaagtgtgaggaggaggagcaaagccagcagccttttttcccttgacgcctcgcctcgcctcgccttgctgccccctcctcccgttctcgaacaggtcaagccgcgcctcctctcgcctgcctgcgtccttgctcttcctcctcctccctttgcccgtcgtccgctccgcttcgttgtctcatccgctgccgttctagcaagcggggcagcgtcgcgcctcggcctgatgctccaccacgctccagtccacagcctccccggtccttctcgttcccgttgagagcggcggcttgcccggcccccgggtcctcttcacctcacctaaccttgtttctagtttcggtccgtcggttggtgcctcgtcggctgcctctcgctgcttggcccgtttcttcctggggtcgcgggcctggagtacacaagtatataatcttcccggccgtcgtcttctctttctcgacctgcctctcttcgcattggcccgttcccgttcctcgctccctgctgctccttccgagacagactgcctgggatcgaagcacacgataggagagacctcctctgtcgtctgtgcctgggtgagaggtcgggtggtggtggcagtgcttggatgcttcacgcgaggccttggatggtggatgctgcgtgctgctggtctctgcgctgcgcctgaggtactctagagattagtttggccgcatcctccgtatcttctacttcttgaccagggatggagcttgtatacatggaaaggagaaacggatcgtacgacgatggcgcggttccagagttcagtggaaggggggctggaggggatcaggatcaggacccgcccgctgctgcatccgaggtccagtctgactcgcgtcagacaccggacgagaagaagagcaagggctgccaatcatgccgtgacccattctgttcatgcagcggcggcacgccccactcggaactgttccccccacatcccgccaagatgatgatcctggagttcctcatcgcgagcctcaggcacccgacaagaacccacaacgtcagtgatctcgacgacctgatcgccgacggggtcagccaagggagcgtggtaaacctcggcccttctgagaagaaggtgctggaatctctgcacgccatggtaaacgccaagacgaggccgaagagcccgtcgccgttcatggcgggatctaagctgaggaaaatccggtccaagtcccacgtcataacgcagtcggaaatactgaagctcatctctcctgagacgtgggaagcctcctccttccctggggcgtctccgatgatcggcggaggcacggctgaggacggcgtccatgggaacaagccgccgccgccgtgctgctcgtctgtgagctcaaaccagcatgttctgtcacggtgcccgtcgtccctcagcgcatgccttctacagtgcatatggaaggatggcctgcctcattttgagctgtcactggacgatcatcccattgcggtgtacgctgcaagtccagtcagggtgctggagaaggacagggccttcgactacgtctacatgatccattcgggagagcaaggaagaaaagactggatgggccactcgagcaacgtgtccagacttgtgggcaaggtgaaggtgtcaagttctcttgttcttaacccagacaagtcaggtcttttggaaaccgagtttgttctgtatggttctccggacgactatcttaggcagatgcgcagtccctacagcgtgccgaaagggaagggccttgtcaggagggtgacagagatcatgagagcaggcaatgtttccgctagcccgagacatccctggaagctgggcaaatcttcctctcatcagttcgacgacttggctggagtacttgaaggtgaaatgatcagtgctggaggatcagacctggtgagtctcaaggccgacgatctgccgtccaaccaagaattagcagcgattgtggtgagggaacagcggcgcagacgacggaaagagcctgtttcgggtggctggggcctcaagttccttgagaaagcaggactgaatcgcccacaaggcactgaagaaactgatgttcagaacagtgatggtgccacacattgtgtaactgttgttgtccccagaggctaccacggcggcgtggtatcaaagagtagtcgcccgtcaggcctcgtcgagagatggagatctggaggacgctgtgactgcggcggatgggatcttggctgccccatcagagtgctcaacggtgatggatgtggctccttgcctgaaggagagtcacgggacagaaggtcggtagagatatcgatcaagggtgcaaagaatgagacaatgttgaagctcgtgaatatcacggaggacttgtacatcctctacttcgactcgagtatttcaccattgcagtgcttctcaacagggatagcgattgtgcacagccgagcgccagagctttgccccaaactgtgaattgcgcacagccaggcacgcacccgagctttgccccccaaactgtgaattgcaaagcttggtgtagctgaattacaaagattcgtgaagcactatgtacatgtagatagtagaatgggaataattcttgttatttttaacttatataattttgagagag

SEQ ID NO: 91579 - DNA, 753 bp, Zea Mays
actcatagtcattaatgttgtggcctggggcactggcacagcaagagagaacaattctgagagccctcgctcctccaattcgcacccctgagcatccatcccaactataaccggatcgaatagtgcaacctggggctcagatttgctacagccaagcaggactaagccagtgggtctggtgaagccgaggaacatgacgcagcgagcgcgcccataaccccagaatcgggccccgacccagacggcgacctcagagacaatgacggcgaccttgacgaccaccccgagcgcgtcgatcccgttcctgaagcccttgtgcagctggaggccgaggaagccctcgacgaccttggaggtgttcttggagagcttgtagctggacttgaggacggcgagcacggcgacgcccgcgggcgacgcggcgtggaggcccgccggcgcggcggcggcgaggcggaggagcgaggcggcggcgagcgcggccttgaggcgcttggaggaggggagcgaggggaggcgcgcggcggcggggccgagcgtgcgtgccgccttgtacgacttggaggcggccttggacgcggctaggatggcggcgacaggggaggaggcggtggcgagcgcccgcggcgtccggagcgcggcggcggcggcggacgtggcggccgccagcggcttgagcgcgcgggagcgggagagggcgacgagcaggcgcaccccgaaggctacgccgagcgcggaggtggcggccgcggc

SEQ ID NO: 91580 - DNA, 1179 bp, Zea Mays
atgccgccccctcccttctcccattacacccgcaagtggatcgagagccatttctctcttctcaaggaggaaatttcaagccccatagctgctcatattctcaacttctacgatggcggccttggtgacgacctcttcgaagcggcgactaccgcctccggtccatttcatgccaccgatgacgatgtttcttcgtctaccactaccacccctcctatctgcggctacagcgacgacgctccggctgctgctggtgccacggcctactccccattgccatccttggacgccactctcacggccctccttgagcaagagcaacaccacggccttgacaccggggaccttccgcagatcaatggcctttcagaagtagcatactacccaaccgccaccgatgaggccagcatagggcaattcaaccagatggggcttccggataccttagctgaacagatgcttccgatgcagatgaacagcagtgcatccgccttgatgccactcacttcggactacgatgagtgcttcacagcggcgttagctgaagggttcatgggtctggatggagccatgtatcatccgcaaactggagcaattcttccaggctgcgatgcagaagcatcacagcaggggttcttcaacagtgccagcagcaatggtctggtgatgattggcgagtaccagaagatgatggagggtgaaggactgacaacaacatatgacgacacagattccatgaaaggggcatttaatactaatgcagagatgcaggtaggaggaaatgatcagcacctggtaaacggatgcaatgggaacccagaactatcaggattggaagactccacattcaaggttgtccgcttgtcacccgaagagaagaaggaaaagatccataggtatagaaagaaacggaacgagagaaatttcaacaaaaaaataaagtacgcatgcagaaaaaccttggcagatagcaggccccgtgtccggggaaggttcgcgaagaatgatgagctctgtgaagcagcagcgcaatcaggctccctgaattatggacattatgaacaaactgaccatatgaaagaagaagccatgctggacacatctgacattcttgcgcatctaagtgaattaaattcctacaactacaagtataaatgcaccatcgaatcatggatgtga

SEQ ID NO: 91581 - DNA, 219 bp, Zea Mays
atggggccgtcgccgccagagaagtacaaggttgtggagcagatcgaccctgaacaagcgatggacgccgaggtggtggagcagatcgactgggcgcctacaggcttcgccgccaaggccgccgcgctcttgtatctcttgcgtgccttcatgtcacagcgcatgggcctcgaggcaccggctccggggctacaaaggcacgccagtgtgggaggctga

SEQ ID NO: 91582 - DNA, 2116 bp, Zea Mays
ctagtactcgctcagtcggtcgcttacaaatagccatgttgcaccgttcgtggttccatcccattcccatccagacatcgacatggagccgttttttctgttcgtagggctggcccttgttctctgcttcctcaccctgtactaccgccacttgcaatctaagaaaacgagccctttggagccgaccgaatggccaatagtcggccatctccccggcttggtcgccaacatccatcacttccacgactgggccaccggtgtcctcgccggcgcgggctacaacttcgaagcccgcgcaggtcgcaccggcgtgcggtacttcatcacctgcgacccctccaacgtgcgccacatcttcacgtccaacttcgccaactaccctaaaggcgaagagtacgccgccatcttcgacgtcctgggcggcggcatcttcaacgccgacggggagtcgtggcggcgccagcgagtgaaggcgcagatgctcatgaccggccctcggtttcgagccttcacggcgcggtgcagccgcgacaaggtggagaggagcctcctgcctttcctcgcccaccacgccgacgacgacggacgagcgcccccgtgcgacctgcacgacgtgttcctgaggctgacgttcgacatgacatgcactctcgtcttcggcgtcgaccctgggtgcctggcgttcggcttgcccgtggtccccttcgcgcgcgccatggacgacgcgctggagacgcttttcctccggcacatcatccccatggcgtgctggaagctgatgaacgtactggaggtagggcaggagaggaagatggccgcggctcgaaggacgatcgacagcttcgtcgccgccaccgtcgcgaaacgcagggccgacaagctgaaaggatgtgaatgcgtcagtaactcgtatgacttgctgtcatccttcatctgccacgaggacgacgactcgagcgaaaacgacgacgtgttcttacgtgacacgacggtgaacctcctgctcgccggccgggacaccacaggcgcggctctgtcgtggttcttctacctcgtctccaaggaccctcgcgtcgagcagaaactactggacgagctcgcgcccatcgctgcttcacggcggacgaaaggtgcagaagatgctgcacacgccggcagcggcatggtgaccttcgacgcagacgagctcagcagcctggtttacctccacgcggcgctgagcgagtgtctgaggttgtacccgtccgtcccgttcgagcacaaggtcgcggccgccgccgacgttctgccgagcgggaaggagttgaaggcgggagacaaggtgctggtgttcaactactccatgggcaggatggagggcgtgtggggcaaggactgcatggagttccgccccgagagatggctcaaccaggaagggaccaagcttcggtacgagccgtcctacaagttcatctccttcaacgccgggccgcggacgtgcctcggcaaggagatggcgttcgtgcagatgaagaccgtggcggcggccgtgctgtggaacttcgccgtcgaggtggtgcccggacacgtcgtggagccgaagctgtccatcatacttcacatgaagaatgggctcgccgtcaaggttacgagaagggacgacgggacggcgccgtcgtcgtcgtgcgtgcgtcacacggcttgcttttgagttgagacttgagagactgaccacacagtgcgtctcgctcgcctatatgtgagcactgcgtggtttatatgccaacacgttgcatgacacgtttcaatatgcatgtggccgtacgtggcatatggtgtcttcttgcacactagctagcggaccaatgggcatgggcctgttggggatggtatatatttttcattcatatatggtgttgctcgttactttgtacgtttctggcagtttccatccaacactttcggttagcaagcaaacatttcatttcctggagtagttgtaaacgctggaatgctatggtaggtcaggtaggatgatcaagatcagtagaggtcgtgctagccgtgtggcgcttggacgcgtggtatgtgctggctttattatatatacattctcggtggtagagcttagttgtca

SEQ ID NO: 91583 - DNA, 1615 bp, Zea Mays
cattaacgtcgtcagccgtaacaaacacagcggggggaacgggcaaggcacctggcggtggtggcctcttgctgtggtgggcgagacgagcgcggcgcggggcggagcggaggcaaggcaagaggggaaggaaaccccaccaaggaccaagcagaagcaggcgagcgtggcagttcaggtccagtctccactctccactccagtacactccacaccatcaccgccgccgccgccgccgtgacgagggggcagagggcagtgatagagcagagcagagagggctagggcggggagacgaggccgagagatccccaggaccccggtggcgagatgggcattcgcagagctcgccggttcctcttcctggccacctccgtcttcggcctcttccagtgccgcggggacctctcggcctccgactgcgccgcctgcgtctcccgcgccatgtcctcctggcccggcgtctgcggcgcctccgtcgccgcgcgggtccagctcgccggctgcctcgcgctctacgaggtgtccggcttcccccaggtctccggcgtccagatgctcttcaagacctgcggcaccggcagcggcggcggcggcggcgacttcgagatgcgcagggacaccgccttctccgcgctcgagggcggcgtcgccaccagctccggcggcttcgtcgccaccagctaccaggccgtctacgccatggcgcagtgcgagggcgacctctccacgggggactgcagccagtgcgtcacccaggccgtgcagcacgtcgaggtcgagtgcggcggcgcgccctccggccaggtctacctcgacaagtgctacatcagctacagctactacccccacggcgtgccccacggcggcggcaccggagggcagcagacagcaaagactgtagccattgtgctcgggggagccgtaggcctgggtttcgtggtcatctgcttgcttttcgccaggagcctggtcaagaagaaggatggtgattactgatgggagggagagcacggaaggagaatgtggacaaagacattgtgggggcatggtatggcattttgatggtagggttgtgtattttgtttcttcaaggtggtgagtggaatacagagggggtgttttttggctcttcttcctctggattggtctaaacgaacaagccctgagggtgccatcccccccatgatggcagagagaggaaaagaggtggcaagctgctgttcaggaaagaagctgtccacttctggggctattttgattctcagctgaaattggtagacgagctcggggctgtcgtcttagcctctcctgcttagggttctaggagtacattgattctcttgtatttttttgacccccgccaaatgaaaaatacctgttaggtctaggctaaacgtacttagtctcctgtttaaggttgcaggagcgggttgggtgtctatttggttggtctgttatggaagacgaacttccagatgctctgggaccagattttaactctagggtttggaagtagtcggtgctaccgccattggttaactggtcgctagcctttctgtatggacattgctgacctggtaaccacacagctgtgctgtgcagctgttctctt

SEQ ID NO: 91584 - DNA, 2458 bp, Zea Mays
cgccgccacgccgtcgctgatcaccagcgcccatcacacaccgccttagacgcccatgctcgccgtggccgcgtccctcagggcctcggcctccgcggtggccgaagctggcggcgacccggccgttcttcacgcggtcctcatcaagaccgcctcgtcctctcgcgccgcctacaacctcctcttctcccgctaccatccgtcgctctcgctgcacctcctctcccacctcccgttctgcttccgccccaccgccggctcgctcacctcctcgctctcctccctctccgcttcctccccggcctccgcgctcccgctcctccgccgcgtcctcggcatgtcccctgctctcctctgcgacggcccgctatcctcactcctccgctccatgccgccgtccatcgcaccgcacgtgcacgccctcgccttcaagctcgccctctcgtcgtccccctactccgcctcttgccttattactctctactccagagcccgctccccggcatgcgcccgccacctgttcgatgaaatccccgttgcaaatcgggactccgtttgctactcctccacgattgttgggctcgcacagaatgggtggtacgaagaatccctctctgtgttcgctggcatgcgcgcaaacggtgttgattctaccatgcatgcgctctccggttctctccgggcagctgcagggcttgctgtgctggagcagacttgtgggattcacgcccatgcggtggtagttgggcttgatggaaatgtggctgttgggaccgccctggtggatgcttatggtaaggctggagatgtggatgatgcagccaaggtttttgaggggttgggtggtgaccgaaacctgattacatggaacgcggtgctttctgctcatgctcagcagggagatgtgcaggaggtcactggactgtttaaccagatgatgaagctgggttttgcccctgatgggctaacattccttgctgttctcacgtcatgtagtaatgccggagcagccactgaagccaagttttggttggaagcaatgcagtcgaagtacggcgtgaagcctgaccttgagcattatacttgcgtggtgggtgcaatggcacgggtggggcatctagaggatgcagagagttttgcttgtacaatgccatgcaaaccagatgcagcagtgtggcggacacttctaatgggctgtgtggttcaccgcagggttgacatggcagaatccatgggacagaggcttctggagattaatcccaaggatgactcagcttatgtcatgcttgccaacgtctactcaacagctgggaaaacaaatgaggaggctgaggcatggactgcaatgagggaccatggggtcaggaaggaaggtgggcgaagttggattgaggtcagagggctggtacatgtttttgttgcaaacgaaagaaggcatgaacagctgctagaaatatatgacaaactgcatgaattgattcaagaggtagagaagttagggtacaaggaggcagatgagagactttggcatcatagtgaaagattggctcttgcatatgggttgatcagtggtgctgcaccatcaggaaaggtgttgagaatagttaagaacttgagaatatgtgctcattgtcatgaattcttcaagtatgctagcatggtgatcgacagagtaattgtagtacgggatgtcaataggtaccacacaattaagaaaggtgattgcagttgcagaggctgctggtgaaacacatatatcttgaggataaactatgaggcaagaagcatctgtatgatttgccgataatccacgagataattgactccaggaaaaaaactcactgcaggattgattggaatttgggaacttgcttggagttgttgccatagggccaacttccctacatgtttgaaatcttgaagagaactgtggtcttatggtgttgcagacaccataatatcttgtttggatagacaccgaagcatcttgttactcgtggagcataaattaacatggcaagtgatgctctttaagtgtcaattattctggggaacatttcgtgcctgctgattaacagtttgagttctcagagatgccccagctcaatagttgcttcttggtcttgtcttagggccgttatgctcatcttgttcggtgacataaactgctgagaggaaagtaccattcctcagttgatccatagtcggtagcatccgattgattcttctctccctttgtttatgattgtttgggttttcatagttttttcctttttattatgacttagttatttttttcctttctattatgacttaattgaaattaagtggatacagtgaaaaaagttcagctggactagtacttcaatctgctaatttactatatatagattcaagataatataacagaaagaatctaaagtatgttagaataaactataggcagttttttctacca

SEQ ID NO: 91585 - DNA, 2716 bp, Zea Mays
acaactcactagtcaccagtaactttaccaatccgcgccggtggtaaccctgccttcggcggcggctagccggtatccagtgtgcgcactccctctatctccctcttggcgacgactgggcggccgtcgctgctgccctacgccgtcttcgggctcttcgttgtcgacgagcgccacaaggttcctaccatttttaagaaaaaagatcaatggaggcagctttgtcattctccaaggacagcccaccaatttcgataatttgtgctgcaaagattgtgggtctacccctaaccatcaatcatagcctcgctgctggctcggcacccaccctacagtttgcttctggagaatcactccatggtgtcaacccaatcatcctctacattgctagaggtgcatcaattgcctccttatctggaaagaatgatattgagtttgggcatgttgttgaatggcttgaatatgcccccaccttcctttcaggctctgaatttgaaaatgcatgcttatttgttgatggattcttggcctcccggacctttctggttggtcatggcctgacaattgctgacattgcagtttggtcaaatcttgctggaattggtcagcggtgggagagtctaaggaaatcaaagaaataccaaaatcttgttcgctggttcaacagcatagattcagaatacaaagaggcactgaacgaagttgtggctgcatttgttgggaaacgaggtattggaaaatctcctgcacctagccttaaggagaaggtacatgactcaaaggacccatcagctccagaagttgatctccctggtgcaaaagttgggaaagtctgcgttcgttttgccccagagcctagtggttacctccatattgggcatgcaaaggctgcactattgaacaaatactttgctgaaagatatcaagggcgcttaatagttcgatttgatgacacaaacccttcaaaagaaagcaatgagtttgttgagaatcttttgaaagatattgagacgttggggatcaaatatgatgctgtcacatacacatctgattatttcccaaagctaatggaaatggctgagagtttgataaagcagggtaaagcatatattgatgacacaccaaaggagcaaatgaggaaagagaggatggacggtattgagtcaaggtgcagaaataataccgtggaggaaaatctctcattatggaaagagatggttaatggaactgaaaggggcatgcagtgctgtgtacggggtaaacttgacatgcaggatcctaacaagtcactcagggatcctgtttactaccgctgtaatactgatccacaccatcgtgttggttcgaagtacaaggtctatccaacatatgactttgcgtgcccatttgtcgatgcattggagggggtaacccatgctcttcgttccagtgaatatcatgacagaaatgcacaatattatcgaattcttcaagacatggggttgaggagagtggaaatttatgaattcagccgattgaatatggtttacactcttctaagcaagcgaaagcttctttggtttgtacaaaacaagaaggtcgaagattggacagacccacgttttcccactgtccaaggcatagtacgtcggggcttgaaggttgatgcattgatacagtttatactccaacagggtgcttcaaaaaatctgaatctcatggaatgggataaactctggacaatcaacaagaagataattgatccagtgtgcgcaaggcatactgctgtgctaaaagaccagcgtgtcatctttactcttacaaatggtccagaggagccatttgttcgaattttaccaagacataagaaatttgagggtgctggaaagaaggctacaacctttgccaacagaatttggctcgattatgctgatgcggcagctattagcaagggtgaggaagtaacccttatggattgggggaatgctattgttaaagagatcaaggtggagagtggagtaattactgaactagttggagaactgcatcttgaggggtctgtgaaaacaacaaaattgaagatcacatggctagcagatatagaggagctagttcccctttcattggttgaatttgattacctcatcagcaagaaaaagctagaggaagacgaggacttcctcgacaatctcaacccttgcactcgacgggaaatcccagcccttggagatgcgaacatgaggaacatcaagcgtggagaggtcatacagctcgagaggaaaggctactataggtgtgatgccccttttatcagatcgtccaaaccggtggtcctgtttgcgatcccagatggcaggcagcaggcctcgcttagctaggcatggtgaccaccttttgggcacatggaattcctgagttggcgatgagtattgttgcattgtacactttaatattgtactgtgattaggctttactcgcggtggatgtctttcaccgctagatggccagaggcatatcctgccaaccaagcagagcagccattttgattttggtctatgatacttttacctgcgcttgaatattcctatacttctctagcagggccttcgttattttgccgttagattatttttactgcgtcggctgctattttcttttgcccaggtattaatcaatcatggacgggcatggtatgtagctgtgatgagtaaatgcatgtggggaccctaaggttggg

SEQ ID NO: 91586 - DNA, 1712 bp, Zea Mays
gaaaacgacaccagagaacgaggtggaaaggtgaggccgttccctcagccgtaggcgagcccatccagcaaagcagtggcccgacgcggcagcgagctcggcaacggaacaacccgacgccacacacacacgcctgctgttcccgtgcacgcatgcaggtgtcaggtgatgtgccgcggctaccgcaggagttaaaacccgagcacatgctatggttaacgagcaaacgccgcagcggcactgcggtagcagcatcgcgcggcaagctcacctcatccctctttcaccccacctctgcaattgcaagcaaagctccggcctccggatcaggatcacactgaccaccgcgagcgcgtgccggcgtccagtggttacgtcgagggagcctaggctagcgaggaacaagcagccaccagcccgccacgatgctcgtgaggagcgcctccacgccggtcctcggcgcgctgcacccttccggctgccactcgccggcggtctcctccccggccgtgcacttcgccgagtcgccggcgtcggccgcctaccacgcgccgcccatctcctgccacctgggcgggcccgggtccgggtccgaccacgagcgctcgcgcagccgcggcgccggcgccggcatgcgccgcacgtgctccgaggacaacctcgcgtctctggccggcggccgcgcggacgaccacgaccaccaccaccttctcctcccgccgtccggcaagggcgcgccacgggcgcggccggtgccgctcgagaccatccagtcgttcaggggcccgcatgcgtccaccgacgacgaagaggaggaagacgacgacgacgaagacgcgtacgaggtggagcgggagctgcgcttcggccagttcagctttgccggcggcgcctactcgcaggagcacccgctgttcctggccaggggcctcggcatcgaccgcctcggctcgggcctcctcagcgccgacggcggcggcgggttcggcggcagcgacggcagcgggagcggcggcggcggcgggaatttggtgacgtcggggaacggaggggaccgctccggcatcgagacgcactacaagaagatgatcgaggaggacccctgcaacggcctctttctcaggaactacgcacagttcctgtaccaggtgaaaggggactacaggagggcagacgagtactactcccgcgcgatcctcgccgaccccgacgacggcgagctcctgtcggagtacgccaagctggtctgggaggtgcaccgcgacgaggaccgcgcctccagctacttcgagcgggcggccaaggcgtccccgcagaacagccacgtgctcgccgcgcacgccgcgttcctgtgggacacggacgacgaggagggcggcgccgacgcgctcagctacgcggccttcgctcagccggcgcactcgtctctggcttcggcgacggcaacaacctgaactctctcgccatctcacgagtctcgagagcggttcctccgcagtcgaaatggagcgtgacagtggcctctgctcgtctctgtctgtagtagcataccaataatactactcgcgaactctctttctgagcaaacagattccatagcgccgtgtagccacgcgatgattttgcgagcgagttcgtctactagtactacacagacacaggctcaatcggttcaaccgatacatgctggtggctgtcgcctgtcgcattgc

SEQ ID NO: 91587 - DNA, 1737 bp, Zea Mays
gaaaacgacaccagagaacgaggtggaaaggtgaggccgttccctcagccgtaggcgagcccatccagcaaagcagtggcccgacgcggcagcgagctcggcaacggaacaacccgacgccacacacacacgcctgctgttcccgtgcacgcatgcaggtgtcaggtgatgtgccgcggctaccgcaggagttaaaacccgagcacatgctatggttaacgagcaaacgccgcagcggcactgcggtagcagcatcgcgcggcaagctcacctcatccctctttcaccccacctctgcaattgcaagcaaagctccggcctccggatcaggatcacactgaccaccgcgagcgcgtgccggcgtccagtggttacgtcgagggagcctaggctagcgaggaacaagcagccaccagcccgccacgatgctcgtgaggagcgcctccacgccggtcctcggcgcgctgcacccttccggctgccactcgccggcggtctcctccccggccgtgcacttcgccgagtcgccggcgtcggccgcctaccacgcgccgcccatctcctgccacctgggcgggcccgggtccgggtccgaccacgagcgctcgcgcagccgcggcgccggcgccggcatgcgccgcacgtgctccgaggacaacctcgcgtctctggccggcggccgcgcggacgaccacgaccaccaccaccttctcctcccgccgtccggcaagggcgcgccacgggcgcggccggtgccgctcgagaccatccagtcgttcaggggcccgcatgcgtccaccgacgacgaagaggaggaagacgacgacgacgaagacgcgtacgaggtggagcgggagctgcgcttcggccagttcagctttgccggcggcgcctactcgcaggagcacccgctgttcctggccaggggcctcggcatcgaccgcctcggctcgggcctcctcagcgccgacggcggcggcgggttcggcggcagcgacggcagcgggagcggcggcggcggcgggaatttggtgacgtcggggaacggaggggaccgctccggcatcgagacgcactacaagaagatgatcgaggaggacccctgcaacggcctctttctcaggaactacgcacagttcctgtaccaggcaagcagcagcagcagcagcatctccttctcgccttctaccgtcaatttggagttttggacgacgcgcagatctcgtatacaaaatttttaattcttcttctgacggcggcacctacctgcgctgcgcattggattggatctcaggtgaaaggggactacaggagggcagacgagtactactcccgcgcgatcctcgccgaccccgacgacggcgagctcctgtcggagtacgccaagctggtctgggaggtgcaccgcgacgaggaccgcgcctccagctacttcgagcgggcggccaaggcgtccccgcagaacagccacgtgctcgccgcgcacgccgcgttcctgtgggacacggacgacgaggagggcggcgccgacgcgctcagctacgcggccttcgctcagccggcgcactcgtctctggcttcggcgacggcaacaacctgaactctctcgccatctcacgagtctcgagagcggttcctccgcagtcgaaatggagcgtgacagtggcctctgctcgtctctgtctgtagtagcataccaataatactactcgcgaactctctttctgagcaaacaga

SEQ ID NO: 91588 - DNA, 581 bp, Zea Mays
gcacgttttgtagaagtttgtatcttcgttaaaaattatagcagtacaaatcatagcacattctgtaggtgtaggatacagtaacacagcagcagaacatcaaacccatctcctgccaggctctgagcaaacgccaaagcctccaacgtggcacctacgtaccgtaccccagtcacccaccccacaccctacctcgctcgcagtcgcagcttccgctgtacgcacactactgcgcggtgcacgcaccgacgacacggcggcgcagcttatgtatgagtaagtatagggactcgccatacaggtagtcatcgcagcgtgccaccccgtctagcgatcgaacacagtcgacggggaacgccggccggtccggtcagttggtgagcgcgacggcggcctcgtgcacgaggggctgggtggcgtgcgcgacgccctcggcctcccgctccacctgctcccggcacgcctcccgcgcgcccggctccgtcatgcgcttgacgaacgcggcgaagcggcgccagttgtcgggctggaacaggtcgggccccatgcgcaggtacgtgaaggccaccatgcggtcctcg

SEQ ID NO: 91589 - DNA, 181 bp, Zea Mays
actcttgggatgttagtgttctataagttgctttcctctaaaagcgaccgcttccagccatctttgttagaagggacacagccagtgaatagctttgtagatggtcccacggattgtgatttttttctttttttcacaacctgacctggattggagtctgtatcaatcctgaagatcaata

SEQ ID NO: 91590 - DNA, 1487 bp, Zea Mays
atgcccgcaggcgacggcgacgcgggcctcctgcgccacgacggtgagcagcccgccgatgcactgcgcgaaggcgtcctggataaccgcctcgttctcgatgaaagagaacgtcccgccggtggcctcggcaacgacgtgcatcgccgccgcgtcatggtcgttaccgaaaccaaaggtgtggatgggcgcagacccctcgctggtgctgccagtgccaggcaccaaggatggtggcaccagtacctcgtagttggggttgctgggcacgcttccccgccccagccgcggcatgctgtagttgtcctggccgtcggagaggagaatgatgctggagacggcgttccggtgccggcgctcgccgagcaccttggcggctgtccggagcccctcggcgatgttggtgccgccgcccgctctgagggattccactccctccgatgcgaggcccttcccggtgtccgacatgcgcaggagcctggtcacgcggcgcgccccggacgagaaggacaccacgctgaggcggtcgtgggggccgaggctgccgatgacgaaccccatggcctgcttcaccagggcgagcttgttgccgcgcatgcttccgcttacgtcgagcaccgtcacgaggtcgagaggagcgcggggcgcgtctcggtctcggtctcggtttccgtctccgtctgccgcctcgctaccgatcacccccggagccttcacgtgcacgagaacggcgaagttgtcgtgcgacgagcccgaggcaacagccgacgactcgacgtgtgtcttgacggccaacgtcccaccggatccagcagcttgtcgctggtcgccttcaccagagagcagctccaactcgtcgtcgtcgtcgaacacttctggctccgcgggctgccgcgctggctgcgttgcagggacgggccgcggctgtactccgtgcatgggctccatgcggggaagcggctgtactccgtgcataggctccatgcggggaagtggctgccgcggtagcatgggtggcatcgacgacggctgcgacgggcgcacggagggcagctcacgccactgcgcgttgcagagcgggcagacgaggtggccatgcgccacgctcgcggagatgcagtggaagtggaacgtgtgggagcactctgccgtgaaggtggccatagcctgccctccgtcggcgcccatggcacccaggcatatggcgcaagggttgctctgcgtccaaattaagagtggcacacatcactgaaatagtctgatcaaggactagacaagatagagctcagaaatttgatcattaaaatcaccatatatatattagagaagaagaaaaactagccagagttcacgacagaataaaaatgagatggatcgtcgcatttgagccaaaacccaagtttttcaacacgcagtattgatggaaaatatgatatagagagcttcgtagcttagcagcgtcttctcgtacctgttcaggaccttcc

SEQ ID NO: 91591 - DNA, 1032 bp, Zea Mays
atggacgcgatcagcagcctgctgctgcaggagggctggaggaagggcccgtggacggcgctggaggacaggctgctcaccgagtacgtgcagcagcacggcgagggcagctggaactccgtcgccaagctcacagggctgcgccggagcgggaagagctgccggctgcggtgggtgaactacctccggccggacctcaagcgggggaagatcaccccggacgaggagaccgtcatcctccagctgcacgccatgctcggcaacaggtggtcggcgatcgcgcggtgcctgccagggaggacggacaacgagatcaagaactactggcggacgcacttcaagaaggcccggccgtcgcggcgcgcccgggcacagctgctgcaccagtaccagcagcagcaggaggaggagcgccgacagtacctccagagcctgcagctcctgcagcaggagcagcaacaacagcagctgctcctccagcagcagagtcagcagctggtggtgaaacaacagcagctggagcagcaaagcccgccggagcctgatcaccaggccgtgatggcgatgttggacagccagcagagcacggcggaatgctactgcagcccggtgccggtggtgccagagcagtgctgcgcgctcccggccgacgacgacgacgccatgctgtgggatagcctgtggaggctggtggacggggacgggcgcggctgcggcgacggcgacgactccagcggagtcgcatactagccggctagtacgtacgtgtgcgtgtctataccagtgtaaaaaaacaaagcgggatgaagaggaggttcttcaggtttcagctgctgcaaggcaaggatactgctagtggtagtagagacatgctaattttccaacgagaatagttgatcatgtttcatgttttttttattttacccatgaaccatgagcaagtggcattgtatcaaaaggccctctgtttacaaggtcgaaataccttcatgtaactttggtttcaagaataaagaccgtgttttagcatgg

SEQ ID NO: 91592 - DNA, 3366 bp, Zea Mays
  misc_feature (3366)..(3366): n is a, c, g, or t
cctctctctcccctcctcgaaccaggcgcaggcgagcgtctctgcccgcccgcctgctgctaccgccaaaacgcctcctttgttgccatccgccgatgccgtaatccgccgcccaaagctcttcctttttccctctctctcgcccgcggccgcactccctgccccagtgcctgccgtggcgagcccaaccccaatgccttttaaacccctccccgctccctcactgatccccaccgcctcccaatgccgccctccttcccctccctcccgctcccggaggccgttgccgccaccgcccacgccgcgctgctcgcgctcgccgcactcctgctcctcctccgcgccgcgcgcgcgctcgcctcccgctgcgcgtcatgcctcaaggcgccgcgccgccgcgggggccccgccgtcgtcgtgggcgacggcgccggcggcgccctcgcggcggcgactgccggcgcctggcacagggccgtgctggcgtcctgcgcctacgccctgctctcgcaggtcgccgtgctgagctacgaggtggccgtcgccggctcgcgcgtctcggcgcgggcgctgctgctgccggccgtgcaggcggtgtcctgggccgcgctgctggcgctcgcgcttcaggcccgcgccgtcggctgggccaggttccctgcgctggtgcggctctggtgggtggtctccttcgcgctctgcgttgtcattgcgtacgacgactccaggcgcctgataggccagggcgcgcgcgctgtggattacgcgcacatggttgccaacttcgcgtccgtgccggccctgggcttcctgtgcttggttggtgtcatgggttccaccggtttggaattggagtttacggaggatggcaacggcctgcatgagccgctgctgctcggcaggcagcgcagagaggcagaggaggagctcggctgtctgagggtcactccctacgctgatgctgggatcctcagccttgcaacattgtcatggcttagtccgttgctctctgttggtgcgcagcggccacttgagttggctgacatacccttgctggcgcacaaggaccgtgcaaagtcatgctataaggcgatgagcgctcactacgagcgccagcggctagaataccctggcagggagccatcactcacatgggcaatactcaagtcattctggcgagaggccgcggtcaatggcacatttgctgctgtcaacacgattgtgtcgtatgttggaccttacttgatcagctattttgtggactacctcagtggcaacattgctttcccccatgaaggttacatccttgcctctatattttttgtagcaaaactgcttgagacactcactgcccgacagtggtacttgggtgtggacatcatggggatccatgtcaagtctggcctcactgccatggtgtataggaagggtctccgactgtcaaacgcctcacggcagagccacacgagtggtgagattgtgaattacatggccgtcgatgtgcagcgtgtgggggactatgcatggtatttccatgacatctggatgcttcccctgcagatcattcttgctctcgccatcctgtacaagaacgtcgggatcgccatggtttcaacattggtagcaactgtgctatcgatcgcagcctctgttcctgtggcaaagctgcaggagcactaccaagataagttaatggcatcaaaagatgagcgcatgcgcaagacttcagagtgcttgaaaaatatgaggattttgaagcttcaggcatgggaggatcggtaccggctgcagttggaagagatgaggaacgtggaatgcagatggcttcggtgggctctgtactcacaggctgcagttacatttgttttctggagctcgccaatctttgtcgcagtcataacttttgggacttgcatattactcggtggccagctcactgcaggaggggttctatccgctttagcaacgtttcggatcctccaagagcctctgaggaacttcccggatctcatctctatgatggcacagacaagggtgtctttggaccgtttgtctcattttctgcagcaagaagaactgccagatgacgcaactataaatgttccacaaagtagtacagataaggcagtcgatattaaggatggcgcattctcttggaacccatacactctgacccctacactttctgatatacaccttagtgtagtgagaggcatgagagtagcagtctgtggtgtcattggttctggtaaatcaagtctactatcgtctatactcggggagatacccaaattatgtggccatgtcaggataagtggcacagcagcgtatgttcctcagactgcatggatacagtctggaaatattgaggagaatattctgtttggcagtcaaatggatagacaacgttacaagagagtcattgcagcttgctgtcttaagaaagatcttgagctgctccagtacggagatcagactgttattggtgatagaggcattaatttgagtggaggtcagaaacaaagagttcagcttgctagagcactctaccaagatgctgatatttatttgcttgatgatcccttcagtgctgttgatgctcatactgggagcgaactgtttaaggagtatatattgactgcactagcaaccaaaacagtaatctatgtaacacatcaagttgaatttctaccagctgctgatctgatattggttcttaaggatggccatatcacacaagctggaaagtatgatgatcttctgcaagctggaactgatttcaatgctctggtttctgctcataaggaagctattgaaaccatggatatatttgaagattccgatagtgatacagtttcttctattcccaacaaaagattgacaccaagtatcagcaatattgataacctgaaaaataagatgtgtgaaaatggacaaccatctaatacacggggaattaaggaaaaaaagaagaaagaagagcgtaagaagaagcgtactgttcaagaggaggaaagggaacgtggaaaagtgagctccaaagtttatttgtcatacatgggggaagcttacaaaggtacactgataccactaattatcttggctcaaaccatgttccaagttcttcagattgcgagcaactggtggatggcatgggcaaacccacaaacagaaggagatgctcccaagacagatagtgtggtccttctggttgtttatatgtcccttgcctttggaagttcactatttgtgttcatgagaagccttcttgtggctacgtttggtttagcagctgcccagaagctttttataaaaatgcttaggtgtgtctttcgagctccaatgtcattctttgacaccataccn

SEQ ID NO: 91593 - DNA, 401 bp, Zea Mays
caagactgctcacggacggagtcttagagtctcgggctgcaggcatccacctccaccaggcgctggcccagttttcgccatccaccaggcgtccttagaatatggtgcagggctaccgagcagcgagcaacaagctgccgagcacagggcgccgaccgtcgagcagcgagcaccgaggaccgccgagtagtcgagcaccgagcagctagcaccgagcagccgagcagcaagcagagggctgcgaccaccgagcagccgagccgcctcgtcttctctcgtcttctctagtaaattaaacaggcttggatgaattagttttttgatttagagttttggagagattatttgtacggatttgaaaagattacttgtatggaacgttgaaattattgtttggtgct

SEQ ID NO: 91594 - DNA, 1973 bp, Zea Mays
cgcggagggctcgcgtcggggtccatctgaacatccgccagaccgccgccaccatgccgcaacctaccgccgattcgagcaccatggtcgccggcgagcatcagcaacaacagcaacctgccaccgcgcggatctcctcctcctcaaccagctccggaaggctcgtcactccgttctggaaagagaagtatgagagggacgcgaggaggtactgggacatcttctacaggcgccacgaggacaagttcttcaaggatcgacactacctggataaagaatgggggaaatactttaagggacgagatggagaaaagaaggtggttctagaggttggttgtggagctgggaacacaatctatccattgctttctacatacccagatatttttgtccacgcctgcgatttttctccacgagctgtcaatttggtcaagaaacacaaggacttcaaagctgaccggataaatgcatttgtttgtgatattgcatcagaacaactaaccgagaatgtggaaccttcttctgctgacattgtaacgatgatctttatgctctctgcagttgcaccagataaaatgcctatagttctggagaatgttagaagtgtcttaaaacatggtggccgtgttctttttcgggactatgccttcggtgaccttgcacaggaaagactgatgtcaaagggccaacaaataagtgagaacttctatgtcagaggtgatggtacgcgtgcatattacttttcaaatgaatatctggtagatttattttcaaaatgtggacttactcttgaggagatatgtgtgcacaacaagcaagttgaaaaccgttcactggagctggtgatgaacaggaattggatccaagctaccttcaccctaaattcagctagtcctcaaggtccaaatggtcaacacgatctccttgcttacgaaggagaggatgataaggtagttactgacacatctaagaagaaaagcagcggtgaagaaatcgatctttctgaagatttttgcaacatgtttgggacatcacacagccttgatgaggtacaaatcattggggtgaaagcaaaaggccacgacttcaaaataagaatgctcaggaaggaataccagcacacctgcagatcaactggcttaatgctctgggaatctgctcaattcatgtgctgtcttttagcagagaacccttcgatcgttgcaagcaaaagggtcctggagttgggctgtggctcagctggcatctgctcgatggttgctgcaagtttcactccctttgttttagctacagatggggatgaagaatcactggacctccttagacaaaatatctcctcgaacatggagcctaatttgctgagcagaatcatggttaggaagttattctggggcaacgaagatgatatgaaggcagtccgagagcttcatggtaacggcgtgggttttgattgcataataggcaccgacgtgacatacaatcctgatgctatactccctctcttcaagactgctaggggagtgatttctgagaaagctaacgaggactcggtacctgctctcattctttgctacatccagcgacgagttgatgaggactccatcctttctaatgcaacgtcccagggtttcaggcttgtggacaaatggataaatggagttcacgagagtaacggtaccatcagttcttggttctctggtaatgatgtctgcagtgctttccggcatacagtactttcagtactgtacttcgagctgtgaatgctgctatgcatgtgcaaggttactgtataacctgaaggatttttgtagcagctgtatcaagcaacggcaaaccaactttgaatctttaggccttgtttaatgatttcaattttacgtgaatcggactgtactggaatggattgagatagattttgacttctatggatttaaattgacttagtgccatccaatccatatggattaacggtg

SEQ ID NO: 91595 - DNA, 464 bp, Zea Mays
gtgtgggacctgtcgagctcatgagcgttcctcaccagcgtgtgggcccgggaggtcagggtgcctttcccctttctccgcatgaacgacgccccgaactcaacaaactacgccgaatcctccaggggttgttatgggttcccggccctctccctctagcactaatctaccagccgcaactcccctgcctcctcgtttcgtttcaccagagccaaaatcgagcactagtaccagagcagaggtgagctgagagcagggagcaccgccaacaccgacctattcctcgaccgatgttcggggatccgcggcgagtctgggagcctcgtggagttgcttgtgaggcacctgtagccgagtggggaaggattgaccaccgaggcggctggaattcttcgtcgaacactgtgatccgtcacgcttcatgggttgggcttggcgctacttgaatcacggtgagtaacccc

SEQ ID NO: 91596 - DNA, 363 bp, Zea Mays
atggcaactaacaatgaagaagttcatcctggagatcgtgatcttttctggtcccatattgatgaagccactggtgcaacatcactacatggctacaattttcctaggatgactaggacctatactcatcaaaatggtgttgcagctgttgtttcaacatccccggatccatcatccaccacaaccacaatttcagaacaagaacaaggattaggagaagaggaagaagctgaaattgactttgttgctcatgttaaggataactatggccaagctcttactacagatgatgaagttgttgcgattgcaagtgatgaagatgtgggcaccataaatgcaatggacttagacttacaagcttag

SEQ ID NO: 91597 - DNA, 755 bp, Zea Mays
ccaactcaacgcattgcgagaacaggcccgccgccacgccgcccaggtaggttttgtttgggatctcaccatttcttccttgtctctgtctcaacacggcgccgccgccgctgccgccgggagccgagcccaagcctaagcgaaagccatggcgattggttctctcatcgcctctactttcgccagatctagccatgccctccccgctgccgccgcttcggccatctctcaggctcccagatcccagcacaccgcatctcctctgctctccggccttggagcagcggctcgtgctttcagctcaagggctctatggaagggagcattcgttgacgctttcctgtctagaattaagaagaacagagaaaatatgaatggcaagaagatttggtctcgtagatcctctattttgccggaatttgttggttcctctgtgctcatttacaatgggaaaactcatgtccggtgcaagatcactgaagggaaggttggccataaatttggagagtttgcttttacacggagacgaaggccccatcgaacaatgacaggaaagggaaatcaaggaaaggcaagaaagtaaaaggagaaatgtgcatgaaaggtggttttaaggatagcatgatgaggcagtagttgacgaacaagaacatgaataaccagaaattatgatctggactgctttactgctttttcttagaccaataattgcaggagaatgttagttcatcttacttaaagattcgtccgtgtac

SEQ ID NO: 91598 - DNA, 2958 bp, Zea Mays
atggaggtcggcggcgacctgcagtccctcctagaggcgatcaaatcctccgaggtgcttgaagatagaattgggctcatcaaccgactcgagagttcctttgagtattctgcggatgatctgagaccagtacttgacagtcttaatgtgtatgaccttaacggcaattttaggtatcttgggatgattctggatgttcaggttgctctaaaatgttcatatatagaaacaactggttgtctaggccaatttcttgcacttggtgcaaagattcttccttctgcggcaaaatgtgttactgtagatatggtgcataatattggtgattttatctcagagttgctaagtcttatggaaagctcaatagttgacaatgacaagaaaattcatggagctgctctggatatcactaaggctgcacctgtttttctagatgaaacaactaagctgtgccgggcatactctgaggccacaaaagtagacaactgcacaatgagtataactgatgaagatgctactgtgaaacacaacaaacaaggtcttgctagtgatgtcatcaggattacatcatccactattcagactatgtgtagattgggaacctatgcagcatccagtggtggaagccaggtgattttactgaatgtatcatggaagggtgtagtctcattactccaaagcggtaaagggatgattgaaggaaaagtaaatgtcagagaaataattgtaacccttctatctctgtccatagaatctctaagagttgctgctgaaacatggtgtgcaccgttactagaaacccttggtgctactgaagccagaagggcgttcctaccaatcaagtttttcttaataaatgctgtaaggatttgttcaacatatccatctgaagcaatgattatatacaagaacataatcaattgtgcagtagtgatcacatcctcaagcattctatttagcaagaagccacagttgaaggcagcaaatgagacccttgttgaattgttggagcctactttatttgttttactagatacacttatgaaatcatctgacttaacaccagaatccaaatgccagcttgcacatcatttttttgaaaacgaagaagataagagtccagatcttatgggacaagctaatcagagagagataaatttggcctcactggattgcattttctctatggattcagatgtggatcatagaaatagagcacttttacctgctgagttgcttgtgtttttgcactttctcaatgcttcatcatggttgacagaaatggtggtcatcacattatctaaaaagctacagactcttcttaatatattgacatcagaagacatctactcctatgtccttggcttccaaatccctgccttaaatggcgcagaccagtctcctgcagttgtttggcaacctgtgtatacttctatcatacaagcattgaaggcttttatgatttctactgttgcttcaagtgctgcttggaacgagttagaggctttcttacttgaaaatattttccatccccatttcctttgcttggaaattattacagagctgtggtgtttcttcattcgttatgctgaaactgagacttcaattaatctagttaatcaagtctcccttctactaaagactgttgcatcaccagaggatgttctttcacctctcagtgctttgcggaaagttgcacgatcattgtgcatcatcttgagctatgcatcttctgcaactgttgatcaaatatatacttgtgtgctgaatggtgaaaactcttccaagtcttcaatcttacacttagcattgctgatggaaggatttcctttggattcattgtctgatggtacaaaggaacttgctatgaagaaaatgtttacctcttttgctggctatctggagagctactccaagaaccaccgagtaatcaatgtgccaacttgtaaattgggtgttgtaggacttcctatacatgctctagcctctgcattgcagcatagtactttttttggcagtgtaataaatgttgatagtattgtagatgagaatagcatcactgctatgtttaagttcaccatctctctcataaagatgtttagaattgcgccagatagtagtaaggataaccttgccaagcacattagttccatgttggttattatctcaaacacgaggcatctttgtgcattcagtgagatggagaagttgactctgcagttgcgcacgctgttcgtttccacttctgataaatcaaatgctgtgctgtctcagtgcaaaccgtcaatggcttcctttatgtcaactctcggtcacttgaacgttaccgaagacgatgctaacgaactttgttctgcaatatgggatctgtatcatctcctgctgaaggaacggcactgggcgctcattcacctcgcaatggattcctttggctacttcgccgcccgcacatcctttacgcagctctggagatttgttcccagagatgctgccctttcgtacaatgcaagcacagggacgagcatagatgaaaacggattcatgctggagttgagggcttatcttcagaaagaggtcgccttgcacaccgataaatggtctgaagagcagattcggctcctggtttctgaggggagagcgctgaagaagctggttgaagcttgttgtgaaattccggttgttgctgagcctgagaaggcgccggttgcgaaggatgccagcacgaagaagaggaagatgccagatgggatctgtgaaggcatggcgatgctgcagaacggtctcaaggtcatgcgaggcgcctttggtgaaggggacttcgctgatctgaaggataggtttgctgcacacttgtctcgcctcgaggatgcagtttcccagtttgctagtttatccgacgaaatttgatatagtgcactgtatgtcgcgctgttacctttaactgcaaaagagcattca

SEQ ID NO: 91599 - DNA, 2943 bp, Zea Mays
atggaggtcggcggcgacctgcagtccctcctagaggcgatcaaatcctccgaggtgcttgaagatagaattgggctcatcaaccgactcgagagttcctttgagtattctgcggatgatctgagaccagtacttgacagtcttaatgtgtatgaccttaacggcaattttaggtatcttgggatgattctggatgttcaggttgctctaaaatgttcatatatagaaacaactggttgtctaggccaatttcttgcacttggtgcaaagattcttccttctgcggcaaaatgtgttactgtagatatggtgcataatattggtgattttatctcagagttgctaagtcttatggaaagctcaatagttgacaatgacaagaaaattcatggagctgctctggatatcactaaggctgcacctgtttttctagatgaaacaactaagctgtgccgggcatactctgaggccacaaaagtagacaactgcacaatgagtataactgatgaagatgctactgtgaaacacaacaaacaaggtcttgctagtgatgtcatcaggattacatcatccactattcagactatgtgtagattgggaacctatgcagcatccagtggtggaagccaggtgattttactgaatgtatcatggaagggtgtagtctcattactccaaagcggtaaagggatgattgaaggaaaagtaaatgtcagagaaataattgtaacccttctatctctgtccatagaatctctaagagttgctgctgaaacatggtgtgcaccgttactagaaacccttggtgctactgaagccagaagggcgttcctaccaatcaagtttttcttaataaatgctgtaaggatttgttcaacatatccatctgaagcaatgattatatacaagaacataatcaattgtgcagtagtgatcacatcctcaagcattctatttagcaagaagccacagttgaaggcagcaaatgagacccttgttgaattgttggagcctactttatttgttttactagatacacttatgaaatcatctgacttaacaccagaatccaaatgccagcttgcacatcatttttttgaaaacgaagaagataagagtccagatcttatgggacaagctaatcagagagagataaatttggcctcactggattgcattttctctatggattcagatgtggatcatagaaatagagcacttttacctgctgagttgcttgtgtttttgcactttctcaatgcttcatcatggttgacagaaatggtggtcatcacattatctaaaaagctacagactcttcttaatatattgacatcagaagacatctactcctatgtccttggcttccaaatccctgccttaaatggcgcagaccagtctcctgcagttgtttggcaacctgtgtatacttctatcatacaagcattgaaggcttttatgatttctactgttgcttcaagtgctgcttggaacgagttagaggctttcttacttgaaaatattttccatccccatttcctttgcttggaaattattacagagctgtggtgtttcttcattcgttatgctgaaactgagacttcaattaatctagttaatcaagtctcccttctactaaagactgttgcatcaccagaggatgttctttcacctctcagtgctttgcggaaagttgcacgatcattgtgcatcatcttgagctatgcatcttctgcaactgttgatcaaatatatacttgtgtgctgaatggtgaaaactcttccaagtcttcaatcttacacttagcattgctgatggaaggatttcctttggattcattgtctgatggtacaaaggaacttgctatgaagaaaatgtttacctcttttgctggctatctggagagctactccaagaaccaccgagtaatcaatgtgccaacttgtaaattgggtgttgtaggacttcctatacatgctctagcctctgcattgcagcatagtgtaataaatgttgatagtattgtagatgagaatagcatcactgctatgtttaagttcaccatctctctcataaagatgtttagaattgcgccagatagtagtaaggataaccttgccaagcacattagttccatgttggttattatctcaaacacgaggcatctttgtgcattcagtgagatggagaagttgactctgcagttgcgcacgctgttcgtttccacttctgataaatcaaatgctgtgctgtctcagtgcaaaccgtcaatggcttcctttatgtcaactctcggtcacttgaacgttaccgaagacgatgctaacgaactttgttctgcaatatgggatctgtatcatctcctgctgaaggaacggcactgggcgctcattcacctcgcaatggattcctttggctacttcgccgcccgcacatcctttacgcagctctggagatttgttcccagagatgctgccctttcgtacaatgcaagcacagggacgagcatagatgaaaacggattcatgctggagttgagggcttatcttcagaaagaggtcgccttgcacaccgataaatggtctgaagagcagattcggctcctggtttctgaggggagagcgctgaagaagctggttgaagcttgttgtgaaattccggttgttgctgagcctgagaaggcgccggttgcgaaggatgccagcacgaagaagaggaagatgccagatgggatctgtgaaggcatggcgatgctgcagaacggtctcaaggtcatgcgaggcgcctttggtgaaggggacttcgctgatctgaaggataggtttgctgcacacttgtctcgcctcgaggatgcagtttcccagtttgctagtttatccgacgaaatttgatatagtgcactgtatgtcgcgctgttacctttaactgcaaaagagcattca

SEQ ID NO: 91600 - DNA, 4073 bp, Zea Mays
catttctctattgcttcaaacaaggcaatgaaaacaccattctgaggacagcaggaggtggcagaaggagtgaaggagaagggaacagcagaagaaccgagcatgacaagtgctactccaaggcttggtagcactccacacctcttcttccccttctccttctccttggcattcctgtgctgcattgccgtgtgcaatgccgccggcgatgaggccgcggcgttgcttgccgtcaaggcgtcgctcgtcgaccccttgggtaagctcgggggctggaattcggcgtcggcctcgtcacgttgtagctgggatggcgtgcgctgcaatgcccggggcgtggtcaccggcctcaacctcgccggcatgaacctgagcggcaccatccccgacgacatcctcggcctcaccgggctcacctcgatcatcctgcagagcaatgcgttcgagcacgagctcccgctggtgctcgtgtccattccgacgctccaggagctggatgtcagcgacaacaacttcgccggccacttccccgctggcctcggcgcactcgcctcgctggcacacctcaacgcgtcgggcaacaacttcgccggcccgctccccgccgacatcggcaatgccaccgcgctcgagacgctcgacttcaggggcggctacttctccggcacgatcccgaagtcctacgggaagctcaagaagctcaggttcttgggcctctccggcaacaacctcggcggcgcgatcccggccgaactgttcgagatgtccgcattggagcagctcatcattggctctaatgagttcacaggcacgatcccggccgcgattggcaacctcgccaacctccagtatctcgacctggcgatcggcaaactggaaggccccatcccgccggaattcggccggttgtcgtacctcaacaccgtctacctatacaagaacaacattggcggcccgatacccaaggagatcggcaacctcacctccctggtcatgctggacatctccgacaacacgctcaccggcacgattccggtggagctggggcagctcgccaacctgcagctgctcaacctcatgtgcaacaggctcaagggaggtatcccggcggcaatcggcgacctccccaagctggaggtgttggagctgtggaacaactccctcaccggcccgttgccgccgtcgctcggcagcacgcagccgctgcagtggctcgacgtgtcgacgaacgcattgtctggacctgtgccggccggcctctgcgacagcggcaacctgacgaagctgattctgttcaacaatgtcttcacgggcccgattccggcgggcctgaccacgtgcgcgtcgcttgtccgcgtgcgcgctcacaacaaccggctcaacggcacggtgcccgcggggctcggcgggctcccgcggctgcagcgtctcgagctcgccggcaacgagctgtccggagagatcccggacgacctggcgctctcgacgtcgctctccttcatcgacttctcgcacaaccagctgcggtccgcgctgccgtcaaacatcctgtccatccggacgctgcaaacgttcgcggcggccgacaacgagctgaccggcggtgtaccggacgagattggcgagtgtccatcgctgtctgccctcgacttatccagcaaccggctgtccggtgcgatcccggccagcctcgcgtcgtgcgagaggctcgtctcgctaaacctccggagtaatcggttcaccggacagatccctggtgcgatcgccatgatgtccacactgtctgtgctcgacctctccagcaacttcttctccggtgtgataccgagcaacttcggcggctcaccggcgctcgaaatgctcaaccttgcgtacaacaaccttactggtcccgtgccaacaactggtctgctgaggacgattaaccccgacgaccttgctggcaatccgggcctgtgtggtggcgtactgccgccgtgcggggctgctagctctcttcgggcctcctcgtctgagacgtctggcctccggcgctcacacatgaagcacatcgccgctgggtgggcgatcggcatctcggtcttgattgcgtcatgcggcatcgtcttccttggcaagcaggtgtaccagcggtggtacgccaatggagtatgctgcgacgaggcggtggaggaaggcgggagcggcgcgtggccgtggcgcctcacgaccttccagcggctgagtttcaccagcgccgaggttctcgcgtgcatcaaggaggacaacatcgtggggatgggcggcacgggtgtggtctaccgcgccgacatgccacgccaccacgccgttgtcgccgtcaagaagctgtggcgcgcggccgggtgcctcgaggaggtcgccacggtcgatgagcggcaggacgtggaggcgggcggcgagttcgccgccgaggtgaagctcctcggccggctccgccaccgcaacgtcgtgcgcatgctaggctacgtgagcaacaacctggatacgatggtgctgtacgagtacatggtgaacggcagcctgtgggaggcgctgcacgggcgggggaagggcaagatgctgttggactgggtgtcgcggtataacgtcgcggcgggcgtcgcggccgggctcgcgtacctgcaccacgactgccggccgccggtcatccaccgcgacgtcaagtccagcaacgtgctcctcgacaccaacatggacgccaagatcgccgactttggcctcgcccgcgtcatggcccgcgcgcacgagaccgtgtccgtgttcgccggctcctacggctacatcgcgccagagtatggatccacgctgaaagtggacctgaagggcgacatctacagctttggagtggttctgatggagctcctcacggggcggaggccggtggagccggattacagcgaaggccaggacatcgtcgggtggatcagggagcggctgcgtagcaacagcggcgtggacgagctgctcgacgccagcgtcggcggtcgcgtcgaccacgtccgggaggagatgctcctggttctgcggatcgcggtactgtgcacggccaaatccccgaaagaccggcccacgatgcgggacgtggtgaccatgctcggtgaggccaagccgcgccgcaagagcagcagcgccacggtgcccgccaccatcgtggacaaggacaagccggtgttcacgacgtcgccggactccagttacctatagactgcggtgaccaaagacagcattggcgttagcgggcttgtatgctctgtatgtagctcatgccatgtacaattttttttaccatagttttggttcatactttggttatgttcagagggaaaggaaactaatgtaaccaatgtttatacgtttacaattttaggatgtaaagcaattggtccctttgaataatagaaaaaaaatcattttagattacacatgccattaacggtctactgactttgctctttgtttcctgtaataacaccagggcgcccacaagaacattatatgtagaggtgtacattcgggccacccggcccggcccggcccaagctcgaaaaggcccgtattgtttgaatttcgggccggtccggtccgtttgaatttcggcccggtctggcccgtttgaatttcgggccgggccgggccggcccggcccatgggcctagccctcggcccacggtctggcccgtaattggttaaacgtgccgggctcatttcgggcgacccgaaattataaaagcccgaaattcaatttttggcccgaaattcagttttggcccaaaattcacattagagccctaaattaaaaaaacacatataagacaaataaatttgaacaaaatcaaacttaatatttgtattaaagttaccacagctatgcaatgactacccggtttataaatcattttgttagaaggaaaaagagtataatcagctctatacaaagttcgtaagttcagtttattgtctaatgttcataacaaaagtaaaattacatcacacactctaatttaaagctacaaaaaacatctaactagcattatctctagctttgtgttctt

SEQ ID NO: 91601 - DNA, 268 bp, Zea Mays
tctccaccttccactatcccctctgtaccatcgacctctccctctggcgtgggttctgcctccactgcgcggaggctgtaggaggagacgtaagggatccatttcgttgtcactgcaacgagcaaggtgatgaagccaagtgaagttgataggaaatactattactttatcactaaggaggaattcctgatgatgaatgagagggaggagttgctcgagtatgctcttctttgtttatggggagtacaaggagatccccaacaacagg

SEQ ID NO: 91602 - DNA, 2492 bp, Zea Mays
gcaacaatggatcgccgcgtgagccttgcgacccggagcgtgcgcgtgctgatccccgaccagctgccgacgctgttcgagccgcagaaggcggtgatgaccccgcacgtccgcgcgagcgtcgtggacgacgcggcgccgccggagcgccggctcaccatgctggcactccagctcgcggtgctcgagaaggcggccagccggctcggcacgttgggcttcatctgggccaccgtcgtgctgctcggaggcttcgccatcacgctgggccagatcgacttctggtgcatcaccacccttctgctggtcgagggcgcccggatcctgggccgcagccacgagctggagtggcagcacgagaccacgggccgcgcgcccgtgtcgtgggccgtcggccgcgtcttccactggctgcagctgctgtccgcgtcctcctgcgccgcgctctcgctcgtccgcctcgtccaccagcgctacggcggcagcgaggaggcccacgtcaaccgccactccgcgctcgacatattctacggcctcgcgctcgccgaggcgctgctgttcctcgtcgagaaggcgctgtggcagtggagggtgggccaccaccgcctgctggagcgcgtcgccgccgactgccacctcaacaccgcctgcggcgccgtcgccgtccgccgcttcttctacgactcctactccaggtgcctcaacggcagcatcttcgaaggcctgcacatggacctcgtgtcctacgccgacgacctgctcacggcgggctcgcacgacgagcagcgcctcggcgccagcatcctcgcggcgctcgtcgagtccgaccgcttcgccgacgccacgctccgcaagatcggcacgtccgggcccaccatagagcgcctcatcgagatgctcagctggaagaacgcctcggagaaggacgtgcgccgctccgccgcggtcgtcgtgttcatgctcaccggaagaaagctcaacgcgctccgcgtcactggcattcccggcgccatggagtccgtggcttccttgctctacgccgacctcgacgagctcaacctcctcggtctgtccatcctcaacaagctggcgcgcgaccacgacaactgcgacaagatcgggaggaccaggggtcttctcgacaggatcatctcctacgcgggcatagtggcaaacgggccggcgacggggccgccgacagacatgcgcctcaaggcggtcaagcagtcgctccgcgttgtgaagaggctagcgagcacgacggggaccaccggaaagctgcttcggagggagctctctgacattgtgttcacggtgagcaacatcagggaggtgctgcagctgcagcagcagcacgacgagaaggacgtgtccgagctgcaccgcctggcgatcgagatactgaccaacctcgccatggacgaggaagcgagggagatgatcggcggcacggggggtgtggtcagcacgctggtgtcgatgttcttgccggaagagcaggaggcagagccagcgcccgaccggcacaaggacgcggtccgggtggaggccggcgaggctcttgcgatgctggcgctggacagccggaggaactgcggcgcgatcatcatggcgttcggcggaggtgtggaccggctcgtcgagacgctgagtgatcccgtcgtcgtcatcagcgccgcaaggatcctgcgcaacctgtgcacctacgctggagaagagtatcatcttacactgagaggagttaccgccggcgccaccaaggtattgcgcaatatcatggtggagaagacgaagctcctgaacatctccatcggcctcgcggcgcagatgctccggttcatgcagcctgggaagctccgcgcgagcctcgccacagcgggcgtcacggacgcggcgctggcgaggacgctagtgctggtcctgcgggagtacagtcacccgtccctggtgctgccgcgcatccggctgcacacgctggagctcgccatcgcgttgatgcggtcggacgcgcgcttcgtggctctcttcgtggagctcgggatggaggccgagcagaggcgcgtcgcggaaaccacctccgggctcgagtgcttcaatgtgttctcgggcagcgtcgggctcagccgccgcgtcgtcagcgtcggctcgctcgtcgaatccgccatggagctgatgaggcagcaggcctgcacatcgcagtcacagaaacgctgaaaagtgaattacacggctcaaacgttatttgttttttactctgtatcccgtttgattgtgcggtatatttgtgtggtcgcttttccgtatgcttatgctttcttctattgctgaatgtgcgataagggttactatgactactatttcgatgacatcgttctgtatgtacatactttattgtacacgtcaccaatacgtgtgcttggttcttgtcattgtttacctatagaaatatgtaaattatgttttaattattaatcgtattaatttatgatttt

SEQ ID NO: 91603 - DNA, 1180 bp, Zea Mays
aacatagtgccatagtggacacgatattcacccatttcagccggcagctaggtatttcttttttcaacaagccagaccgccaggcgccagtagccattgagtccttgacccgaagtcccacagccgccgccaaaagggttcctcaccatcttgaacgctcgccggaccaatcccaagcagtcctcgcagcagatggcagttcccggcggccgcaacggactcagggacgaggacgacgacatggcccagcacgccgaggccttcggcggcgtctctgacgacgaggacgtgcccccccaccttcgcgccctcgccaacgccgcccagtccggcgacgtcaccgcccttgtggctgccctcgataatcatgatggcagtattgatgttccagttgaagatggtgatactttgctccatctggcatgcttatatggtcatcttccttgtgtgcagctattgctggaacgtggagctagcttggaatgccaagacgaagaaggtgctattcctcttcacgatgcttgtgctggaggcttcactgagctggtccaatatattctcaactttgctgccaacaaggatggttgcgtagtgagaatgctcaacactattgattctgaaggcgatacgccgctccatcatgctgctagaggagaacatttggatgttgtcaagcttcttctccaggctggggcgtcccccaagaaggagaacacttacgggcagacacccgctgatatggctgaccaagacaccgaagttcgaaccctgttgactgccaagcaaattgaggcaagcacacacatgagtgatgattaagcggcattggaatccttagttgcaactggtaatgttgagaaatagccgtaacatcttatctgccatccaaacttcatttgaactgaagtaatattgtaatcagactagtatggaggggttagcttagctacatgatcatgctccttttccttatcgctgcattatactaaagatgaagtggaacacccatcggtctttcttgttctttcgcggaaaatctgatgcttgatcaccgaacatgatccgatttgttgtttgctgatatgtcaccaaggtgcagtaggttagattacacatttacaccggcaccaaggtgcagtagattagattacactgatttgaagagtgtaatttttactcc

SEQ ID NO: 91604 - DNA, 608 bp, Zea Mays
atggtgtgccagacaagcatatctggaaattctccccgacaggtcaatactctgcaaagtcggcatatgatatgctatttctaggttccacttcttttggagcatttgagcatgtttgggagtcttgggcaccttcaaagtgcagattcttcctttggcttgtcatgcacaacaaatgctggaccgcggaccgtcttgctaaaagaggacttccccatcccagtgcgtgtcccttttgtgaccaagaagaggaaacaatacaacatcttctcatctcttgcgtctttgcaagacagttctggtacttcttgttgagcaggtctgggttgcctaatctttcaccggacaacggtttttgcagcctggatgactggtggagcagggctgtggagaagattccccgtgatctccaatcaggcttcaattctctagttattcttggcgcttggagcctttggtgtcatcgcaacgactgtgtgttcaatgggaggtcgccgagccttgcacgtactctcaccctcgctggcaatgagctcaggatgtggtgtagtgccggggcgaaagggttgaacctgctttcaactcttgcgtttatgcttgacccaggg

SEQ ID NO: 91605 - DNA, 260 bp, Zea Mays
tcatcaatattatccatgcttgataaatgatgacaatggcgatggccatgatatatggtcaatattgtattgatcttttttctgagttttaggctgtcatgttgtttgctagaatggagatatttcattgttcacttggttcttgtgacagagttagttatcttatttctgtgctttcttagtaccctttttctgagatttgagttgtaaataacacttccctaatcgtgatgtcattataactcaatgacattattaaa

SEQ ID NO: 91606 - DNA, 1738 bp, Zea Mays
acaggttggataattgaacatgagacactatagccatctttggtcgacgaccaagaggagtgcaatggcgttgtaaattggcgtctccatatctgacgttgggcgaatttccactagggtgactggcgaatacatgtatcctacgtttacggccgccaatagcttctggggaggtgatttcgttttagcagaaaagaggtgccttgagcagtgcaagttctcacatggtgatgtgattttgttcaagtgccctagcaatcataaggagatgcttgtgaagaggttgattgggcttcctggtgagaagatacagctccctgggtcccttaaccctactaagatcccagaagggcattgctgggttgaaggtgataactctactcgtagctgggattctagggcattcggtccgggtatgctgtgtgcgatttaaaaaggtcagttaccagcaatgctacttgatataaattttgaaaactcctggagtgttcctttttgtgggaaagtttggacatgctccactgccattttaaagtgagactgggtgcctatatatcatatatgtatgtggagcatctgagttggaaatgtcattaacccctgtataatatatggtattgcattcatctttgctggaatatctaagaataatgctatatgcagtatatcttcaatcattcagatttgcatggtgagctgtagttattggcttattgcaagatactacattgtctcttgttgcctcttcaatggaattttattattctttagttttcgcctgaaatgaaattgatgcaccatatgcttgtagccagtgaaagctcctaaggaaccctttggatcaaactgcacaaactatgggtgtgtttggtttgacttttggctttggcttttgccacctaaaagccaaaagccaaccaaagggctggatctaggaagcagctttttctaaaagctgactttctcacagtgcaaatctgaaagcacccctaaacctgcttttagtgacttttcggatggaactgtgaaaacatatatcgaagaacttttaacgacttttagtgatttccaccaaacggtttttagctttttaacgactcacagcctacaacagctttttccacagctcacagcccacagcaacttttttcacagccacagctcaaccaaacagaccctatataccaatgagaacaaaaaaaactgaaaaacagggaataaagcgaaactacaacagttataggacagaagggcagacctggtgcaatgatgagagctgtctcactccatgtcgtaggttcgaacttcaaagcagcctcctcatttgcaggggaaggcttgccttagtttatcctatcccccgacctgctaatatgggagcctgtgacactgggtctgccctacaacagttataggacaacctatatctcaacaggcaagtacattattgcaccacaagttaggagcacacactttgtgtccttggtgataatgtttgaggctcaacaagttgcaatgatttcttcctatttatgttactgtattgcaatcatagaactgccaacaaaattttgttcccttttctgaaaaaaatgtgttgcattgactgccaagtatgaaactattgagttataaatctgctaccaatgagcttcgttgtgtgcttgtttagacagatactggttttcttcagtaatcatcagttcaaatgtgtccatgctgtacaactagtgaacag

SEQ ID NO: 91607 - DNA, 433 bp, Zea Mays
acaggttggataattgaacatgagacactatagccatctttggtcgacgaccaagaggagtgcaatggcgttgtaaattggcgtctccatatctgacgttgggcgaatttccactagggtgactggcgaatacatgtatcctacgtttacggccgccaatagcttctggggaggtgatttcgttttagcagaaaagaggtgccttgagcagtgcaagttctcacatggtgatgtgattttgttcaagtgccctagcaatcataaggagatgcttgtgaagaggttgattgggcttcctggtgagaagatacagctccctgggtcccttaaccctactaagatcccagaagggcattgctgggttgaaggtgataactctactcgtagctgggattctagggcattcggtccgggtatgctgtgtgcgatttaa

SEQ ID NO: 91608 - DNA, 1420 bp, Zea Mays
gaagagatcacgtacgcgcaggtagctgcttcgcgatcgcgcatcgaaatcgatcgcatccatacaccagtttgtcagctgcgcttgtgcctgcaaccggaactggcagggttgtcgcgggagttcgtcggagcgcgcgcgcgcaggctccttcgtggatcgacgacgatgggcgtcgcgttcgggtgcttcggagggtgcgtgcggcagagcgacggcggcggccggcaagcagtggaggaccccaaacccgtgatggagccgtcgccgagcttcgacttccgggaggagtacaccagcgcgttccgcaccgagtcctacaacgacttctgggcgcgcgtcctggacatcaccctcgcgcacggcgcagggctggtgccgcgcccgggcggcgacggcggcgtcacggcgtcgtccaagcgcctcccttcataccgcctcttcgccgagcaactcctcgagccggaccagcgggccgtccgcgcggccctcgcctcgccccgcagcggccagctccaccccggcgtgcgcgacctcctcgtcacctactacaacgagacggcaagcgcgtccttcctgtgcagccacctcctcagggacatcgagcagatccgcctccggtaccgcccgctcaagaccacgctccgcaagctcgcctgcgacgtcgaggcgcccaacctctccgacgtctccgccgccctcggccagcccttcgccgcgctggccgtgtcgcagggcaagctccggcaggtgcagctcagctccgccgacctgcttaggagccttgacgccagcaggaagaaggcgcggctccggatcagtagcctcgcccggctcaggcagctgctctcggcctccttcgtcaccgtcgtcgccgccgttgccgtcgtgggcgcgttcatcggcgtgcatatcctggccgcgttcgcggcgttcccgatgatgtcgccggcttggctgggtctcttctctggccgatcggttcggcgagcactggtgcagctggaggccgcgaccaagggcacgtacatactgaaccgggacatggacaccataagccgcctcgtggcacggctgcgcgacgagggggagcacatgctcgcgctgctgcagctgtgcgtggagcacctcgccatggctggcgagaagggcaggctcgtgaaggaggtgctgaagcagctgtgcaagaacgaggagagctttaggcagcagctggatgacctggaggagcacctcttcttgtgcttcatgaccatcaacaaggccaggagcatggtgatgaacttcatagctggcgcagagcagaactccagttgaccacaagaaaaaaaagtgttcgtaggacagattgtaacttctgtacatactacgtagtttttatttctcagtacaggaaaaaaaagagagactaagatttcct

SEQ ID NO: 91609 - DNA, 581 bp, Zea Mays
gcatgccaagaatgacgtgccgagtggcactcgccgccgtcctcctgtgcgcggccgtggcggcggccttggggggcaagcgggcgcccatcccggacgacctgcgcgacgtgatagacgacgaggaggacgacgagtggcgccgttatggcacgcccccgtcgcgaggcccgggccgtggcgacggcccaccgcctgacctttcaaggatggatccagccgccctccaggacgagctcctccgcggccaaaccggcccgtcgttcggcttcgtgaagctccgcccgggcaccgcccgctcacgggaggatgtggtggggatcgcgacgaggtggagcaatgtgctgcggacgggatcggtggacgccaaattcgtggcggttaattttggaacgctcatgttcaccatggagagagggcgagacatactcgagctgaaggagtttatcctgagtcaggacgaggcctacgagttcaaggttggcgatcgggttttccgcaggcctggagacccacccctggaccaagttcttgataagccacagaaaaagaagcgtcataagtctagagacgaactgtag

SEQ ID NO: 91610 - DNA, 1129 bp, Zea Mays
atctttccaaattttactcgcctcctgtacctctctcccgtgtgaccatcacaacaaaaataaaatcaataatagagagagaagaggtagcaacaccggctgcttaatctcttcttttccctcctctttatctccagcgcatcgtaaagggaggagcggagcggcgaattcttgtggtttcccaagatgtcttctccaagcaagcgccgggagatggacctcatgaagctgtgaggattctggatgatgagcgactacaaggtggatatggtgaacgatgggatgcaggagttctttgttgaatttcgtgggcctaacgaaagcatttatcaaggaggtatatggagggttagagtagaactgccagatgcgtatccttacaaatccccatcgattggtttcatcaataagatatatcacccaaatgtcgatgaaatgtctggttcagtctgtttggatgtcatcaaccagacatggagcccaatgtttgatcttgttaatgtgttcgaggtcttccttccacaacttctgttatatcctaatccttctgatccattaaatggagatgcagctgcgttgatgatgcgtgatcgccctgcttatgaacaaaaggtgaaagagtactgtgaaaaatacgccaaaccagaggatgctggtgtcagcccagaagacgagtccagtgacgaagagctgagtgaagaggaaaatgactcgggtgatgaggagataatgggcaaaccagacacatagtcgagttggaacctagatctgtaatctgcacacgatgtttattgcagcaagtgcaattaaatagtccatggatgttcccgtgcagtctgaatgccatgtaaataaactgcaatttcatgttcgctaatcttatttccatctccagttgatcaattgaatttccagcataactgtcttgatatcatgaatgtaggtttgtgcatttagagctaatttaggaatctcatttttcgaagggatttttattttgacacgagaaattagtttattttactttgataaaatagaaatctcttggaaaaatagagtttccaaactaaccctgaaattggttggttgtttaatatctgtgcaatctttaggagaagcaaattcgtca

SEQ ID NO: 91611 - DNA, 1117 bp, Zea Mays
atctttccaaattttactcgcctcctgtacctctctcccgtgtgaccatcacaacaaaaataaaatcaataatagagagagaagaggtagcaacaccggctgcttaatctcttcttttccctcctctttatctccagcgcatcgtaaagggaggagcggagcggcgaattcttgtggtttcccaagatgtcttctccaagcaagcgccgggagatggacctcatgaagctgatgatgagcgactacaaggtggatatggtgaacgatgggatgcaggagttctttgttgaatttcgtgggcctaacgaaagcatttatcaaggaggtatatggagggttagagtagaactgccagatgcgtatccttacaaatccccatcgattggtttcatcaataagatatatcacccaaatgtcgatgaaatgtctggttcagtctgtttggatgtcatcaaccagacatggagcccaatgtttgatcttgttaatgtgttcgaggtcttccttccacaacttctgttatatcctaatccttctgatccattaaatggagatgcagctgcgttgatgatgcgtgatcgccctgcttatgaacaaaaggtgaaagagtactgtgaaaaatacgccaaaccagaggatgctggtgtcagcccagaagacgagtccagtgacgaagagctgagtgaagaggaaaatgactcgggtgatgaggagataatgggcaaaccagacacatagtcgagttggaacctagatctgtaatctgcacacgatgtttattgcagcaagtgcaattaaatagtccatggatgttcccgtgcagtctgaatgccatgtaaataaactgcaatttcatgttcgctaatcttatttccatctccagttgatcaattgaatttccagcataactgtcttgatatcatgaatgtaggtttgtgcatttagagctaatttaggaatctcatttttcgaagggatttttattttgacacgagaaattagtttattttactttgataaaatagaaatctcttggaaaaatagagtttccaaactaaccctgaaattggttggttgtttaatatctgtgcaatctttaggagaagcaaattcgtca

SEQ ID NO: 91612 - DNA, 1212 bp, Zea Mays
atctttccaaattttactcgcctcctgtacctctctcccgtgtgaccatcacaacaaaaataaaatcaataatagagagagaagaggtagcaacaccggctgcttaatctcttcttttccctcctctttatctccagcgcatcgtaaagggaggagcggagcggcgaattcttgtggtttcccaagatgtcttctccaagcaagcgccgggagatggacctcatgaagctgtgaggattctggtggcgtgattcggtgattttttctataggatttcgatgcggattccttgatctgcgtttctactgcatgttgatgcctgcaggatgatgagcgactacaaggtggatatggtgaacgatgggatgcaggagttctttgttgaatttcgtgggcctaacgaaagcatttatcaaggaggtatatggagggttagagtagaactgccagatgcgtatccttacaaatccccatcgattggtttcatcaataagatatatcacccaaatgtcgatgaaatgtctggttcagtctgtttggatgtcatcaaccagacatggagcccaatgtttgatcttgttaatgtgttcgaggtcttccttccacaacttctgttatatcctaatccttctgatccattaaatggagatgcagctgcgttgatgatgcgtgatcgccctgcttatgaacaaaaggtgaaagagtactgtgaaaaatacgccaaaccagaggatgctggtgtcagcccagaagacgagtccagtgacgaagagctgagtgaagaggaaaatgactcgggtgatgaggagataatgggcaaaccagacacatagtcgagttggaacctagatctgtaatctgcacacgatgtttattgcagcaagtgcaattaaatagtccatggatgttcccgtgcagtctgaatgccatgtaaataaactgcaatttcatgttcgctaatcttatttccatctccagttgatcaattgaatttccagcataactgtcttgatatcatgaatgtaggtttgtgcatttagagctaatttaggaatctcatttttcgaagggatttttattttgacacgagaaattagtttattttactttgataaaatagaaatctcttggaaaaatagagtttccaaactaaccctgaaattggttggttgtttaatatctgtgcaatctttaggagaagcaaattcgtca

SEQ ID NO: 91613 - DNA, 2278 bp, Zea Mays
atgacgagcggggtagggcgccaagaatggggcggggtcagacgccgtcacgtcgagaacggggtgtcaagccgaactggctcaagcgacgtcgaaaagaatgaagccggacagatagatgggggtcatgtccagctttgctccgtcggtctatccctagaacagctgcccaccccctaccccaccggcaccaccgaccaccgtgtccgccgccttcccttcgcctcccccaaccccgcggctgaccagcgccatgcgcatccgccggtacgccgcgcgcctcctctcctccacctcccccggctccgccgctaccgccgccccctcctcgccgccgcggccgcccgccgcatcctggctccacaccgacgacgacgactgctgcgccttctgcgagctcagccgcccagcctcgcaggagggcctggatgccatcaagcacaaagggtacattgccgaccgggtgctggaatccgttgtcagggccgacgagcgcgtcggcctacccgagcgaccgcctgttcccgaagttaaaaaatgcaagattgatcatgtacctcctgtgaataaagcttgtgtgggactgcaagttgtgaaacttgccgcgaaaccggaaggtgctgctcctgctagtgaagatgctgctgatcctgcaactaaagctggtgtttttgttgtcaatgatgctgctattgagcagggagttaaatgtatagcttctctctcaggtggtgcctccaagatggaggttacagtggagaattctcttgcaaatggaccgaccactgaattagaagtttccaattctcttgcaaatggaccgaccactgaattaggagtttccaagggcacgtcccttgctaatgaatcggctgatctgccaggggttacatgcattatgccagaagttacagacaaacctgttactgatctaggggttataagcaccgtggtggaagttagtgatacaggtcctgtcgttcatgaaactactgaactggaatctgcaggggaggattatattgctagtgaagccactgctgaaccagaagatgctggtagagcttcttgcaatgtagatgacactgctgctttagatgagccacagccgcctaactgtgatctgtacttaggcaatgtgcaggatggaaatgctatagatactgttaccagtacactgcagccttctcgatgtgatgctgcagaaggtggtggttctgtgaatttcacaaccaatattcctgttagagccagaggaccaacctttaagggaggagtgctgaaggataaatctgttgcacccagtgttttacttgtattggacgtattgactagaagcattggtaaatcagggagaacagatgttatttgttatgctaggcgaacaggtaagaggaaggcagagctgctgaaggtaaagaaggaaaatattgacttagaagatggtgttatatgtgagaaagaggagacactggtgagcactgatcgttgtgaatgtgtcttgtcaacagctgggtccatagatgttaaacttgccgacataaagaaagaccttatggataattccgctgtaggcaaggttaaaaagatgaagagaaatagatttgaatgtaatattgattactgccacatggtgttcaagacagaagctgagcttgctgtccacaagaagaacatgtgcacggtcagttcatgcagcagacatttcagatcccacagatacctgaggcgccaccagagtgcacacaacgatgatatgccttacaagtgcccatgggatggttgtaatatggctttcaagtggtcatgggatcgggctgagcatttcaaggtccatgctggggccaagccttacaaatgcacgacgcctgggtgcagcaaaatatttaagtttgtttcagatttcacccggcataggaggaggtgcaaacctcagaggtaaaagcttgcttgatactacagaattaggataatagtgaagtttgtgcttgctacagacctacagtagatgttttttatttgctaggagatccatcgtgcaactgttctgacaacttatagtgggactgtctgtttctttgttgaggaaaatgctaaaatcgttagcttagaaactcgagtttctcaaaatgtatgtacatttgcggaaggtagttgtgcactggttctggttatgatcgcgctgtatcggatctgagacttagagctgtaaatgggaaggtattatttattttattttgtttcaacataatattccatacttatttatctacttgga

SEQ ID NO: 91614 - DNA, 1155 bp, Zea Mays
atgcctgagtcagagtccgttcggctgcctcggaggttgctgccttgttcccttgccggattcgtagagcctgaaggcatggagagcgatagaggactgaatggaggcggccgcgccgctggcaacataggaaacgacagtcgcgcaggaggggttgcagggcaggtgcatcttgataagctctcgtctagtctttcaaggaagaggacccattctttgcatgaggacgagcctgacggtcagtttactccaggtgaagaactcatagatgaagaggttatagagtctgcacatgcagaacaagtgcatcttgctcagctctcacccagtccttcaaaggaagaagattgtcctctaattgagcttctagaaggtttgccccaactagctgaggctgtagccgggatgcatgatagaactgcaagcgatgaccgttttttgttgaacgagcatatgaatctatacaataatatatatagcgagaagcaatgtgctgacaataaatggatcaattgggaaaagatcagacaattccctgggatgccagatgttgagaaagcatgtcatgacattggtcttcatgaattgatggctataaaacagaactggcatgaagaaacaatcaaacagttctactccatattgtttgtaaatgaaagtaggacctcattgacatggatgacaggcggtaataggaagattactgtcacaaagaaattttgtcagaaggttctacatgttccaaccgagcacaatattaagattgagcgccgattgactgatgcacaagaagaaaaaaaataagagtgcagatggtaaccaagtgaattcattaaatcagattattagaaagactatccatcccgctaatggagatagaggtaacattcacggattagtcaggccctattgtatcatattttgttctggaagtcttttaacattgtagacatgatgttcgaggagataaaaaacaaccacatgcacaataaaaagagaatgacatatgccccattcatcatgttacttattaacagtgcagttagagagaaatttgtacctgagggtagaggaaatgaatgtgttcacaaaaggtacaacatggagttcaagttgcttgaacatacaaaggatcatacaactttaaaagggaaa

SEQ ID NO: 91615 - DNA, 1149 bp, Zea Mays
attgcacctccggccaccgcgccatagcccgcagtaattaagcaggcgagaacgacgaagaggcggtcacgcaccacaccgatcaatccagctcgagcgaccgatcacacgtgcagcacagcacagcacagcggtgctcggcgaagagagatgacggggttcgggtcaccgtgcggggcgtgcaagttcctgcgccgcaagtgcgtgcgcggctgcgtcttcgcgccctacttctgccacgagcagggcgcggcgcacttcgccgccatccacaaggtgttcggcgccagcaacgtgtccaagctgctcgcgcacctgccgctcgccgaccgcgccgaggccgccgtcaccatctcctacgaggcgcaggcgaggctgcgggaccccatctatggctgcgtcgcccacatcttcgcgctacagcagcaggttatgaccctgcaggcgcagctggcgtcgctcaaggcgcaggcggcgcaggggcagcagggcgtgcacgaagacgccaagggctacgtgggcagcgccgccgcggagcagctagggtacggctacccctggtgcagcggcaatggaggcgccgcagcagcagcagcaggcgccgtgggcgcgcccgccgcgcagccgggcgcgtacggcaatggcgcgcacgagtccctgaccgcgctgctggggtcgtcggactacatgcagcagtcgctgtaccacgcgttcgagcaggccggcgcggacgacgacgacggccggcaggggtacgccttcgaggcagcggcggagtcctcgtcgctcggggcggaggagagcgggtggaggtcgtcgtcggggtaccaagactgcgaggacctgcagagcgtggcttacgcttacctgaaccatcgctcgtaagaactgagaactactactactacaagagagagagagagagatatagatatagacatatctgtcctcaattcctgatcatgttttggactttagcctggggaaatatatgcgcgattttcgatcgatcagtcgatcggtctccgctacaaataatccagaagcatgcatgcatgtgacagaccactgatatataatagatccacacattattgatcatcagtgtagaaattaacgtacgtagcctaattaattggacaaagaaaa

SEQ ID NO: 91616 - DNA, 1098 bp, Zea Mays
aacaaaccaccacgtcgctataagtatagggtgggctcgtctcggacaagccccggccgtctcgatcccagcatccgagagagctccacaggccaggtccccatcgccgcggcgcttgccccacctctcccccgcccggtagtagcctcgccgccgttgccgagatggggttcgtgtccttcgtcgggagggtgctcttcgtcgccgctttcctcctctccgcctaccaggagtttaatgaattcggtgctgatggtggaccagcagctaaggcccttcggcccaaattcaacgtgtttgtcaaaaatgtatctgctcatctgggagtagctgtgccacacattgagttgaagcatgtgattgctgctacaattggtcttaagggtcttggaagcctcctttttattttgagcagctctctcggtgcttatctcctgctgctgtaccttgctttgatcactcctatcatccatgacttctacaactacgatatggagaaggcagaatttgcaggcctctttgcgaagttcacccaggatttggcgctgatcggagctctgctcttctttctgggcatgaagaactccatcccgaagcggcagggcggcaagaagaaggcccccaaggcgaagacgaactagggctgcttagatagctgcacgcctcaggcggggtgtatcaggccacaggtctatttcgaagcaggcccagcgcgatgcagcgaatgccatcgagctgcgcttttacatgtttatcatcagattccattttgcggggcacggcccggacaaaggtgtgaccggggtgggttaggcgactagattgcacgattatgtacttgcgatttgtttgttgaactgggttgccgacagttaatcttcatttgattttatcttgttagcagcgcaggaaccgttgctgattcagtggttggtagtttctttcacttcctgagttgttggtttagggcatgttcgttttgctcttaatccatgtggattgagtgggattggataggtttaatctcaaataagttaaaatctttcataattttttttaatctcatccaatccatatgagataggaataatcgaacaa

SEQ ID NO: 91617 - DNA, 748 bp, Zea Mays
cgagtccggtttcggtagatctagcgcggcttccgcggagtccgagggagagtgtgggctgggagctccctggtttaatgaattcggtgctgatggtggaccagcagctaaggcccttcggcccaaattcaacgtgtttgtcaaaaatgtatctgctcatctgggagtagctgtgccacacattgagttgaagcatgtgattgctgctacaattggtcttaagggtcttggaagcctcctttttattttgagcagctctctcggtgcttatctcctgctgctgtaccttgctttgatcactcctatcatccatgacttctacaactacgatatggagaaggcagaatttgcaggcctctttgcgaagttcacccaggcaataactgatttctctgttcagaaatgttccacccaacgcacattctgtcgcagtatccaaataacacagaacaacttgtgaccgcaggatttggcgctgatcggagctctgctcttctttctgggcatgaagaactccatcccgaagcggcagggcggcaagaagaaggcccccaaggcgaagacgaactagggctgcttagatagctgcacgcctcaggcggggtgtatcaggccacaggtctatttcgaagcaggcccagcgcgatgcagcgaatgccatcgagctgcgcttttacatgtttatcatcagattccattttgcggggcacggcccggacaaaggtgtgaccggggtgggttaggcgac

SEQ ID NO: 91618 - DNA, 112 bp, Zea Mays
aaaggaatagcaagccaaatattaatgtgtttggttgcaatgatagaacgggacgggatgagacgatccctcaaataaggttgtttggttcagtggcaagggttatgacagg

SEQ ID NO: 91619 - DNA, 216 bp, Zea Mays
gccggcgcgatgagggactgggcgccgtcgatcatcgccacggcgctgttcgcgctcctgtgcccgggcggcgtgctgcagatgcccggccggcaccgccccgtcgacctcatgaacatgaagaccagcttcccgtccacgccgtcatctacttcctgctgctcatgctcttcctcgtcatcctgcagcctcacctctacatctgacgtgagcgtg

SEQ ID NO: 91620 - DNA, 1499 bp, Zea Mays
gatccagctttgctttgtagttgtagcgctagcagcttaactggtctgagctgaggctagctagtcgtgcaggaagaggaaggaatataatggctgagcgggaggtcgtcgaaggcgggacgacgacgggaggcgggctgtggcggaggtatgcgccgcacgtccagatggtgctggcgcagctgtgctacacgctcatgtacttcatcaccgaggccgccttcaaccagggtctcaacccctacgtctacatcacctaccgccatctgctcgtcgccgtcctcatctggcccttcgcatactacctggagaaggggctgaggcctaaaatgacgctcatgctgttcgtggagatattcgtgctctcccttctcggggtgagcttaactctgaacatgtacttcacgagcctgaagtacacgtccccaacgttcgtcacttccgtggtgaacaccatcgcctcgatgacgttcgtcatcgccatcatcctcaggatggagatcgtggacgtgaagagcctacgcggggtcgccaaggtcgcagggaccgtggtgtcgttcgccggggtgaccaccatgactctgtacaaaggagcggccatcacgagcctctggaagtcgcctgttcagatcgccggcagcggcagcggcggcggaggcgtcgcccacgacagctgggtgaaagggtcagtcctcgcagtggccagctgcgtgtgctggtccatctggtacatcatgcaggcgtcgtctctgaagaggtaccccgcccagctctcgctgacggcgtggatgtgcacggtcgggggcatccagtcgaccgtgttcacgctgttcatgcagcacgagccggaggaatggcgcatcggcttcggcgtcaagttctggagcatcgtctactctggcctcgcctgcaacggcttcacggtgttcgtgcagctctggtgcaccgagaagaaaggccccgtcttcgtcaccatgttcaaccccctctccaccatcatggtcgccatcctggcctacttcatcttcggcgaaaacctatacgtcgggagcatcgtcggaggcggggttgtgattctgggcctctacatgctgctgtgggggaaggagaaagaccaggagcggggcacgggcaaagagcgggaacagctcgagacggactgcgagaagcaggcgaagaaggtcagcgactgtgtctacgaagcgcccaagacgacgaagtgactgccgccggccatgagcggcagacggctcaatcaagcgccatgccgtgctccagttcggttctatatttgtgatgtacagagtcaccgatccggtctcgcctcatcagctatgtatatatatgcatatgcaatgcggcaacagacagacgtctggctcagtctgtgaaaccgtgaacctgccctgaagctggagttttttggaaccgtaatatcaccaacactgggcttctgaaaatcggtatcccgaacaacgcaattggaattttagtattat

SEQ ID NO: 91621 - DNA, 1608 bp, Zea Mays
gatccagctttgctttgtagttgtagcgctagcagcttaactggtctgagctgaggctagctagtcgtgcaggaagaggaaggaatataatggctgagcgggaggtcgtcgaaggcgggacgacgacgggaggcgggctgtggcggaggtatgcgccgcacgtccagatggtgctggcgcagctgtgctacacgctcatgtacttcatcaccgaggccgccttcaaccagggtctcaacccctacgtctacatcacctaccgccatctgctcgtcgccgtcctcatctggcccttcgcatactacctggagaaggggctgaggcctaaaatgacgctcatgctgttcgtggagatattcgtgctctcccttctcggggtgagcttaactctgaacatgtacttcacgagcctgaagtacacgtccccaacgttcgtcacttccgtggtgaacaccatcgcctcgatgacgttcgtcatcgccatcatcctcaggtgacaaattaaaggccggaccggacgcgcgcgagatgcatgtcggttatagtttcagtctgttagttccgctagctgacggctgacgcccgtcttgtcctgactggaggatggagatcgtggacgtgaagagcctacgcggggtcgccaaggtcgcagggaccgtggtgtcgttcgccggggtgaccaccatgactctgtacaaaggagcggccatcacgagcctctggaagtcgcctgttcagatcgccggcagcggcagcggcggcggaggcgtcgcccacgacagctgggtgaaagggtcagtcctcgcagtggccagctgcgtgtgctggtccatctggtacatcatgcaggcgtcgtctctgaagaggtaccccgcccagctctcgctgacggcgtggatgtgcacggtcgggggcatccagtcgaccgtgttcacgctgttcatgcagcacgagccggaggaatggcgcatcggcttcggcgtcaagttctggagcatcgtctactctggcctcgcctgcaacggcttcacggtgttcgtgcagctctggtgcaccgagaagaaaggccccgtcttcgtcaccatgttcaaccccctctccaccatcatggtcgccatcctggcctacttcatcttcggcgaaaacctatacgtcgggagcatcgtcggaggcggggttgtgattctgggcctctacatgctgctgtgggggaaggagaaagaccaggagcggggcacgggcaaagagcgggaacagctcgagacggactgcgagaagcaggcgaagaaggtcagcgactgtgtctacgaagcgcccaagacgacgaagtgactgccgccggccatgagcggcagacggctcaatcaagcgccatgccgtgctccagttcggttctatatttgtgatgtacagagtcaccgatccggtctcgcctcatcagctatgtatatatatgcatatgcaatgcggcaacagacagacgtctggctcagtctgtgaaaccgtgaacctgccctgaagctggagttttttggaaccgtaatatcaccaacactgggcttctgaaaatcggtatcccgaacaacgcaattggaattttagtattat

SEQ ID NO: 91622 - DNA, 1578 bp, Zea Mays
ctccgctctacgtctctctcacaagtcacacagcctttgctttccctgcgcgtacgcttctctgcccacaactgttccggactagcagccttgatatctcggccgggaccgggaggagggcggtggctagaaatggatcctccgccaccactggcgctattcgcctccagctcgtcctcgtcctcgccctcgccgccgacgtcgtcgtcgtccggcgcgagcatcaccatggtgatcatcacagtcgtgggcatcctcgcggcgttcgcgctcctcgccagctactacgcgttcgtgaccaagtgccagctcctgcgcgcggtgtggtcgcgccagccgccgtggcaccggcgcgtgcggggggccggcggcggcggcttaacaggcaggcgggacgagccgtcgtccgtcgtccgcggcgacgggcggcggggcctgggcctgccgctcatccgcatgctccccgtcgtcaagttcactgccgcctcctgcgacgccggcgccggcgctggtggcgtggcgccgaggatatccgtgtcggagtgcgccgtgtgcctgagcgagttcgtggagcgcgagcgcgtccggctgttgcccaactgctcccacgccttccacatcgactgcatcgacacgtggctgcagggcagcgcgcggtgccccttctgccggagcgacgtcacgctgccggcgatcccgtcggcgcggcgcgccccggcggcggcggcggcggtccttcccaccagcaggcgccgggacgacgcgctcgccagcgaaagcattgtgatcgaggtgcgaggggagcgcgagaggtggttcagcagcagccacgggacgacgacgacgacgccccggcgccagccgccgaagcagccggcgccgcggtgcagcaaggcggcggagagcgtcggcgacgaggccatcgacacgaggaagacggacgcggagttcgcggtgcagcccttgcggcggtccgtctccctggactcctcctgcggcaagcacctctacgtgtccatccaggagctcctcgccacgcaaaggcaagtgcgcgacccatccgtgcgttcgtgatccgcggatgccatgccatggccgtgcgcctgtgcgtgcagtcagaaggaatacccctgctgtgcctgtgctggcttggctgctataccttatagtactgtagctgtagatggttgtgctcaattctttttttttaattccttgtcactactactactactaggcgctacgtagctgtgactgcaaaaaaacattttacgacgcgcgcgtggctttttgtgcctgcccacggtgacgagtacgacaccgtgctctgctgcgctgcgtcactgcctgcctcccactcccatacgggttgcgatcgcgggtctctttcttgcttgttttctggttcccggggagagatccgcaggtgtcttggttacccctccacaggcacaggggaagatagcatttcaaccatacaatacaatacagggtgggaatccgtttgttaaccgtgttcatgatggcattggccgtccaggtgggacgacggcgacgtcggtcgaccgtgagcccggc

SEQ ID NO: 91623 - DNA, 1088 bp, Zea Mays
ctggcgatggacgcggcggcaggcgcgccaataccagcgccgtcggacgcggggcagggcacggcggcggcgttcccgatcgccatcgtcatcgcgatcgggttcatggtcaccacgctcatcctcatcagctactacttcctcgtggtccgctgctggctccgcggcggggggcccggcggcctgctccaccgcgcgcgccgcgaggacgaccgcggcggcctggcggagcgcgtgtccgcggtcttcttcgccgaccacgatgccgctgagctcccgggcgggctcgacccggacgtagtcgccgcgctgcccgtcgtccggtactaccgccgccgggcgaggtccgcgtccgagtgcgccgtgtgcctgggcgagttcgcgcccggggagcggctcaagctgctgcccggctgctcccacgccttccacatcgactgcatcgacacctggctccaccacaacgtcagctgcccgctctgccgcgccgtcgtcaccgccgtcggcgtgctcgcgcgccacgaccacgacgcctcctgccgcgacctgctgcagctcggcggcggcgacgcgcggcgcgtcgtcgacgccgcggcgagggtcgggtacgggagctcctgcaggttcccgaccaaggccgcccccgccgtcgcgcaggagcccatcgcgcgctccttctccatggactgcttcgcgggggggctcggccggaagccgcaggaaaaggaaccagctgccggcagctgcggggaggccggcccgagccttgccgttgccgccgccggcggcagcagcgacgtcgctgaccgcggcgctggcgagacgagcggccggttccggcggctcctgtcgtcgttcgggctgggtcggagctcgcggagcacggtgctgccgatccacctcgacaacccgtgacggtggcggcggcaccggccgggttcgtgtcgctcaacgatcgattaacctattcccgcacactgcttgttcgcttcattcatgattattaattgagccgtgtcgtttgcatgcaatgtacagctagccacatagaggagaggctttgcttctttttttttttagttttttgt

SEQ ID NO: 91624 - DNA, 81 bp, Zea Mays
gcgtcgccgtcttggtcgtccttgtccgtcccatgcatctctctatcgtctcccggccgggccggcgcgcgacgcgatcac

SEQ ID NO: 91625 - DNA, 526 bp, Zea Mays
atagttcttgtctcctttaataaaatttactggaagcggcagcgaagagctagctctagcagcgcgttgcggcggctatgtatgttgtgcatcagctagcgtttcattagttcttgttgtacttgtcctccgcgagcagctcctccaagaccctgtcgtcgaggcactccagctccaccttctccgagtcgggaacacgggccctccccctgctggccggagccgacgtggtggacgaggaggagccgccgctggtccggccgccgggagccgcgccagctgacgatcctccgctggcggggaagttgagcacggccgtggcgcccttcatggcgaatgcggcgcggtcgtaggccctggcggcctcctcggcggtgtcgaaggtgccgagccagacgcgggagccgccgcgctccgggtcccggatctccgcggcgaacttgccccacggccgcttccgcacgccgcggtacttgccctccttcttgtcgtcctccattaatcttagtagttcagcttgattcag

SEQ ID NO: 91626 - DNA, 1737 bp, Zea Mays
aacatctcgccgtcatcacgtctctctttcaacttcgttcgcaagaagctcagaacagaacccatcaaaagcgaggctgcgagagagagagagagagagagagagagagagcgagagagagagagagagagagagagagagagagagagagagagagagagagagtgagtgagggaggcgccgccgcgccgacgccgagtcctttctccatcctgcatctgccgctgtttccgacaggatgtttctcacgaggacggagtacgaccgcggggtgaacaccttctctccggaggggcggctgttccaggtcgagtacgccatcgaggccatcaagttgggatccactgcgatcggtttgaagacaaaggatggtgttgtactcgccgttgagaaacgtgtgacctcaccactgctggaaccaagcagtgtggaaaaaataatggaaattgatgagcacataggctgtgccatgagtggacttattgctgatgctagaacactagtggaacatgctcgtgttgaaactcagaatcataggttctcatacggagagccaatgactgtagaatcttcgacacaagctatctgtgacttagctctgcgttttggcgaaggtgacgaagagtcaatgtcacggccatttggagtctctctcctaattgctggacatgatgagaatggacctagcctgtactacactgacccatctggtacattttggcaatgcaacgcaaaggcaattggatcaggttctgagggagctgatagttccttgcaggaacagtacaacaaggaattgaccctccaggaggcggagaccatagccctttctatcctgaagcaggttatggaagagaaggtgaccccaaacaacgtcgatattgccaaggttgcccccaagtaccacctctacacccctgccgaggtggaagccgtcatcgcgaggctgtgaaacgcttccgagctcttgctatccacgtcatcaatcggtaatagacgacccttgtacgaagcgtgggcaccatggtccttgattatggcttgattatggcaaggacagtcgatgttagtttgattcacagctcagccgggctcacttgtctttttaaatttttatgaattagcgttgagaactttgtactgccaagaaagttcattttttttaccctttcggtttctccgtttttgtgggcaattagctggtgctcgtgatgtgattgcagcctggaatttccagtcctgcgtgaaacggcagcggcggtatcctctgcttttcacgcgccagtcatttatttttgaatgaaaaaaaatacacgccctgcggtgggtacccgtaaaagtcgtccgtcgcccgacggaggcggcggccctccagtctccagttgaggccgcggcgggtggtggccgcgaccgcgaggggtttgggatgtgggtgggtgtggccgtgtgccgccggtgcgtgacgatcttgcccaggtttggcatgtaacgcggattcctcttggcgttcggggaaggatggtctccttttcgtaaggaagctcgcgcaggggtttccagcgcccgcagtggagaatcagcattcggtcccatcaaccttgactatggatggctagtggagatgtcgagtggaaaagctagccaagggatctttgtggtacaaggacactttgcgatgcatttgtcggtggatggagacaggtgttggcgtccttccccgccaaaaaagaaaagaaa

SEQ ID NO: 91627 - DNA, 1810 bp, Zea Mays
ctcgccgtcatcacgtctctctttcaacttcgttcgcaagaagctcagaacagaacccatcaaaagcgaggctgcgagagagagagagagagagagagagagagagcgagagagagagagagagagagagagagagagagagagagagagagagagagagtgagtgagggaggcgccgccgcgccgacgccgagtcctttctccatcctgcatctgccgctgtttccgacaggatgtttctcacgaggacggagtacgaccgcggggtgaacaccttctctccggaggggcggctgttccaggtcgagtacgccatcgaggccatcaagttgggatccactgcgatcggtttgaagacaaaggatggtgttgtactcgccgttgagaaacgtgtgacctcaccactgctggtacttactgagtcacttcttcttaactggtcatagtgctaaattatatggctacaaacatcaggatattaaactaggaacattgcttgctgcccaaacttattttttgtatgattattctcttagttggtctatgattggattctcaagatttcttgaacaagatttatctttaggtagctcacctcatctttcacatagttgttatcttgttggtgcagccctgcactctatgcatttttttttgcaatatattgtcctccatctgatggaatcttagggcctattcggcagtctgttccagcagctgctgctgtggctgtctgccatctcacattttgctgtagcgttgaaccagcagcagcggttgagacaagcagtcaaacaggaattttgtggcttcatggaattttgtggtttgattacaggaatcagaggatatagcagcttcacttagcctctggttttcatgttatggtctgtttcatgtttaagttgtcaattattgaattcgatgtttctttgctcttttatgtcataggaaccaagcagtgtggaaaaaataatggaaattgatgagcacataggctgtgccatgagtggacttattgctgatgctagaacactagtggaacatgctcgtgttgaaactcagaatcataggttctcatacggagagccaatgactgtagaatcttcgacacaagctatctgtgacttagctctgcgttttggcgaaggtgacgaagagtcaatgtcacggccatttggagtctctctcctaattgctggacatgatgagaatggacctagcctgtactacactgacccatctggtacattttggcaatgcaacgcaaaggcaattggatcaggttctgagggagctgatagttccttgcaggaacagtacaacaaggaattgaccctccaggaggcggagaccatagccctttctatcctgaagcaggttatggaagagaaggtgaccccaaacaacgtcgatattgccaaggttgcccccaagtaccacctctacacccctgccgaggtggaagccgtcatcgcgaggctgtgaaacgcttccgagctcttgctatccacgtcatcaatcggtaatagacgacccttgtacgaagcgtgggcaccatggtccttgattatggcttgattatggcaaggacagtcgatgttagtttgattcacagctcagccgggctcacttgtctttttaaatttttatgaattagcgttgagaactttgtactgccaagaaagttcattttttttaccctttcggtttctccgtttttgtgggcaattagctggtgctcgtgatgtgattgcagcctggaatttccagtcctgcgtgaaacggcagcggcggtatcctctgcttt

SEQ ID NO: 91628 - DNA, 714 bp, Zea Mays
gtcccctaaagctacagtgttaacagattcacattttccatttctttttcatttttctttgttttcttctcatttgacactatataaatgatacaaaaaaattgtatttattaattttcaaagcaataaattcgaaatatcaataataattacattgcttgttttgttgttgtgtaattgttgtcggtaacgcgccacatagtataatatcgttgtcaaaatatgttttcgaatggacaagcttgcaccgtaagccagtactcttcttcgagaagccatagtctagcttcccttgcacgacaagcgcatggcttctatccgaagcgtacttcctctataaataccaagtgagccttccatacttcactcaaccttgcctttacaaactccacaaccatgaatccctacttagaaaacaattttcttgtgcgcttgatggaagaaatggaagaggaagaagaagagttgcagttggcgagacacatggtcaataggaggcgacgtgcgcgcaatgagcgtcgtcatggtggttcgatcccagggcgtgttaggattcatcgtgatcacatgagcggcgatgcaagaatccgagtggactactttggagcgaacccggtgtacacggatgctcaatttcgtaggaggtatttacaattaacacattctttttaccatgtacaaaacttcatgacccctattatgacacatgaattc

SEQ ID NO: 91629 - DNA, 449 bp, Zea Mays
aagcatcttacacgaagctcttctagctattcctcttcccgcgaagaagtggtaatctgcttgatcagtaagtacacaataatggaccgggtgacgaagctggcttctcagcgtgcggtggtgatcttcagcgcgagctcatgctgcatgtgccacacggtgacgcgtctgttccgcgagctcggggtgaacccaacggtggtggagctagacgaggaccccagctggggaaaggagatggagaaggcactagcgaggctgctgggccgcagccctgcggtgccggcagtgttcatcgggggcaggctcgtcggctccaccgacaaggtcatgtcgctccacctcagcggcaatctcgacacaatgctacgcaacgcgggcgcactctgggtgtagtgcaagtgcagtgcagtgccagctgctctgtgagtcacctgatacacggagaa

SEQ ID NO: 91630 - DNA, 639 bp, Zea Mays
cgtggtggatggtggcaaggtagatagcagggagatgagataacagagattttttttttgggaaaacgcaggagaactgcgcctcaatatattaagaagaagagataaatccagatcaaagagatctggacagattacaaggcctcctcagggaggccagaaacacaggaaactgaaaaaatccatcaaactaaacaactccctagtctccatgagataacagagaaaggaggtgaaaatgggattggctgtaattgcttgtttattgctgaaccagaccttcctgattgatcccaaatacccctccttttgcctaattagcccctgttacgagcgcctataaatgttcccgaccgtaacaatagctcaaggttacacctggaaactggggagaaaaggaagatgtaattcagtctgagttttataatatgttatttaggtgatcattaagatagatggaaatcacaacttgcttgtcagatcatttcaaattcaaatgtgcagtttcaaattcgaatgtgtctattcaataacatctattcaatgctcatctgctttctttgttgtatcaaccaaatgaccactaaacaataggaagctaaaaaggagccaaaatagagaaataaaaggcaaaaatac

SEQ ID NO: 91631 - DNA, 1986 bp, Zea Mays
aagccgaccaaagcaagcagtcacacccatttcttgtgtcagtctccctctccctctctccgatcctctctactagcagagaggcaagttcaatcttctagctagcagcatcggagaaggcagagctcgactgacacaatggcgggaggccagctcaacgtgctgaccacactcgaccaggccaagacacaatggtaccatttcatggcgatcgtcatcgccggcatggggttcttcaccgacgcatacgatttgttctgtatcgcgctcgtgaccaagctcctcggccgcatctactactccgaccccacctccaaggaccccggcagcctcccgcccaacgtgtcggccgccgtgaccggcgtcgccctctgcggcacgctggcgggacagctcttcttcggctggctcggcgacaagctcggccgcaagagcgtctacggcttcaccctcatcctcatggtgctctgctccgtcgcgtccggcctctcgttcgggcatacgcccaagggcgtcatcgccacgctctgcttcttccgcttctggctcggcttcggcatcggcggcgactacccgctgagcgccaccatcatgtccgagtacgccaacaagaagacccgcggcgccttcatcgccgccgtgttcgccatgcaggggttcggcatcctcttcggcaccatcgtggcgctcgccgtctcggcggcgttccggaacgcgttcccggccccgccctacttcgtggacgcccaggcgtcgctcgtcccggaggccgactatgtctggcgcgtcatcctcatgttcggcaccgtcccggccgcgctcacctactactggcgcatgaagatgcccgagacggcgcggtacacggcgctcatcgcccgcaacacgaagcaggccacggccgacatggccaaggtgctcaagaaggagatcgagaaagaggatgagcaggtggagcgccaggtggtcggcgccgacacatggggcctcttctcggcgcagttcctccggcgccatggcctccacctgttggccaccagcagcacgtggttcctgctggacatcgccttctacagccagaacctcttccagaaggacatcttcaccaaggtcgggtggataccgccggcgaggaccatgaacgccatcgaggaggtgtaccgcatctcgcgcgcccaggcgctgatcgcgctctgcggcaccatcccgggctactggttcaccgtcggcctcatcgacatcgtgggcaggttctggatccagatcatgggcttcttcatgatgaccgtgttcatgctcgcgctcggggtgccgtacgagcactggaccaaggcgtccaaccacaccggcttcgtcgtcctctacgggctcaccttcttcttcgcaaacttcgggcccaacagcaccaccttcatcgtgccggccgagatcttcccggcgaggctccggtccacgtgccacggcatatcggcagcggccggcaaggccggcgccatcatcggcgcgttcgggttcctgtacgcggcgcaggaccccaagaagcccgaccatggctactcgccgggcatcggcatccgcaacacgctcttcgtgctcgccggaaccaacttcctgggcatgctcatgtcggtgttcgtgccggagtccaagggcatgtcgcttgaggagatctccaaggagaacgtggatgatgaagctgaggccgaagtgtagagagaccgtctgcacctctgcgtgcagatgcacatgtgaattgtgttgtgatgcaccgatggtgttgtgtggttttgcttgtgtcactgtatctgcgcatacgctacgaataaccgtatctggctggctggctggccatgctcgcgcgtgcgtgtctgggtgctcgtgtgcagcaaatcaatcagccgctgtgtgatttgctaccttttgatattgttgctgattatgtaataattcaaaactattatgggtaatttctcgattttgtgtgtt

SEQ ID NO: 91632 - DNA, 2260 bp, Zea Mays
ttattgagaaatttaattgtactcatctatctaatctactttctctctcctcccccgtcccgtcgcttcgatcccccgagcttcgctcacaccggtcacctccgcctcctcccgcttcgcgcgcatctccttctatcgctccagcctccagcacacgtcctccatgccctcgcggttctgatccggccatagccatgcagcaccgctcgccggaggcggcttcggcatccgcctccccgacggccgcggcggtggaggccatggcgccgggcgtcggcggggttgagccggccgtgacgctcgaccaggttccgcgctggagcgacccggaccagcgcatctccctgctgtcccccaccgccgccggatccgagaccccggcctcgtccttcctctccttctccgacccgctcaccggcgacgacgcggccgcgggggccgggggccgtggcgcgtcgcggttccccgtcgattacgagatcaactcgaagatctacctctggcgaggccatccgtggaacctcgaggtcgacgccgtcgtcaactccaccaacgagaacttggacgaagctcatagcagtcctgggctccacgctgctgcaggttcggggctcgccgaggagtgcgccaccctgggtggctgccgcactgggatggctaagatgacaaatgcttatgatttgcctgccaggaaggtcatccatactgtgggcccaaaatatgctgtaaagtatcacacagctgcagagaatgcgcttagccactgctacaggtcttgtctagaactgctcattgagaatggccttgaaagcattgctactggctgcatttacacagaagccaagaattatcctcgtgaaccagctgctcatgtggcaataagaactgtgagacgttttctggagaaacaaaaggacaaaataacagctattgtcttctgtacgatatcatcatctgacacagagatatataagaggttgcttccactatatttccctcgggacaagcaagaagaagagatagccgcattgaaacttccagctgatgttggggatgagaatggtgagacagtaatagatgaaaggaaaataagaataaagcccttgcctgctggggaagcaaatagcaaaacaccaattcctacacttgcagatatcccgcttcctgattcgagtttgacacgtagaaggaattctttcaagttggactcatatttggatcctgcttttatgtctataattaaggatcctgatctccgacgcaaggagcaatgggaaaaatctcaggcaaacaagggacttaacttggctaacatgcttgggtttggtgatcttggcagtccaccattatctgctgctgaagaatattcacttcattcacgataccttgctaaagcgaattctatgaatctgtcagatgttgctgaaatgaaaataatttaccgtggaggagttgatagtgaagggcgtccagttatggtcattgttggtgctcactttcttcttcgctgcttggatctggaacgatttgttctatatgtagtaaaggaatttgaatctctgattcagaagccttacacaattgtctatttccactctgtggcatcattacaaccacagcctgatttaggattcatgaaacggttacaacagatactaggtcggaagcataaaaaaaatcttcatactatatacatactccacccgacactgggactgagaacagccgttatggcgatgcaactttttgttgacggggaggtctggaagaaagttgtatatgtcgacagacttgtgcagctattcagatatgtaccacgtgaacagctcaccattcctgattttgtgttccagcatgaccttgaagtgaatggtggaaagggcataatcgttgacccaagaacaaagcatatctaccagagaccatctggttgatctgtcataaacctgcaaatgaacgcttcacagtaccactctcactatgcacagactctccatgaatgactctgtccagtcctctgtagaagagtacccttctagagctgtgcattttgtatctagttgacattgttgctctgtgctattccttcgcctttttgggaggcatatttatgtatcttaataactattctgtataaacaaaaaaaatgctaaatgtctctcaatttgcctatagctgggcgtgctcgttaggttctgtaaatttttgacaggtccatagatattgagaaataggattgcagtctgttccgtctgagtaa

SEQ ID NO: 91633 - DNA, 715 bp, Zea Mays
attatcgttattgctgttttccttggcccctggtccaagctttggctttcttcatcttctttccctgtacggccggagctcgcctttcttctcaagaaaacgctcgatataaattcacacgaggccaccccgttcgtcgccaccattgcagcaacatcttctcttagctccagtttcttagcgtctcgtctcgtctcgtctctgacctacgtacagagatcaagcagcaagtccacccttccatcaccgatggagaaggacggcgcgccgaagccggcggcggccaccgcaccggagccggaggggacccatcagccgacgtggtgggcacaaacgcagtgggccagcatcaagaggaaggcccgcggcgccagcgaatacgccatgctcaggacccgccagggcatcaccttgttcggagagcccaagctcgggtctttgatcaaggccaagggagcttcagccaacgatgagtcgtcccagtagtcatgcatgtgttcttgatgccacgggcggcagcaaacacgggtgaactcagttcttgttacttcttgttagtaggtgacctgtcttagactctgtctgcattgcattggtggttactggtagctgtagtttcggctctggcgtgctcaggtctgctgggtcgatgagctagctagtcatcaagtcatgcagttttaatgttttataataataatggtttttactgtca

SEQ ID NO: 91634 - DNA, 684 bp, Zea Mays
atggcggcgccggccaactccaccaccttctccggcgacgtgtgggcggagctccgcctggccgacgcccgcgacgtgccgcacatccaccgcctcatacaccatatggccgagttcgagctgctcaccgacctcttcgccgccaccgaagagctcctcacgtccacgctcttcccatcgccgacgccgcctcccttcacctccttcacagccctcgtccttgacctatcccccacccccatcctcccggactcctcttccaccatcgcctcccgccgcctcgacctctccgcgtccccgctcgcagacccggaggccgccaccttcgcctccccgcgcggcggcgggcgcgtcacggccgggttcgtgatctgcttccccaactactccaccttcctctccaagcccgggctgtacgttgaggacatcttcgtgcgcgcaccctggcgccgccgcggccttggccggatgatgctgtctgccgtcgccggcagggccgccgagctcgggatgggccgggtggagtggtgcgtgctcgactggaacaagaacgccatcgacttctacgaggggatgggcgccgatgtgctcccgcagtggcgcatctgccggctcgccggcgcagcccttgacaaatacaaggtcagccagaaggaggccgccggtgggaaggctgcagagtag

SEQ ID NO: 91635 - DNA, 1275 bp, Zea Mays
tgatcatttcaagactgcacttgggacaagcaacccatctgctctgcgtgaaactgttgttgaagtgccaaatgtctcttgggaagatattggtggcctggaaaatgttaagagggagctacaggagactgttcaatatccagtggagcatccagagaaatttgaaaagtttggcatgtctccttcaaagggtgttttgttttatggccctcctggctgtggcaagactttgttggccaaggcaattgccaatgaatgccaagctaacttcattagtgtgaagggtcctgaactgcttaccatgtggtttggtgagagtgaggccaatgtccgtgagatttttgacaaggctaggcagtctgctccatgtgtcctcttttttgatgagctcgactccattgctactcagagaggaagcagtgttggtgacgccggtggtgctgctgatagggtgttgaaccagctgcttactgagatggatggcatgaatgccaagaagacggtttttattatcggtgcaactaacagaccggacatcattgacccagccttgctgaggcctgggcgtcttgatcagcttatctatattcctctgcccgatgagcagtccaggcttcagatcttcaaagcctgtctcaggaagtctcctgtggccaaggatgttgacttgaatgctctcgccaaatacacccagggtttcagcggtgcagatatcacagagatctgccagcgcgcgtgcaagtatgccatcagggagaacatcgagaaggatatcgagagggagaggcgcagcaaagacaaccccgaggctatggaggaagacgaggtagacgacatcgctgagatcaaggctgctcacttcgaggagtccatgaagtacgcccgtcgcagcgtgagtgacgccgacatccgcaagtaccaggccttcgcccagacactccagcagtcccgcgggtttggcagcgagttccggttccccgaccaaccgacggcagctgctgctgcggccgatcccttcgcatccgctgcagcagcagctgacgatgatgacttatacagttaaattagcagtcctgtgttgtgacgcatattgagtactttgcttcgttatatgcttattatagtagactacgtgcaagacgcggagtcgctgtacctatataatacttaagttaatattttggtacgatcctctgaatcgtgccatgagccatggtttgtgttcatttgagattatcaaagatggccagctctaccattgtgaatgataaattt

SEQ ID NO: 91636 - DNA, 1462 bp, Zea Mays
cttcccacttcagcccccaaacccgaacactcgcaatcgcaagtcgcaaatatctgtcgccgtctcgccaacagcaccaaccgcctcctagaactcgaccgccatggcgagccaaggcgagccgtcttcctccgatccgaaggggaagaaggattactcgacggcgatcctggagaggaagaagtcgccgaaccggctggtggtcgacgaggccaccaatgatgacaactccgtcgtcgctctgcacccggacaccatggagaggctccagctctttcgcggtgacacggtcctgctcaagggtaagaagagaaaggacactatctgcattgtgctcgcagacgagacgtgtgaggagccaaaggtccggatgaacaaggtcgtcaggaagaacttgagggttcggcttagtgatgtggtatctgtccatcaatgcccagatgtcaaatacgggaagcgtgtgcacatacttccaattgatgacaccattgaaggcatcactggcaacttatttgatgcctttctgaaaccatactttcttgaagcctatcgtcctttgaggaaaggagaccttttcctagtcaggggtggcatgagaagtgtagaattcaaagtcatagagactgatcctgcagagtattgtattgttgcaccagatacagaaatattctgtgagggtgagcctattaagagggaggatgaggaaagactcgatgaagttggctatgatgatgttggtggagttagaaagcagatggcccaaatcagagaactggttgaacttcccctgcgtcacccccagcttttcaagtctattggtgtgaagccaccaaagggcatattgctgtatgggcctcctggctctggcaagacccttattgctagagctgtagctaatgagacaggtgctttcttctttttgatcaatggaccagaaatcatgtcaaagctagcaggagaaagtgaaagcaacctcagaaaggcatttgaagaagctgagaaaaatgcaccttcaatcatttttattgatgagatagattccatagcacccaagagagaaaagacccatggagaagttgaaaggcgtattgtttcacagctcttgactcttatggatggcctcaagtctcgtgcacatgttattgttatgggtgccacaaaccgtccaaacagtatcgatcctgctcttagaaggtttggtcggtttgatcgtgagattgatatcggtgttccagatgaagttgggcgccttgaggttcttcggattcacacgaaaaacatgaagcttgctgaagatgttgacttggagatcattgcgaaggatactcatggttatgttggtgctgatcttgctgccctttgtactgaagctgctcttcaatgcattcgtgagaagatggatattatagatcttgaggatgagacaatagatgcggagatactgaactctatggctgtctca

SEQ ID NO: 91637 - DNA, 1798 bp, Zea Mays
ctccacgcgcggggcgcccctcctcctatttatggcggcccgcgccagcggcttctggttcctcacctcctggtcagaccaagcggcacgcacaagcgcacagccacggtgagcagagaagaaacgcatccacagaagggacaaacgtccggagcggattccacattccagtctcggtctcggtccatgggcgcgggaaagggaggagacggcggcgaggcggcgcccgaggccgcgcagcccgtcgtgctgaagatgaaactgcattgcgccggctgcgcgcacaaggtcaagaaggccatcaagcgcgttcccggtgtggactccatcgtcacagacgtcgcggcgaacacggtcgtcgtggtggggacggccgacgcgggcgcgctcaaggcgcggctcgaggccaagaccaacaagcccgtggagatcgtctccgccggcggcgcccccaagaagcctcccgccgcggagcccaagcaggacgccggcgccggcgtcggtgagaagaagggggtcaaaagcgcgagccccaacgaggaggagaaagagaaggggaagaagcaacaggcggaggagaaagagagagagaaagagaaggggaagaagcagcaggtggagtcggtgctgctcaagatccgcctgcactgcgacggctgcgccgaccgcatcaggcgacgcatcggcaagatcaaaggcgtcaaggatgtggtgctggaggccaatgccaaggacgaggtggaggtcacgggcaccatggacataccgaacatggtctcctacctcaaggagaagctcaaccgcgacgtggaggccgtggcgctgcccgtaaggaaagagggcggcggcagcgagggcgagggtgagggcaaggacgacaagaagcacagcggcggcggcggcggcaaggacaaggtcgccgccggggcagccggcgacgacaggatggacaagggcaaagggatcgaggcgtcggcggcgggtccgtcaacggcggccgccgcagcgtacatgtctgcgccggcgggggcgagcacgtaccacgtggctccgccgcacgggtacgttgcgtatgagcaggccccgcctcccgctagctactatccctacccgtactacggctacggcagtggcgatggcatgggccacgccaacccctcctactaccagccgcagccgcagccgcagcccgacgggaaccagcagccgcaggtggcgtacccgccatacccgtaccaattcgacatggcgccggcgccgcagctcttcagcgacgagaaccccaacgcttgctccgtgatgtgacgccgccgccggtgcgtgtccttgttgcgttccgtcggcgagctcactgatccgccgtcagctttaaccttagccatccggccgagaaagaagaactcgacctgtacatatcgtcaatgaggaatcagccttagtccagagccctaggattattttcctgatgaaattttgcttcatttgtttaatcattttgttctcacctcctcctgatgcgatcagcgctttgttctactccccactggtatggtagaaatctgcgactgcgtcctgtcaggacatgtacaaaggggtctgttgaccccgtctgcatgatgtcagttctgtaaaaaaaatcgccaacggcaggaaacggagcctccgtcgtcttgtgagggactccgaaaattaagggcctaaaacttagcagatttattataggtttatgatcttttacaacacatgttaatatgtcactaccgaatacatctactttgctttagtgctttagtcgtca

SEQ ID NO: 91638 - DNA, 2102 bp, Zea Mays
agcggattacgcacctccacggctccccagtccccacgcaggccgctctgttctgccagcagttggcacaagcagcttgggcgcaaaagaacaactgcgatcgagcaagggacaatggcccgcaccgcggcgccggccgcgggctacggagaggacggagtgtaccgctccccgcgcccggccgtgcgcatcgagtccgacacaggcctctccctcaacgacctcctcttccgccgcgccgacgtgtgcccctccgctctcgcgctggtcgactccgccaccggccaatccctcaccttcgccgcctttcgctccgccgtcctcaccacggccgtcgccctctcctcgcgcgcgggcgtccggcgcggcgacgtcgtcctcttcttcgcccccaactgcttcctctaccccgtctgcttcttcgccgtcaccgccctcggcgccgtcgctaccacggccaaccccctctacacccctcgggaggtcgctaaacaggccaccgactcgcgggccaagctcgcaatcacggtctctgaactccttcccaaaatcgtggacctcggcttccccaccatcctgctcgacggcggcggcgacggcgacgcggccagtgccgccgcctccaagcctcagggagccagcgtgacgctttactcagacctcgtttccggggcgcgggagacggagtaccgccgcccgccgacgaagcagagcgacacgaccgcgctgatgtactcgtccggcacgacgggggcgagcaagggcgtaatcctgacacaccgcaacttcatctcggcggcggccatgatgacagcggaccaggacgcgctcggagaggggcccaacgtcttcctctgcttcctgcccatgttccacatcttcggcttgtccgtcatcacgttcgcgcagatgcagcgtggcaattccgtcgtcgtgatgtcgcggtttgacatggactctgtgatggccgcggtgcagcggcaccgtgtcactcacctcttctgcgtgccgccggtcatgatagcgctcgccaagctcgggagcgttgggaaatatgacctcagctcgctcaggttcatcggctctggcgcagcaccgctcggcaaggacgtgatggagggagtggccaagaattttccagaagctgtgattgcccagggttacggaatgactgaaacttgtgggatcatatctttagagtacccagaaaaaggacaaattcgtcaatttggttcaactggagcacttgtctcaggagttgaagcaaaaattgttgatgtagaaacattgatatgtctgccaccaaatcaactaggagaaatttgtgttcgaggaccgaacataatgcaagggtatttcaacaatgtgcaagctactgaatttacaatcaagcaagggtggttgcatactggtgatattggatactttgatgagggaggtcagcttttcgtagttgatagacttaaagaactgattaagtacaaaggttttcagattgcacctgccgagcttgaagggctacttctgtctcatccagaaattctggatgctgttgttatcccgttccccgatgctgaagctggtgaagttcctattgcttacgtcgtaaggtcctctgagagttctttgactgaagttgatgtccagaaatttattgaaaagcaggtcgcatactacaaaaaattgaggagggtgacctttgtggacagcgtaccaaaatctgcttcagggaagatcttgagaagagaactcatctctaaagtcagatcatccaagctatagcaagccggcttctgtgttcgtaatactgcttgcctcctatctactcccctcagtctaaattataagtcatagatcatagatgtatatcatatctaaatacatcgtatgcagagaagctagaacgacttccaatttgaaaatttgtcagattgagcgtaaaggtttacatgttactgagcggagcttatcaagcaatacattcagcttgacacagtttgtgggacatgtatacatggtggtgtcggatgacttgtatcgaatattgggcctgatttacattcactattcgaaaatagtacagatataaaacaaaactaaaa

SEQ ID NO: 91639 - DNA, 2099 bp, Zea Mays
agcggattacgcacctccacggctccccagtccccacgcaggccgctctgttctgccagcagttggcacaagcagcttgggcgcaaaagaacaactgcgatcgagcaagggacaatggcccgcaccgcggcgccggccgcgggctacggagaggacggagtgtaccgctccccgcgcccggccgtgcgcatcgagtccgacacaggcctctccctcaacgacctcctcttccgccgcgccgacgtgtgcccctccgctctcgcgctggtcgactccgccaccggccaatccctcaccttcgccgcctttcgctccgccgtcctcaccacggccgtcgccctctcctcgcgcgcgggcgtccggcgcggcgacgtcgtcctcttcttcgcccccaactgcttcctctaccccgtctgcttcttcgccgtcaccgccctcggcgccgtcgctaccacggccaaccccctctacacccctcgggaggtcgctaaacaggccaccgactcgcgggccaagctcgcaatcacggtctctgaactccttcccaaaatcgtggacctcggcttccccaccatcctgctcgacggcggcggcgacggcgacgcggccagtgccgccgcctccaagcctcagggagccagcgtgacgctttactcagacctcgtttccggggcgcgggagacggagtaccgccgcccgccgacgaagcagagcgacacgaccgcgctgatgtactcgtccggcacgacgggggcgagcaagggcgtaatcctgacacaccgcaacttcatctcggcggcggccatgatgacagcggaccaggacgcgctcggagaggggcccaacgtcttcctctgcttcctgcccatgttccacatcttcggcttgtccgtcatcacgttcgcgcagatgcagcgtggcaattccgtcgtcgtgatgtcgcggtttgacatggactctgtgatggccgcggtgcagcggcaccgtgtcactcacctcttctgcgtgccgccggtcatgatagcgctcgccaagctcgggagcgttgggaaatatgacctcagctcgctcaggttcatcggctctggcgcagcaccgctcggcaaggacgtgatggagggagtggccaagaattttccagaagctgtgattgcccagggttacggaatgactgaaacttgtgggatcatatctttagagtacccagaaaaaggacaaattcgtcaatttggttcaactggagcacttgtctcaggagttgaagcaaaaattgttgatgtagaaacattgatatgtctgccaccaaatcaactaggagaaatttgtgttcgaggaccgaacataatgcaagggtatttcaacaatgtgcaagctactgaatttacaatcaagcaagggtggttgcatactggtgatattggatactttgatgagggaggtcagcttttcgtagttgatagacttaaagaactgattaagtacaaaggttttcagattgcacctgccgagcttgaagggctacttctgtctcatccagaaattctggatgctgttgttatcccgttccccgatgctgaagctggtgaagttcctattgcttacgtcgtaaggtcctctgagagttctttgactgaagttgatgtccagaaatttattgaaaagcaggtcgcatactacaaaaaattgaggagggtgacctttgtggacagcgtaccaaaatctgcttcagggaagatcttgagaagagaactcatctctaaagtcagatcatccaagctatagcaagccggcttctgtgttcagaagctagaacgacttccaatttgaaaatttgtcagattgagcgtaaaggtttacatgttactgagcggagcttatcaagcaatacattcagcttgacacagtttgtgggacatgtatacatggtggtgtcggatgacttgtatcgaatattgggcctgatttacattcactattcgaaaatagtacagatatgtaatatggctctgctgcgtgtacatcttacagacagttgtacgaagaaatattgtccgacagtttgtgcaaccagcgcattatctgtgggactgttatagcca

SEQ ID NO: 91640 - DNA, 1678 bp, Zea Mays
gttctgccagcagttggcacaagcagcttgggcgcaaaagaacaactgcgatcgagcaagggacaatggcccgcaccgcggcgccggccgcgggctacggagaggacggagtgtaccgctccccgcgcccggccgtgcgcatcgagtccgacacaggcctctccctcaacgacctcctcttccgccgcgccgacgtgtgcccctccgctctcgcgctggtcgactccgccaccggccaatccctcaccttcgccgcctttcgctccgccgtcctcaccacggccgtcgccctctcctcgcgcgcgggcgtccggcgcggcgacgtcgtcctcttcttcgcccccaactgcttcctctaccccgtctgcttcctgcccatgttccacatcttcggcttgtccgtcatcacgttcgcgcagatgcagcgtggcaattccgtcgtcgtgatgtcgcggtttgacatggactctgtgatggccgcggtgcagcggcaccgtgtcactcacctcttctgcgtgccgccggtcatgatagcgctcgccaagctcgggagcgttgggaaatatgacctcagctcgctcaggttcatcggctctggcgcagcaccgctcggcaaggacgtgatggagggagtggccaagaattttccagaagctgtgattgcccagggttacggaatgactgaaacttgtgggatcatatctttagagtacccagaaaaaggacaaattcgtcaatttggttcaactggagcacttgtctcaggagttgaagcaaaaattgttgatgtagaaacattgatatgtctgccaccaaatcaactaggagaaatttgtgttcgaggaccgaacataatgcaagggtatttcaacaatgtgcaagctactgaatttacaatcaagcaagggtggttgcatactggtgatattggatactttgatgagggaggtcagcttttcgtagttgatagacttaaagaactgattaagtacaaaggttttcagattgcacctgccgagcttgaagggctacttctgtctcatccagaaattctggatgctgttgttatcccgttccccgatgctgaagctggtgaagttcctattgcttacgtcgtaaggtcctctgagagttctttgactgaagttgatgtccagaaatttattgaaaagcaggtcgcatactacaaaaaattgaggagggtgacctttgtggacagcgtaccaaaatctgcttcagggaagatcttgagaagagaactcatctctaaagtcagatcatccaagctatagcaagccggcttctgtgttcgtaatactgcttgcctcctatctactcccctcagtctaaattataagtcatagatcatagatgtatatcatatctaaatacatcgtatgcagagaagctagaacgacttccaatttgaaaatttgtcagattgagcgtaaaggtttacatgttactgagcggagcttatcaagcaatacattcagcttgacacagtttgtgggacatgtatacatggtggtgtcggatgacttgtatcgaatattgggcctgatttacattcactattcgaaaatagtacagatatgtaatatggctctgctgcgtgtacatcttacagacagttgtacgaagaaatattgtccgacagtttgtgcaaccagcgcat

SEQ ID NO: 91641 - DNA, 1609 bp, Zea Mays
gttctgccagcagttggcacaagcagcttgggcgcaaaagaacaactgcgatcgagcaagggacaatggcccgcaccgcggcgccggccgcgggctacggagaggacggagtgtaccgctccccgcgcccggccgtgcgcatcgagtccgacacaggcctctccctcaacgacctcctcttccgccgcgccgacgtgtgcccctccgctctcgcgctggtcgactccgccaccggccaatccctcaccttcgccgcctttcgctccgccgtcctcaccacggccgtcgccctctcctcgcgcgcgggcgtccggcgcggcgacgtcgtcctcttcttcgcccccaactgcttcctctaccccgtctgcttcctgcccatgttccacatcttcggcttgtccgtcatcacgttcgcgcagatgcagcgtggcaattccgtcgtcgtgatgtcgcggtttgacatggactctgtgatggccgcggtgcagcggcaccgtgtcactcacctcttctgcgtgccgccggtcatgatagcgctcgccaagctcgggagcgttgggaaatatgacctcagctcgctcaggttcatcggctctggcgcagcaccgctcggcaaggacgtgatggagggagtggccaagaattttccagaagctgtgattgcccagggttacggaatgactgaaacttgtgggatcatatctttagagtacccagaaaaaggacaaattcgtcaatttggttcaactggagcacttgtctcaggagttgaagcaaaaattgttgatgtagaaacattgatatgtctgccaccaaatcaactaggagaaatttgtgttcgaggaccgaacataatgcaagggtatttcaacaatgtgcaagctactgaatttacaatcaagcaagggtggttgcatactggtgatattggatactttgatgagggaggtcagcttttcgtagttgatagacttaaagaactgattaagtacaaaggttttcagattgcacctgccgagcttgaagggctacttctgtctcatccagaaattctggatgctgttgttatcccgttccccgatgctgaagctggtgaagttcctattgcttacgtcgtaaggtcctctgagagttctttgactgaagttgatgtccagaaatttattgaaaagcaggtcgcatactacaaaaaattgaggagggtgacctttgtggacagcgtaccaaaatctgcttcagggaagatcttgagaagagaactcatctctaaagtcagatcatccaagctatagcaagccggcttctgtgttcgtaatactgcttgcctcctatctactcccctcagtctaaattataagtcatagatcatagatgtatatcatatctaaatacatcgtatgcagagaagctagaacgacttccaatttgaaaatttgtcagattgagcgtaaaggtttacatgttactgagcggagcttatcaagcaatacattcagcttgacacagtttgtgggacatgtatacatggtggtgtcggatgacttgtatcgaatattgggcctgatttacattcactattcgaaaatagtacagatatgtaatatggctc

SEQ ID NO: 91642 - DNA, 2101 bp, Zea Mays
gcgagacagagcggattacgcacctccacggctccccagtccccacgcaggccgctctgttctgccagcagttggcacaagcagcttgggcgcaaaagaacaactgcgatcgagcaagggacaatggcccgcaccgcggcgccggccgcgggctacggagaggacggagtgtaccgctccccgcgcccggccgtgcgcatcgagtccgacacaggcctctccctcaacgacctcctcttccgccgcgccgacgtgtgcccctccgctctcgcgctggtcgactccgccaccggccaatccctcaccttcgccgcctttcgctccgccgtcctcaccacggccgtcgccctctcctcgcgcgcgggcgtccggcgcggcgacgtcgtcctcttcttcgcccccaactgcttcctctaccccgtctgcttcttcgccgtcaccgccctcggcgccgtcgctaccacggccaaccccctctacacccctcgggaggtcgctaaacaggccaccgactcgcgggccaagctcgcaatcacggtctctgaactccttcccaaaatcgtggacctcggcttccccaccatcctgctcgacggcggcggcgacggcgacgcggccagtgccgccgcctccaagcctcagggagccagcgtgacgctttactcagacctcgtttccggggcgcgggagacggagtaccgccgcccgccgacgaagcagagcgacacgaccgcgctgatgtactcgtccggcacgacgggggcgagcaagggcgtaatcctgacacaccgcaacttcatctcggcggcggccatgatgacagcggaccaggacgcgctcggagaggggcccaacgtcttcctctgcttcctgcccatgttccacatcttcggcttgtccgtcatcacgttcgcgcagatgcagcgtggcaattccgtcgtcgtgatgtcgcggtttgacatggactctgtgatggccgcggtgcagcggcaccgtgtcactcacctcttctgcgtgccgccggtcatgatagcgctcgccaagctcgggagcgttgggaaatatgacctcagctcgctcaggttcatcggctctggcgcagcaccgctcggcaaggacgtgatggagggagtggccaagaattttccagaagctgtgattgcccagggttacggaatgactgaaacttgtgggatcatatctttagagtacccagaaaaaggacaaattcgtcaatttggttcaactggagcacttgtctcaggagttgaagcaaaaattgttgatgtagaaacattgatatgtctgccaccaaatcaactaggagaaatttgtgttcgaggaccgaacataatgcaagggtatttcaacaatgtgcaagctactgaatttacaatcaagcaagggtggttgcatactggtgatattggatactttgatgagggaggtcagcttttcgtagttgatagacttaaagaactgattaagtacaaaggttttcagattgcacctgccgagcttgaagggctacttctgtctcatccagaaattctggatgctgttgttatcccgttccccgatgctgaagctggtgaagttcctattgcttacgtcgtaaggtcctctgagagttctttgactgaagttgatgtccagaaatttattgaaaagcaggtcgcatactacaaaaaattgaggagggtgacctttgtggacagcgtaccaaaatctgcttcagggaagatcttgagaagagaactcatctctaaagtcagatcatccaagctatagcaagccggcttctgtgttcgtaatactgcttgcctcctatctactcccctcagtctaaattataagtcatagatcatagatgtatatcatatctaaatacatcgtatgcagagaagctagaacgacttccaatttgaaaatttgtcagattgagcgtaaaggtttacatgttactgagcggagcttatcaagcaatacattcagcttgacacagtttgtgggacatgtatacatggtggtgtcggatgacttgtatcgaatattgggcctgatttacattcactattcgaaaatagtacagatatgtaat

SEQ ID NO: 91643 - DNA, 945 bp, Zea Mays
ttggcagttgagattccaaaatggggtctggatgcaattgataaaatatgcaggggctttctttggaggggccaaaaggaggcgagaggtcattgccttgtcgcctggggtcgtgtttgccgaccactgcagcttggaggtcttggcatatctagttttccagaattatgttgggcccttcgaatgcgttggctctggctgcagaagacagatcctactcgcccttggtctgatctccacataaaagtacctggagaagctagagctttcttcatggatgtggtcattactgaggtgggggatggcacaaatacaaagttttggaaggataagtggttatatggtaagcgaattaaagatcttactccaagtttatatagggctatacccaacaggattatcaatagcaggacagtttatgaggcaattacagacagaaaatggatcactgacattaaaggtcctctgacagtgggagtcttaacagattatcttcagttgtgggacatgacttcagtttggcagctgcagcctgaggttgaggataaacatgttttcagtattgctcctaatggcatctattcagcaaagattgcttacgagggcttctttttggggtctgtaattttccctcattacaaggaaatttggaaaacttgggccttgccaaaatgtcgtttcttcatctggctggttgcacaaaatcgtctctggacagtggatagacttactaaaagagggctgagtcatcctgagaagtgccccttttgtgatcaagaagatgaaactattgatcatctccttgttacctgttccttctccagggaattctggtacctgttgttacggaatttcggtctgcattctttggctcctcaacctgatgttggctcatatctaggctggtgggaatcggtggggaatattgctgctggacgagggtaa

SEQ ID NO: 91644 - DNA, 529 bp, Zea Mays
gttttccgtgatgtgctggcgaatatcgccatcgaattgcagcgtgggatgtcaccaggatcgttttcagcgcctgatcaccacgctacgtcaggtgctggagtgcgatgcgtctgcgttgctacgttacgattcgcggcagtttattccgcttgccatcgacggtctggcaaaggatgtactcggtagacgctttgcgctggaagggcatccacggctggaagcgattgcccgcgccggggatgtggtgcgctttcccgcagacagcgaattgcccgatccctatgacggtttgattcctgggcaggagagtctgaaggttcacgcctgcgttggtctgccattgtttgccgggcaaaacctgatcggcgcactgacgctcgacgggatgcagcccgatcagttcgatgttttcagcgacgaagagctacggctgattgctgcgctggcggcgggagcgttaagcaatgcgttgctgattgaacaactggaaagccatgtgtacttgaccttccaaactaacatcttt

SEQ ID NO: 91645 - DNA, 181 bp, Zea Mays
ctaagtgatattgtgcttctggtgtgattgtgtgtttggggctgttatgtctgtctttgtttctctcctcctgttatcccctgtaattcttgtgtggcctcttggctataacttttgtgtttttgcttcttctattaatataaaaaatacgcaattctcttgcgtattcgagaaaaaaaaa

SEQ ID NO: 91646 - DNA, 290 bp, Zea Mays
aggggttggggacacatatttatagccctaggggctgcactaccacacctcacacacactacacaacaggattgtcctctagatgctaaagagactacataggacagtcaaaagcgactgttgtcctctagatgctaaagcgactacagaggacagtcaaaaagcgactgctgtcctctagatgctaaagagactacagaggacagtcaagctgtcctctagatgctaaaggactacagaggacagtcaaaagcaggttgtcctctagatgctcaagacttattccatca

SEQ ID NO: 91647 - DNA, 1093 bp, Zea Mays
ggccaagcgcaggcggcacacgtcggatccaccagacacggcacgtcggcagcacgatcgatcaggaacggaatgcttcgcgtcgacgacctcatcgccgagctctgcctcctgccggccagagtcctccgcaagaggaagcgcaaggaattccagacggtggagctgctggtgcggatggactgcgagggttgcgagcgcagggtcaagaaggcattggaggacatgaaaggcgtgagcagcgtggaggtggaccagaagcagaacaaggtgtcggtgtccgggcacgtggaggcgccggaggtggtggagcggctgcggcggcgggccgggaaggaggccaagccgtggccctacgtgccgtacgaggtggtgccgcacccctacgccccgggcgcctacgacaagaaggcgccgcccgggtacgtccgcaacgtgctcgacgaccccgacgccgcgccgctcgtcagggccagctccatggaggagaggtacaccaccgcgttcagcgacgacaaccccagctcctgcgccgtcatgtgaaaacaataatatactcgtgctctcatagccgctgtacaattttgtgcaaatgtaaattactactaccttatctcgagcgtggaacctgaatcagtcccaaacatcctctaaataagaagcaaaacaacttatttaaatgtcttccaaaagttcacaatttcagctccaccattttctaaagctccaaccccacaccctatatatatgagtgcaaaagggaaacagaaagacaaattaaatatgcaatggtttgtatcgcccttatgagacccccatcactaatatgttccgttccaacggcctgcacacaaccggatggtttctgatagcagctataaaacacgaccaagaaccactaaaaacacgaggtttcatcacaactcccacggtgaagctgcttaccgctgctatgatatactaaagatatagcctccaaaacaaggaatgcaggttaaatcgccatcacacaaatcagcagggagcagcagcagaattaataataatgtcttgtacttatataacttcatccactcagcagtctccgaatgat

SEQ ID NO: 91648 - DNA, 108 bp, Zea Mays
atgaactttatctacagaaacttcactaaaatcagttcaaatttatataaaaaatgccaaaacacggaattgtctcgtgttccaagcgggctgaaaaagacgtgaaat

SEQ ID NO: 91649 - DNA, 1467 bp, Zea Mays
catctatccaaccaaccgcgtcggggctccgtagtccgttgttgagtttccgctcctcgccctcggtcgccgagtccaacagggagggggaggaggagcggctgcgctcgcaatccattccataccattctccctagtctcccggactctccctccctccctaatcttctcgtccgtcgtctcccatggaacggctcatctccacgcccgccgcctccccgacccaaacccggatccggggacccctttccctcccctctcggctccccgcggccgcggcatggccgcggctgcgctgccggcccggcgcgatcgcgctggcgtcgccgctgcgccacgaggctctctccgccgcaccggaggaggcgcggagccagccgccgccaccggctgccgtcggcagcccgtgggagcttctcgggagtctgctcccaaaggcttgcactgctgcccttttcctattgatgacagttgttactagttccctgcactcgagccttcctgcctatgcatcgatgcaaccagttgccaaaactggtggaggaggaggtctcttcacgacagagatactaagcagtggctgggctggttttttagctgggtgcttacataccttgtctgggccagaccatctggttgccctggcgccactgtcaattgggagatccagacttgagagcggactggttggcgccctttggggctgtggccatgatgcagggcaagtcattttcggcctgctcttcttgctactcaaggaccggttgcacatcgaggtgttccgtgcatggggaacaagagttgtaggcctgacccttctgatcataggagccatgggtgtccgggaagcttcggaggtccaagagtcctcgctggtgctggagggcgtggacaccagcagcatgagcagcaacgagcctctgcagcccgcttcagctccccggaagaagaaagtcggtttcgcaacgttcgccacggggatcgtccatgggctccagccggacgccctgctgatggtcctgccagcgctggctctcccgtcgcgcttcgccggcgcggccttcctcggcatgttcctggtcggcaccgtgttctcgatggggagctacactgcctttgtgggctcctgtagcgaggccctgaaagagaaggttcctaggataacagagaaactgacctgggctgcctcgctcgtagctatagccatgggtgtagccctcctggttgggcagttctttgggttcagcctgtactgatgctagcagctacggtacgtgtgttttactcgatcggcgcggtattgtttttctgtaagagcatcgctggcaattagtttgatattatcattatcatagatggttattgtttgtgagactactgctgcaactagacctgtcacctgcttactttacactgattttctgctctgtatcatttgctttttaattctctatttagctgtttgct

SEQ ID NO: 91650 - DNA, 2969 bp, Zea Mays
atggagtcgacaatggagaagccggcggtgatggacgcggcgcgcggcggcggaggggtcgggcgggccaagtcggaccacctggcgccgtcgctgtcgctgagccggacggcgtcggcggagacggtgctgggcacggcggcggacgcggccaagcccgccgggttcgggaggaagcggcgctccgcgtcggtcggcggcggcaacaacaacagccacatccgcaagtcccggagcgcgcagctgaagctggacgtggaggacctcgtcagcagcggcgccgcgctcagccgcgcctccagcgccagcctcggcttctccttcaccttcaccggcttcaccccgccgctccagcacatgtgctccgccgacccgccttcattcagcgacgacgagaacccagtggacatcgaagccggcacacggcgcaagaaactggtgaccgagccgaccctgccgatatacctcaagcggaaaagcttcgtatctaagcggcggcgtgcgtggcagtttgcggaggtgaagtacagggtggcggggaagggctcgccgcgggagatactgggagggatatccgggtcggcgtcccccggcgaggtgctggcgctgatgggcccgtccggcagcggcaagacgacgctgctgagcatcctgggcgggagggccgccgccggcggcgccgtcgacggctgcatctcctacaacgacgagcccttcagcaagtccctcaagcgcagtcctctgagctctggcccagcagaaggactgggccaaaactttggtatactgggctatggtgtgagttcttgttttacggcccaagacgcttacacgggtctgctgttcatgggctataagcagcgtgttgaacgttgccaatcctcgcgtggccgcgtgcctgcaacctgttcgacagatctccgtagccggctctggttagaggctgagccctcgcgcctgttaaaacggtccttgcttggggagacaccaagaaaggacatcattttagtagatccactaattgttaactactccatagtttatttttgcaacttctggttggacaaattaataaggataggatttgtgactcaagatgatgttctctttgcccatcttactgtgaaggagacattgacttacgcggcactactccgtctcccaagaacaatgacacagcaacaaaagaaagagcgagcgatggacatcatacatgagcttggccttgaaaggtgccaggacacaatgattggaggatcgtttgtacgtggggtttcagggggtgaaaggaaaagagtttgcattggaaatgagattttaatcaatccatctttactgtttctggatgagccaacatctgggctggattcaactacagctctaaggatcgttcagcttctccatgacatagctgaggatgggaagacggtaatcaccacaattcaccaaccatctagcaggctgtttcataagtttgacaagcttattctcctgggcaaaggaagtttgctatactttgggaaggcatctgaagccatgccatacttccagtccattggatgcgccccacttattgcaatgaaccctgcagagtttctactggatctcgccaatggcaacactaccgatgtctcagtcccttcagaattagatgacaaggtgcatatggaaaatcacaatttggagaacaataattccaagattgactacaggccatcagcacaagatgttcatgagtatttggtagatgcctatgagactcgagtggcttttaaggagaagaagaagcttctagcaccactgcctatcagtgatgatctgaaggcaactataacatcatcgaagcgagagtggggcacatcctggtggcagcaatattccatcctcttttgtagagggatcaaggaacgacgacatgattacctgagttggatgagaatcacccaggtcatagctacatcggttatcttaggtttactgtggtggcactctgatcccagcacactaaaaggtctagaggatcaggctggcctgctgtttttcatcgctgtgttttggggcttctttccagtgtttactgcaatctttacattccctcaagagagggcaatgctgaacaaagagcgcgcagtcgacatgtacaagctcagtgcatacttcttggccaggacgacgagtgatctaccacttgaccttttcctcccaatcatattcatggtgatcgtgtacttcatggcaggcctcaaagcaactgccacacatttctttctcagcatgttgaccgtctttctcagcataattgctgctcagggactcggattggcaattggagctactctgttggacatcaagaaggcgacaactctagcttcagttacagtcatgacattcatgctagcaggaggcttctttgtaaagagcgttccaccattcatctcctggctgcgctacctgtccttcaactaccacacgtacaggctcctgctgaaggtgcagtacgaccccgtgccggacatcctgaccaccacgaggcacatggacagcggtggcaccgaggtggcagctctcgtcgccatggtcatcgggtaccgggtgctggcctacctgtccctgagaagggcgaaggccctgggcagctagcgcatcccttcaccgcagtgactgaagcctgagctcgtggagcgggttgggtcattgggtgtgtagggaagtttgtgctatattgcgctgtgaaaagatggaagtctttttttttaacttttctgtctttttcaactaagttctgagcaagtaccaacactgaagaacaaggatctgtagcgagtgtaccagagacaagctgtgctgtaatttttccttcacaacgattgcgtggttaaagtgattgagtataagcgtgagtttagattgccggcatattcttaggatgggtagctctaggacaaattctgttcatactcccaagaacg

SEQ ID NO: 91651 - DNA, 1278 bp, Zea Mays
aaaaagcgcgagagcgaaggaaggaggcgacagggagaaagtatcatctatcccgacccgaggcagcaggatatgaggctgcagtgaacgccgcccggcgtctcgagacgaaagggctctgatcctcctcctctgccattcagtcagtcgtcactcccccgccctcccaatggccacctcgtccgtgctcccgttccacctcccgtcctgcgcgcgccgggccagcaccgccgcgcgcgcctccgcggccccggtggcggcggcggcggcgacgaccgcgcagtccctggaggagtcgttcggccggaagggcctgcggttcgtggccgacccggccggcggggcccccgccgcggagctcagcgtgcggaacggcagctcgctgcacctccgcctcggcgacggcctcgtcacgtcctacaagcccaaggtgcagtggaaggacgacgggtgccgggaggtgctgcacaccgtgggcggcaagggcggcgtcggcctcgtcctcagcgatcaggcgtcaggtggccagtcgtcgctgctcgacggcgccgagtgggccgtcagggacgccgactccgattcctacgacgccgtgcaggttgagctcgggtgcaccatggggaagctggacatctcgtacgtggtgacgctgtactcgctgagcatggcgacggcggtgatcgtccggaacacgggcagcaagccggtggcgctgacgggcgcggtgctgagccacatcaagttcgacaagcgaagcggcacggccgtggagggcctgcggggctgcccctactgctcccacccgccgccggccgccgccttcagcctcctgtccccggccgaggccatgaagcgggaggaccccggctggttcggcggcggcggcggcgaggagccgcgccagggcgtctggaccatcgaggaggacctctacaccacgctcaagaagaaggtgagccgggtgtacgcggcgccgccggaggagaggaagaagcgcgtctacagcaccgcgccgtccaagttcaccaccatcgaccagtatagcgggctcgggttcaggctggtgaggatggggttcgacgacatgtacctgtgcagcccgggaggcatgtacgacaagttcggcaaggactacttcctgtgcacggggatggcgtccatgttggtgcccgtcgtcgtcaaccccggcgaggagtggaaggcggcgcaggtcatcgagcatgacaacctgtaacttctgtatacaggttgagacctcgagggggccccgtcccatgg

SEQ ID NO: 91652 - DNA, 532 bp, Zea Mays
catgcctcttcacctcccctacgctaaaactgttcatcgtttaggggctacagtctcccccttcctcgcgcagcggtgagcgctaccctctccccttcctcgcgacgctcttctctctcacgccagatgcaggggttcactgtagccgccccctcgccttcttcacgcggaaggagccgcccgcgccagacaccggaaacatctcgctccacctcgctccgtctccacccgtccacggaagggcgatttttcgaggcgacgcggcggcggatctcccgtcggccggtggagtcggcaccggcccccctcgggtgcgcggaagacgaagtcgacgtcgtcagcacgcagtgccgttcgcgaccgaagacgaagaggggtaaaatccgcttgcgccgaggttcgtcgcgaccgattcgttggcttccgtctccgaccatcaacggcgccatcagatcgagacggatccccttcgattcgacttggtgggcactaaatctccccttcttaaggtattttgctttacaactccacg

SEQ ID NO: 91653 - DNA, 2836 bp, Zea Mays
ccttttccgctccagacacagcagcccctcttgtaccagtaaaccgtgctgctatcccccgctaccgctacccgccgcgctgctgcggctcgcctccctcctccccagtccccacgccccgccgccgccgccgccacctcctctcgctccctccttttaccccgagcttaagctcgcgcgtacctgcctacctatccgtaggagaggaagaggggacaaggcccggtcggtcggtcggtcggtcggggggctctcggatctcgccgctgcctccccgttcgttcgttcgttcgttgggatctcgcgccatggccgccgtcgcgccgcccccggcccccgcgccggcaccggttccggctcctgctcctgccaccgtccctgtcgcggatcaaaccacggatctgctgcagaagctgtcgctcgactcgcagcccaaggcggcggacgcaacacagcctgctgctgccaccgccaaaaagggcgccgcggcgagccagccgctgagcgtggcgatcccgccggagccgtccatcacgccggtgatccaagactttacggatcccaacctgttttatctaccagcgtattactacggaggctacgacagttccatgagcgagtgggatgattatccgaggtatctaaattcagatggagtggagattgccccagcggtatacggagatatttatggatatgggtatgctccttacggggcatactctcctgccacttccccagttccaacagttgatggtcagatgtttggtgcacagcattaccagtatccaactgcgtatttccagcctcctacaccagttccttctaccactcaaagtgacctacagtcttctaaaaatcctgaaaagccagcagctaaagcagatccagccaagactactaacggtgttcccaatggtactgctcacagtaacagtggaactgtaccccttgcgtcgagccaacaaaattcatcactgacgcctgatggaacttatagggcgcccttgctaggtggagttccttctgctggttacctggacacgacatatgggtatgacagcacaggggcacactttgcatggtatgatggctctgcttatgcaaatggacaacaaagagcaactacaactaaccattttccatcctcaacatttggtaatggttccccagcaaggtatcagaacaagagcaccaccacaccgcagatgggtatgcagaatagaagacctacaactacatcaccagctcctacttatcccaataggatgtaccctagctcccgaccgtacacccagtatgggaattcaataaaaactggccttccctacgggagcaacggttatgattccaggatatatgggcgatggggtcttggtatggataacaggtacaggcctaggggccgtaatggatactatggttatggcaacgagagtcaggatggaacaatcgagttaaacagaggtcctagatctggccgtttcaagaaccagaaattgtacggccatactgtcactattgctgtgaaagggcagagccttccttctggtgaaagcaaggatgatagtgccgtgcctgatagagcacagttcaatagagacgatttccctgttcagtatgatgctgcaaagttctttgtcattaaatcgtacagtgaggatgacatccacaagagtgtaaaatacaatgtgtgggcaagcacaaccaatggaaataagaagctcgatgctgcttatcaagaagctcagtcgaagggttctgcgtgccctatattcttgtttttctcagtgaatacaagtgggcagtttgttggtgttgctgaaatgacgggggctgtcgattttgagaaaaccctggggtattggcaacaggacaagtggaatggttccttctctgttaagtggcacattgtcaaggacgtgcctaacaacattctcaaacacatcatcctagagaacaacgagaacaagcctgtcacgaacagccgcgacactcaagagatacacctagaacaaggccttcagatgctcaagatattcaaggagcatgtcagcaagacgtccatcctggatgacttcgccttctatgagagtcgccagaagctgatgcaggataagaggtcgaaacagcagcaggtccaaaagcaggtctgggacagtaggacccccatttctgtcactggaagcgagcaacagcaggaagctgccaatgggaagcccaatccgtctgtaccaaacggtgtccctgcagaggtgaaggcggcgaaggcttctgcagagaacggcaccgccactccagctatttcctacgcggcaaaggtggcccaagcagcaacagagaaacctgtgctcgccaacggagtcgctaagaccggttagctggaccgcccaaccgatgctccatagctagccgcgagcgacggtcgacgtccccaagagctcgaccgaatcactgtacaagggaaactggtgaccaaccaaggcaggctgtggaactgggcaggcatggcgccctagagcgttgcggctccatctcgtcgctgctggagagcagctggctagctgttagcgttttccctagtctctctctctgttccccgtttcagtttgcttatagcccgaagacttttctgctgtagtattggaatgccagagacctttggccggacaagaggaatttgcgaaggccgtctggctgggtgtgttgcgtcgtcattggggtcgagtatggccggttgtgttcgtcgttatattgagtggatccgaatgaatgtgggttagattggagctttccttttctttctctttcctttacctgtttgattattgcggac

SEQ ID NO: 91654 - DNA, 2804 bp, Zea Mays
ccttttccgctccagacacagcagcccctcttgtaccagtaaaccgtgctgctatcccccgctaccgctacccgccgcgctgctgcggctcgcctccctcctccccagtccccacgccccgccgccgccgccgccacctcctctcgctccctccttttaccccgagcttaagctcgcgcgtacctgcctacctatccgtaggagaggaagaggggacaaggcccggtcggtcggtcggtcggtcggggggctctcggatctcgccgctgcctccccgttcgttcgttcgttcgttgggatctcgcgccatggccgccgtcgcgccgcccccggcccccgcgccggcaccggttccggctcctgctcctgccaccgtccctgtcgcggatcaaaccacggatctgctgcagaagctgtcgctcgactcgcagcccaaggcggcggacgcaacacagcctgctgctgccaccgccaaaaagcagggcgccgcggcgagccagccgctgagcgtggcgatcccgccggagccgtccatcacgccggtgatccaagactttacggatcccaacctgttttatctaccagcgtattactacggaggctacgacagttccatgagcgagtgggatgattatccgaggtatctaaattcagatggagtggagattgccccagcggtatacggagatatttatggatatgggtatgctccttacggggcatactctcctgccacttccccagttccaacagttgatggtcagatgtttggtgcacagcattaccagtatccaactgcgtatttccagcctcctacaccagttccttctaccactcaaagtgacctacagtcttctaaaaatcctgaaaagccagcagctaaagcagatccagccaagactactaacggtgttcccaatggtactgctcacagtaacagtggaactgtaccccttgcgtcgagccaacaaaattcatcactgacgcctgatggaacttatagggcgcccttgctaggtggagttccttctgctggttacctggacacgacatatgggtatgacagcacaggggcacactttgcatggtatgatggctctgcttatgcaaatggacaacaaagagcaactacaactaaccattttccatcctcaacatttggtaatggttccccagcaaggtatcagaacaagagcaccaccacaccgcagatgggtatgcagaatagaagacctacaactacatcaccagctcctacttatcccaataggatgtaccctagctcccgaccgtacacccagtatgggaattcaataaaaactggccttccctacgggagcaacggttatgattccaggatatatgggcgatggggtcttggtatggataacaggtacaggcctaggggccgtaatggatactatggttatggcaacgagagtcaggatggaacaatcgagttaaacagaggtcctagatctggccgtttcaagaaccagaaattgtacggccatactgtcactattgctgtgaaagggcagagccttccttctggtgaaagcaaggatgatagtgccgtgcctgatagagcacagttcaatagagacgatttccctgttcagtatgatgctgcaaagttctttgtcattaaatcgtacagtgaggatgacatccacaagagtgtaaaatacaatgtgtgggcaagcacaaccaatggaaataagaagctcgatgctgcttatcaagaagctcagtcgaagggttctgcgtgccctatattcttgtttttctcagtgaatacaagtgggcagtttgttggtgttgctgaaatgacgggggctgtcgattttgagaaaaccctggggtattggcaacaggacaagtggaatggttccttctctgttaagtggcacattgtcaaggacgtgcctaacaacattctcaaacacatcatcctagagaacaacgagaacaagcctgtcacgaacagccgcgacactcaagagatacacctagaacaaggccttcagatgctcaagatattcaaggagcatgtcagcaagacgtccatcctggatgacttcgccttctatgagagtcgccagaagctgatgcaggataagaggtcgaaacagcagcaggtccaaaagcaggtctgggacagtaggacccccatttctgtcactggaagcgagcaacagcaggaagctgccaatgggaagcccaatccgtctgtaccaaacggtgtccctgcagaggtgaaggcggcgaaggcttctgcagagaacggcaccgccactccagctatttcctacgcggcaaaggtggcccaagcagcaacagagaaacctgtgctcgccaacggagtcgctaagaccggttagctggaccgcccaaccgatgctccatagctagccgcgagcgacggtcgacgtccccaagagctcgaccgaatcactgtacaagggaaactggtgaccaaccaaggcaggctgtggaactgggcaggcatggcgccctagagcgttgcggctccatctcgtcgctgctggagagcagctggctagctgttagcgttttccctagtctctctctctgttccccgtttcagtttgcttatagcccgaagacttttctgctgtagtattggaatgccagagacctttggccggacaagaggaatttgcgaaggccgtctggctgggtgtgttgcgtcgtcattggggtcgagtatggccggttgtgttcgtcgttatattgagtggatccgaatgaatgtgggttagattggagctttccttttc

SEQ ID NO: 91655 - DNA, 3241 bp, Zea Mays
aaaaaacaaacaacaacgacaccaatatataatctcagacctatcaatcgctctcaggaaccgaaccaagaacaggccgtcctgaagatcagccctagttgtcagcatgaaaccaaggaagaaggaaaggacgctggtgcgagagaagctccaaatttttattctcttgaaagctacagagaagacacaggcacaaaggaaagcctcaagcgaaacatccctttccctattgaatggagacaaaacgccaagattgaaaagaaacggaacggctcagcgctggtagtccgtttcctctacatgcatccttatatggatggaataaatattgcatttaagaagcgtatggaaggtttctcctttttctgcatttatttatattttcctctacgcatttctagtggtttggcttgtggaggagaagaaaaaaaaaagcaaggggatgggaaatgcagcgaccagacatcatgtaaaaggtccccggagcaccaagacgaggtgcactcgagttcgagtggggcaatggggattgcagttgtggccatctctgtccctctccgcccccctgcaatcatcctagattccactgtcttggccccgagggctgaggcccttgaccttggttgctttgccctcactcctatctgaattgctttctgggctgtggttgggactcgcaaggaatgcactcatctagcgccatctgcttgatctttgagggatgtgaaatgatggggtttcttggtggagcggcggtggtggtggtgcccatctcattcccactaaccagtaactgcagccacaggttcacattgtgtacttgggccacaacaacgacctcgatccttctctaactacagattcccacctgcaacttctgtcgacagtctttacagagccgaatgaagcgagagaagctattctgtacagctacagctgtgggttctctggttttgctgccttgctcaattcaacacaagctactaccttgtctggaacagacggggttgtatcagtattcaggagccggatgctggaggtccatacaacaaggagctgggatttcatgggcctccgcctgcacatgcatacggaacaatcatcgcagaggcatttgaaattcggagatgatgtgatcgtcggcgtccttgatactggagtgtggcctgaatccaagagcttcagggacgacccacactacggccccgtcccgtcttcatggaagggcacgtgcgtggtaggcgacgagttcgacccggccgccgcgtgcaaccgcaagctcatcggcgcgcgctactacctggccggcttcgagagcgagctcggcccgctgaacaccagcgacgggtcggagtaccggtcgccgcgcgaccgcgtcgggcacggcacgcacacggcgtccacggccgtggggagcgtggcgcccaacgccagctacttcggcggcctgggcggcggcgccgcccgcgggggcgcgcccagggcgcgcctcgcggtgtacaaggtgtgctggtacagggacctgacgggccggtgcagcgacgccgacatcctggccgcgttcgacgacgcgctgtgcgacggcgtgcacgtggtgtcggcgtccctcgggtcgcccccgccgctcatgccgctgctgtccacgagcaccgagatcggggcgttccacgccatgcagcgcggcgtcgtggcggttttctcggccgggaacgacgggccggacgcttccatggtgcagaacgtctcgccctgggggctcaccgtcgccgccagcagcatcgacaggaggttcccgacggtgatcacgctcgggaacaatgcctccatcgtggtgggtttttttctgctcctacgtgctttaccatgggcaaggatgatttatcatatgacgtgcttggcgtacgtggttgcgcagggagagagcttccttgtgaaagccatgaagaatggtctggtagatagcagcagcgtcttcaccgatggggcggcgtgggggaagatcgtgctgtgcttcgccacgatgggaggggtgtccagcgacggcgcggcgctggcggtgtacgccggcaacggcgccggcgtgatcttcgccgacaccataagccggaaatcgagccaggacagcttctggcccaccgtccacgtggacctgtaccagggcacccagatcctcaactacatccgcgactcgagaaagccgacggtgcgcatatctccgagcaagacggttgtcggcgaaacgccggcgccggccgtggcgtacttctcttccagagggccgagctccgtctctccaaagatcctcaagcccgacgtgaccgcccccggagtgaacatcctggcagcatggccgcccaagtcgtcgccgacggtgatccccttggacaagcgcttgacagagtggaacatggactccggcacgtccatgtcgtgcccgcacgtctccggcatcgccgcggtcatcaagtccgtgcacccgacctggtccccggcggccgtcaagtccgccctcatgaccacagcgtacatgtacgacggcacgtcggacgtgatgcaggccggcgggacggtgaaggcggcggacgcgttcgacgtgggcgcggggcacgtggacccgctgcgcgcgctggacccggggctggtgtacgacgcgggcgcgcgcgaccacgtggtgttcctctgcagcctgggctacacggaggccgcgatccggaacatggtgctcccccagccggcgctggacacgagctgcccccgcggcggcggcggcggcggcggcccggaggcggacctgaactacccggccatcgtgctcccggacctgggcggcacggtgacggtgaagcggacggtgacgaacgtgggcgcgaaccgggacgccgtgtaccgcgccgccgtggccagcccgcagggcgcgcgcgccgaggtgtggccgcgggagctggccttctccgcgcgccccggcggcgagcaggcctcgtactacttgaccgtcacccccgcgaagctgtcccgcggccgcttcgacttcggcgaggtggtctggtcggacggcttccaccgcgtccgcacgccgctcgtcgtcagggtgaccaacctgccggacgacggcgtcaaggtggtccaggccgccaacgccacgggcgacggttcccaggccgccgcgtagcctccctagctgcctccggttctaggcaggcggcgcacggtctgagtgagcctgtcactgtcagaagatttc

SEQ ID NO: 91656 - DNA, 726 bp, Zea Mays
ccaggcctgtccttcgagttcatgctgtcataaaaggaaatttctgtgtaatggaaatccttgtgcagcagataaggaggtgctgttggctgtttggtattcatgcaaccatgaacggaaacttgcattacaccaagccatgaaaatccttgtgggggcatataaggtggtataatatctgtttagtcttcaggggcacatttgtctttatcatcctcagatgtatctgctgtgttactgttctgtgtttcccatgaagccaaaagaacatttttgtatatggtgtcagggagggtgcacaagtattcattcagttggattgaccataattggcatgcatggatatgatgccaacattgaacatgtcaacatgaataaccaaacacatgtgggaaccattcttttttcctatgttacatcgaatgatgcaaatttcatgtaatcatgcatctaaaaggttaaaagtttgatggtcggtgaagcatgctggtagatctttttggtgaagtgaacaaatatgctgaaccaaactcatgccaaggtgtgtttggtaagactcatactgtaattctgacgcttcttttttcacctgctaggacactgaatagtttgcctgctgatatgtttttttatctgtgttttattgatatatagtaaattcaagtttcctttttctgtattcttgtaaactataatgacgtgtataaggatatgtttcagctcact

SEQ ID NO: 91657 - DNA, 606 bp, Zea Mays
atgctgggatgcttctcgcggctgcggcggccgacgacagcggcgccggagcccatgccggcggcgtccgacgacgcgtccacgtcgacggcctcggcggcgggctccacctcgccgtgctcgtggtcgtcctcggcgcgctgcaaggacgacgaggaccacggcggcggcgcggtgggcaaggacccgtcggcgctgtccgagcccgggctgtcctcggccatcgcgtcgcgccggttcttcctctcgtccccgggccgctccaactccatcgtcgactcgtcggcgcacggcggcggcggcggcgccgccgccgcccccgccctggacgtgggcgtgggcgcggccggggtggcggtgcccacgtactcgccggacccgcacgccgacttcctccggtccatggaggagatggccgcggcgctgcggctggacgcgcggcgccgcggcgacagggcgcgcctccacgagctgctgctctgctacctcgcgctcaacgacaggcgcgcgcacaagtacgtcgtcagcgccttcaccgacctcctcctccgcctcaccgccgccgccgcagccgccaacctcagcgacgacgaccggcacgagtaa

SEQ ID NO: 91658 - DNA, 876 bp, Zea Mays
atgagccaggagcagccgaggaggccgtccggccatgaggagacgagcggcggcggagagcagggcgccgtccgctacggcgacgtgttcccggcggtgagcgggggcctcgcggagaagcccgtggcgccgcaggacgcggccacgatgcagtcggcggagaacctggtgttcggccagacgctcaagggcggcccggcggcggccatgcagtccgcggccaccgccaacgagcgcatgggcgccgtcgggcacgaccaggccacggacgccaccgccgtgcagggcgtcaccgtctccgagacccgcgtcccgggcggcggccgcatcgtcaccgagttcgtcgccgggcaggctgtcggccagtacctcgcgcgggacgacgacgatggcgccgccgccacggctggcggcggcatcgccggccccggcgccggagcgggaggcggcgcctctgctggcgtggcgggcaaggatatcacgaaggtgaccatcggcgaggcgctcgaggcgacggcgctcgcggcgggtgacgcgcctgtggagcgcagcgacgcggccgccatccaggcggcggaggcgcgcgccacggggctggacgcgaacgtgcccggcggcctggccgcgcaggcgcagtcggccgcggcggccaactcgtgggcgtggggagacgaggacaaggccacgctcggcgacgtcctggcgaacgcgacggcgaggttggtggcggacaagccggtggagagcgccgatgcgttgggggtggctggcgcggagaaccgcaacaggaacgacgggacggcgaggcccggaggcgtggcggcgtccatggctgcggccgcacggctcaaccgtaacgaggcggtctgggagtga

SEQ ID NO: 91659 - DNA, 1559 bp, Zea Mays
tttctttttttccgatgactactcctcttcactctcctcagtcctgagcttatcttccttccccacacgtcaagaaccttgtgacacctctcagcgcctttagcgagttagcctccctcttgcgcgcgccgcagtggcacaccataataaataaatccccaccctctcccggctctttcagtcttcacctagcaacaacctgtccaagaaccagcagccaaaggacaagacaagagacacaacgaaaggaaaggaaccaagagaaagatcgagaagagaggagccttcgcttttggacttgcaccgtcgtgatctgtcccgcgaccacatgaggatccacccagcatcccccaccgccggcggcaagaaggacctccggcgcctgccgcacgtgtacagcaaggtgctggagctgccgctcccggcggacaccgacgtccaggtgttcgaaggcccagacgccttccacttcgtcgcggcgccggccgccggtgcgcgtgccgccgccaccgtgcgggtgcgcaccgtcaggatccaccccggggtcaccaaggtcgtggtgcaggccggagccgccgaacgggccgctgacgacgacgccgccagcgacagcatggagctcgacaggtggcggtcccggctgcccgagccgacctgtccggccatggcggtggccgggtacgtcgacggccagctcgtcgtcacggtgcccaagggccccggtgccgaggaaggcgccgacgcagggcaaggcgaggttacctggaggtgcggcggcggaggcaagatcactggaagactcgtggttgtacagtaggagcgtctaatctatgtactactactccatagtaatgtcttgccatctttctttctttttttggtaaattaagatgggctagctgttcatcatgttgccttccccttccctgcttcgcatcagagacagtcagacaggcgatgtttcatgagctatgttctcttcctcctgcttctcttctcaagcatgtgagaaccagctactgtggattacctttggttgccctaaaatcagatgtaaatttctagataaacaaactgtgcggtgtttgtgtgcccactcgacgcaacttggatttttatcatggcggataagatttggtggagcatgatctgtagaccagatctggtgaccggttactgttactgtttctgaacatcaggtgcaaagtggaccacttggttggtgctgcatgtcacatggattcatcaaatctctccatttttttcatggcccacagtttgcagcctagtgtctgttagtcctgcataagataagatagccgttttggttggtacaaggcaatataaatcgaaaaaatatcaatggttttataatgtatatttatgtagggctacacaaccagaggtactgcagcttgatgaaccatgttctgatgttctagagaagtataccttttttcaatctttctgtgttgcaactcttctagcaacagttcctttgtatactccatccgttccaaattaaaatccgtttacctttgtagtagattcatacaata

SEQ ID NO: 91660 - DNA, 88 bp, Zea Mays
gtcagctgcgaccgccgaccggtagaattacctctcatgcatgcagaagcagaattgcagttacctgcaccacaagcagccagacggg

SEQ ID NO: 91661 - DNA, 972 bp, Zea Mays
tctctcgcgccgcacacactgaccaacagctagctcagctgcacgcactgcacctcccggcccagccgccggccagcatggaggcggtggtagagtgcgccaagtgcgagtgctgcggcctggtggaggactgcacccgggactacatcctgggcgtgcgcgcggccttcggcgggcggtggctttgcggcctctgctccgaggcggtgcgggacgaggcggccaggggcacgacggccagaggccccaccgccgcggggctggaggacgcgctccgggaccacatggccttctgcggcaagtgcaggcggagccccgcgttccgggtcgccgacggcatgcgccagatgctgcgcaggtgctccaagtgactgctggcgccggccgcgtcgtcgtcggcggcggcgttgcacggcgaaaaatcggcagtgcgacccacccgcgtcgtctagcgagcctttgggcatggacaagcaagacaagacaaaggcgaccacgccggccattggccattgctgtgtcgtctccgcgcagtgagctgctggcaacatcatgtatgtgcaaggaaatggctcggcagtcggcagtattagggtgtttagtttggtgatctctgagaacccagggactcgtaggtgctgtaaaggtgaagctagaactagaacgccgctacatcagtcagtgccattaggcttagtacattcttcaggctacagctgtttcgtcaataaggaaactacgtgtatgatctgcggacggcaggcgaaaatagcacgtagtacaattccattcctacatatccggtctgtccatgctctgcatatttctttctctagaggggatgtaatgtaacgcaatgcaacacccctacctggcgtgggtgtgggtgtttggagggggtaccatttgtttctagatttcaaatgtgacgtcactcgaatatttgcggtaataagtttaaataaattagta

SEQ ID NO: 91662 - DNA, 3519 bp, Zea Mays
ctttctgtcttcatggcagtgccggacatagttgcagttggaacttctacggaggaacacacacagtgccggtgcgaatcaatggtggtttcatgacctcttgattcgcttcgtctacctccgtgccccggtgtagtagcctcgtcggatccttcgccaggtcttcctcgggccctgcgccggcgaggagcgcctactaggattcaagatgggggttcaccgtaggaattattcagatgatgaattttcagttgctggcgagaggccagaagtagaattcatggacttccagaacgacgacacctttcaggattattcatgtgaagatacccctgtgcttgtctcagctcctttccctttcgaggatggaaaaccaaaatctgcacttgtcggagaaacatcagctgataccatacagattgagaatacctctcctgaatctgtaaatctgtggagtgtaagaattttctcttcgaacccagaagacagctatgttctatcaatgatgagaccaccgtcagatgatgctaatgaggaggaaaagcatgcttttcttgctttgacgtccgtggaagaccgtacacttctgcctggacaaacccttacagtttggctgtcttgtacgccaaaagatattggcctgcatacatcaatcgtgcatgttgatatcggtgatgagaagattgagcgtgtggcttttcttttggcagatgacaatgtctcccaggccttattttctgataagccttattccaggagacgtgaccaagttaagaaatttgggccttctccaactgtgccaggtcgtcgtccaactaagcagcacgttcaaggattcaaacataggcttcctcagtatgcaatacctgcgcacatccgtgagctcattgaaagtaaacagaaacctgatgtcttatatgatgagttgagcatggtaaactatgcagaatatttcagcactcttctagtcatggaagagctcaatttggaggaggagatgagaacatatgacatggagggtgtcttaatgagaaggaggggtatgcattttttgtctcttgaggtccctggtttggcagaaaaaaggccatcactagtccaaggagacttcgtagttgctagatatgctgggaatcatgctcaggcttaccaaggtttcattcacagggttgaagctgatgagatatttttacaatttgaccatcagtttcacatgaatcatcatgatagaaaccggtaccatgttagcttcacatataacagagtgaacatgagaaggctttacaagtcaattgacgatgcaaaatatttgggacctggcattttgtttcctcgccaatcaccttgtagagttttgaaaaggtggccgtttaatcctctgaatccacatataaatactgagcaagctgatgctgttgcaatggtacttgcctgcagaggaggttcaccatatgtgatatatggacctccaggaactggcaagaccatgaccattgtagaagccgttttgcagctttacacgggaaagaagagggcaaatattctcatttgtgctgcttccaatactgcagctgatcatgtactggaaaagctccttcaagctagctatctgatccggccaagtgatatctttaggctaaatgctcagagtcgccaatacgaggatgtcagtactgattttatcaagttttgcttctttcaagatcgggtgttcatgtgccctcccttacaagcattggtgcggtacaggatagtcatatcgacctattcgagttcctatcagctgcaggctgagggcattcgccaagggcatttcacacacattttcctggatgaggctggccaagcctctgaaccagaggcgatggttcctttgtcggggctgtgtggaagagacactgtggttgtgttagcaggagatccaaagcaattaggtccggtggtttactgtaagcaagcagagaaggatggtctggggacatcatatctggaaaggctgctgactgacttcgagccgtacggaacaaggaatcctaactacgtgacaaaactggtgaggaattaccgctgccatcctgcaatcctggagctaccatcagagcttttctatgagggtgaactgattccctgtaaagaaggagagtcatctgcttatgattgcataggccttcctgacaagtccttccctgttcttttcatcggaattcaaggatgcgatgagagggaaggcgccaacccatcatggttcaacaggatcgaggttagcaaagtggtctctatcatcaggaacctgacaaggggcggggacgttgatgcatctgatataggagtaatcactccgtaccgccagcaagtcgccaagataaagaaagccctagaggcattcgaaatgcccggcctgaaggtcgggagcgtcgaacagttccagggccaagagagggaggtgataatcatctccacagtccggtcgaccgtaaagcacaacgagttcgacaggtttttcaacctggggttcttgagcaaccataaaaggttcaacgtttctatcacccgcgcgaaatcgttgctcgtcatcgtcggaaacccttacattatcaccaaggtagtctctctgtcactcactcattagttcattatagcatgcactgttatgtattcatcatcaaactaactgctgtaacttcaggaccgtcactgggataggctcctgcgatactgcgctgacaatggctcttatcaaggatgcccccttccaccaccggaatctcatgcttattcagacggtaccagattcttctccgagcatgacgacgggcatcaagctggaccttctgggcaggacgactactacaaccaagaagccacctactgcagctacaacaaccaagagccttctgacttcggtttcaggcttggcagtggtgctgaacctgcttcggagaaccaagagttaccgtccgaggagctgcctgaggacgagaagcagccattattcagcaacccccaagcggatctcgaggagacgccgaagcaggacgtcgtcgaggaaggggctgcacagggaggcgtgctggccgacccgacatcgtcgacaaccgccgacgatcagctccagggtgcatatgcggagaagtacagcttccctcctggctggtgcgacgtttcgagcatcccggcgcaaggctggggcgactgatcgtcagacctgcgatcgccattggtagggggggtcattggcagaataattgaggccgatgaccttgtgaacccagcaccctcatcggtgtgtccctttcgttccgtcaagccttcgttcatttctcactgctggacagtttgttgcagcgagtgaactgtggcgtccatgtgtttaggacaggccatcgtgtgtgactgatgctggcaacacgaaacgtacgtgcaatgtggcgtggttattttgcgggtgccatatattgagcgtgtgctcatggtttaaaaagatatactccctccgttacgtttttagttcaaaaatac

SEQ ID NO: 91663 - DNA, 2612 bp, Zea Mays
agacaccaccaccaccggtcaccgaaacgcagcaactgacaggcacctgacggagagctagtcgctctgcagccgagtcgagtcgaactagcgcgcgagcgagcgaggaagaagaagagctagctatactgctgcttcctcgcgcgcagcagcagcagcaaacgaagaaaccagccccatgggcggcagcgcggatgcgaacggcgcggggtcggtgcgggtgccggtgccgccggcgcggccgttcctggacacgttccgcgggaacctcaaggagaccttcttcccggacgacccgttccgcggggtggtgcgggagcgcggggccgggcggcggaccgtggccgcgctgcgctacttcttcccgttcctcgagtgggcgccggcctacgcgctgtccaccttcaagtccgacctgatcgccggcatcaccatcgccagcctcgccatcccgcagggcatcagctacgccaagctcgccaacctgccgcccgtgctcggactctactcgagcttcgtgccgccgctggtgtacgcgctgatggggagctccaaggacctggcggtggggacggtggcggtggcgtcgctgctcatcagctccatgctcggcagcgaggtgtcgccgacggagaaccccgtgctctacctgcacctcgccttcaccgccaccttcttcgccggcgtcttccaggcctcgctcggcctcctcaggttgggcttcatcgtggacctgctgtcgcacgcgacgatcgtggggttcatggccggcgcggcgacggtggtgtgcctgcagcagctgaagggcatgctgggcctcgtccacttcaccacctccaccgacgtcgtctccgtcatggaatccgtcttcagccagacacaccagtggcggtgggagagcgtcctgctcggctgcggcttcctcttcttcctcctcgtcacccgcttcatcagcaagaggcgtcccaagctgttctggatctccgcggcggcgccgttgacgtccgtcgtgctcgggagcgttctggtgtacctcacgcacgctgaaaaccacggcatcgaagtgatcggttacctgaagaaaggcctgaatccaccgtcggtgacaagcctgcaattctcaccgccctacatgatgctcgcgctcaagactgggatcatcaccggcgtcattgccctcgccgaaggcatcgccgtggggaggagcttcgccatgttcaagaactaccacatcgacggcaacaaggagatgatcgcgatcgggacgatgaacgtcctgggctcgctcacgtcgtgctacctgaccacggggcccttctcgcgctccgccgtgaactacaacgccgggtgcaggacggccatgtcgaacgtggtcatgtcgctggcggtgatggtcacgctgctgttcctgacgccgctgttccactacacgccgctggtggtgctgtcggcgatcatcgtctccgcgatgctgggcctggtcgacttcggggccgcgctgcacctgtggcgcgtcgacaaggtcgacttctgcgtctgcgccggcgcgtacctgggcgtcgtcttcggcagcgtcgaggtcggcctggtcgtcgccgtcgccgtctccctgctccgcgtcctgctgttcgtcgcccggcccaggaccacggtgctcggcaacatccccggcaccatggtgtaccggaggatggaccagtacgccgccgcgcagacggtgcccggcgtgctcgtgctgcgcgtcgacgcgcccgtctacttcgccaacgccagctacctgcgagagaggatctcgcggtggatcgacgacgaggaggagcgcaccaagagccagggcgagatgggcgtgcggtacgttgtcctcgacatgggtgccatcggtagcatcgacacgagcgggacgagcatgctggacgagctcaacaagtccttggacaggaggggaatgcagatcgtgctggcgaacccgggcagcgagatcatgaagaagctggacagctccaaggtgctggagcagatcggccacgagtgggtgttcccgacggtgggcgaggcggtggcgtcgtgcgactacgtgctgcactcgcacaagccgggaatggccaaggacagcgccgccgcccacgagagcatggtgtgacgagcaccgccacgccaaccgtatgtgtagtgtgctccggttccggtctgacgtaaccagtcgtcacgcggaccgagatgaattatgtatacacgtgtctcgagtattgtacacctgcaccgtcgcgggaaaaacgaattcagagaagaaaggatcccacccggttttttttggtgaagaaaaaccccatctcgacatggtctcttgaacgcgcgcagacatgcggtgcgctcgcaacttcgttaaggccagatgtgagagggacagagggttccatgggagatgagagttttatagggattaaattctatatatattgttttctagataaatattggcatgataaaatcctctatccagaatcgcctaacctgaacactgatggcctgtatgaaaacactgaactatgctgtgttttctttttttttctccctaaaacgcatgaaagttaatttttcctcttttgtgtgta

SEQ ID NO: 91664 - DNA, 1360 bp, Zea Mays
ccacaccctgcttccttcctttctcccagtcactcgatcgccgtaagactgggggattaaacgtgtcactcactgtgtgcaatgcgtgcgtgcgtgcgtgcgtgcaggaaggcatcgccgtggggaggagcttcgccatgttcaagaactaccacatcgacggcaacaaggagatgatcgcgatcgggacgatgaacgtcctgggctcgctcacgtcgtgctacctgaccacggggcccttctcgcgctccgccgtgaactacaacgccgggtgcaggacggccatgtcgaacgtggtcatgtcgctggcggtgatggtcacgctgctgttcctgacgccgctgttccactacacgccgctggtggtgctgtcggcgatcatcgtctccgcgatgctgggcctggtcgacttcggggccgcgctgcacctgtggcgcgtcgacaaggtcgacttctgcgtctgcgccggcgcgtacctgggcgtcgtcttcggcagcgtcgaggtcggcctggtcgtcgccgtcgccgtctccctgctccgcgtcctgctgttcgtcgcccggcccaggaccacggtgctcggcaacatccccggcaccatggtgtaccggaggatggaccagtacgccgccgcgcagacggtgcccggcgtgctcgtgctgcgcgtcgacgcgcccgtctacttcgccaacgccagctacctgcgagagaggatctcgcggtggatcgacgacgaggaggagcgcaccaagagccagggcgagatgggcgtgcggtacgttgtcctcgacatgggtgccatcggtagcatcgacacgagcgggacgagcatgctggacgagctcaacaagtccttggacaggaggggaatgcaggtaaagagcagaagcgatggcacatccatccacctgattcagtgctttaattatctgctctcaactccagcagagtgttctgaaaccagtgctgtctttcttttgttcgcagatcgtgctggcgaacccgggcagcgagatcatgaagaagctggacagctccaaggtgctggagcagatcggccacgagtgggtgttcccgacggtgggcgaggcggtggcgtcgtgcgactacgtgctgcactcgcacaagccgggaatggccaaggacagcgccgccgcccacgagagcatggtgtgacgagcaccgccacgccaaccgtatgtgtagtgtgctccggttccggtctgacgtaaccagtcgtcacgcggaccgagatgaattatgtatacacgtgtctcgagtattgtacacctgcaccgtcgcgggaaaaacgaattcagagaagaaaggatcccacccggttttttttggtgaagaaaaa

SEQ ID NO: 91665 - DNA, 1201 bp, Zea Mays
gtaagactgggggattaaacgtgtcactcactgtgtgcaatgcgtgcgtgcgtgcgtgcgtgcaggaaggcatcgccgtggggaggagcttcgccatgttcaagaactaccacatcgacggcaacaaggagatgatcgcgatcgggacgatgaacgtcctgggctcgctcacgtcgtgctacctgaccacggggcccttctcgcgctccgccgtgaactacaacgccgggtgcaggacggccatgtcgaacgtggtcatgtcgctggcggtgatggtcacgctgctgttcctgacgccgctgttccactacacgccgctggtggtgctgtcggcgatcatcgtctccgcgatgctgggcctggtcgacttcggggccgcgctgcacctgtggcgcgtcgacaaggtcgacttctgcgtctgcgccggcgcgtacctgggcgtcgtcttcggcagcgtcgaggtcggcctggtcgtcgccgtcgccgtctccctgctccgcgtcctgctgttcgtcgcccggcccaggaccacggtgctcggcaacatccccggcaccatggtgtaccggaggatggaccagtacgccgccgcgcagacggtgcccggcgtgctcgtgctgcgcgtcgacgcgcccgtctacttcgccaacgccagctacctgcgagagaggatctcgcggtggatcgacgacgaggaggagcgcaccaagagccagggcgagatgggcgtgcggtacgttgtcctcgacatgggtgccatcggtagcatcgacacgagcgggacgagcatgctggacgagctcaacaagtccttggacaggaggggaatgcagatcgtgctggcgaacccgggcagcgagatcatgaagaagctggacagctccaaggtgctggagcagatcggccacgagtgggtgttcccgacggtgggcgaggcggtggcgtcgtgcgactacgtgctgcactcgcacaagccgggaatggccaaggacagcgccgccgcccacgagagcatggtgtgacgagcaccgccacgccaaccgtatgtgtagtgtgctccggttccggtctgacgtaaccagtcgtcacgcggaccgagatgaattatgtatacacgtgtctcgagtattgtacacctgcaccgtcgcgggaaaaacgaattcagagaagaaaggatcccacccggttttttttggtgaag

SEQ ID NO: 91666 - DNA, 551 bp, Zea Mays
caaaaggatccaagaaagtgctagcacctaatgcagaagaccaagttggtagaataactaggtagaagacaaaggaactatccttagctgagaaagatctacatggttcaactacaaatacagaagagcacacattgatttttgccaattgtcctgcacaacatgatgacgagattcaaatctgtgatgaaggccaaacagatgccatgacagataaatggataaggggaaaaagtatgggcatgcaattggaacggataagccgaggcttaaacacagattccactggtcatcactgaaggcaagagacgtccagagttagaaaagatcaatgatctgcaaaaaggaatagatgatactaatgctctccttctctttagcctcaataagaagttggtcgattcattttagtgtggtccttgtatctcatattgctgttgtatggccctgattttgctgtccttttggtactgtccttagcactctacttgatgcttgtttgatgaaacatgatgctagttttgaaaattttgaagggcttggttcttgat

SEQ ID NO: 91667 - DNA, 180 bp, Zea Mays
cgtcctcctcgtcaccatcgcccctgccatccacgtcggcgccgccggaccagatgtcctcctcgtcgctaccccagccgtctgcctcgtcgtcgccgccccagccatctgcctcggctccactgcaatagccatatgccttggcgccactgccccagccgtcttcctcggcggcctgct

SEQ ID NO: 91668 - DNA, 2555 bp, Zea Mays
ggggctcgggcgttcggcatccctccccgtcgtaactcagcagcgccgccgtcgccgtgcacgcaccagcgccacgactcggcgcttacccatcaaacattcaaaccccacgacgccgccggccacggccaccgctagggttttagcctcctccgatgccgccgcctcgccgcgcgcttgtcacatccctcctccgcctccgctccttctcctccattgcctatcctcatccctacccacccgcgcccctgcgacgccaccagttcgtcgccgaccccaccacctccacaaaccgtggtgtcgtcgggggcatcggcggcgtcggttccgggaacgggaacatcttggacccgacgcagctcctccgcgacgacccggtggcaatcaccgcttccctttgggtatcctccttccgcgccgccgcctccacctccggctcttgtacccccgcaccgccgcagccactcacccccttcctctcgcgcctggagctgtgggtgctcgcctaccagaaggcgtacgctgacgagaccggttcctatctgccgcgctcctccatcccggcctccacgctcgcctccctcctcacgctccgcaacgccgtactcgacggccgcttccgcttcggcaaccgcctcacccccatcctccagtccccgcgcgccgccaacgcgccggaccctgccaccctctccaagcgcaagctccgcgccctccttacaacccccggcccatcgcccttccaggaccgcgtcgtgcaggagctgctcctactcctgctcgagcccgtctacgaagccaggttctcgccaaagtccttcgccttccgcccaggtcgatccccgcatgccgcgattcgcaccatccgccgcagctttgctccgtacctctggtatatcaagggcgacctctccccactcctgcactcgcctgatcatgctctcgtggtcggtgcgcttatccgtgatgtgcgtgataaaaaagtggttgatttgatccgttcggccctgctcaccccggtggtgaccgcaagcgatgatgctgcagtgaagaagaagaagaccaagaggaaataccagaagaagaaggtgctgccagagggggagccgaagcctgatccttactggttgcagacgttttttgggtttgcaccagaggaagcacagacacagcctgattggggccattgtggggtgctgagcccgttgcttgccaatgtgtgcctggatgagtttgataagtggatggaagagaggattaaggagttttacaagccatccaagtccgatgttgtgggaggggatgatggtattgagcagggcaatacatcatggccagagtttgtccccacgactggccctgacaagacaaggaaggtggactacattcgatacggcgggcatttcttgattggtgtgagggggccaagagcggatgcggcggtgctccggaagcagctagttgagttttgtgatcagcgattcaggatcaaacttgataacgagagcctccctattgagcacatcacaaaaggagtcatgttccttgaccatgtgctgtgccgtcgagttgtgtacccaacactgcgttacactgctacaggaggcaagatcattagtgagaagggagttggtacactgctctcagtgacagctagtctgaagcagtgcatcaaacaattccggaagcttgagtttttgaaaggagaccgcgaacccgatccacaaccatgcttccgtatgttccacgccacacaatctcacacaaattcgcagatgaataagcttttactgacgatggcagagtggtatcgctacgctgataaccgcaagaaggttgtcaacttctgctcttacattataagggggtcactggcaaagttatatgctgccaagtacaagttgcggtcaagggcaaaggtctataagatcgcgtcaagaaatcttagtcggccattgaaggataagaaaggccagtcgccagagtatcacaatttgctgagaatgggcctagttgattcaattgatggtcttcagtatacaaggatgtcgatggttcctgatcctgattacacgccgttaccatttggatggcggccagatcatgagaagattttgctggagtacataaagctcacagatcaacagacattggaagagcagagaaactgcatcagggaggacgggcttataacaccacaggacaatatttcgatgcttgtatggggctacaagaaaaatgctgttttacttccttcaaaagtgagtgatgcccaaggatccacagaggaccttggttcagataccgatgaattggatgaaaaagagctaggaaatgagggtaaccaaagtttccaaaagcttgctgaaatgtcatgagttttggcaaactctgtagtgttcccaaggggtatttgactcgttgactggatggttggtttgtgactttgaaaacacaaaaccatctgctagttctttgctgactgctttgtgctggaacagtagttgcaaaatcaagggatgattctgagcctcctttgcttattacttgcgaag

SEQ ID NO: 91669 - DNA, 2432 bp, Zea Mays
gctacattctcacaaatggctgcgggtcgcacccggcgctcggcatccctccccgccgcaaagtcgcgccgccgtcgcctcgcacgcacgaacgccatcacttcgtcgcttacccatcagacagacaaacaaggccgaaactccacgacgtcccccgctcggcagcagcaacagccgagaccctagcgcagcatggcttggacaactgcggccacagtgtgctggcgcctgctccacctcccctccgcccgctgccctctctcgtcccgggcccggtgttccgctgcgcagagcccagacgccgtggacaaggagtacgccgacctcaacctccggcctctgtaccccaacaggggccatcacatgcgcatacggcagcacgtgaacccgctcagctcatccttctcggagcccacggggccgccagagtggaaggaggtgttcgacgaccccttgcttcccctcatggtcgacatcggctgcgggagtgggaggttcttgatttggcacgcgaagaattctggcaagagtcagaactaccttgggctagaaatccgccaaaagttggtggagcgggcacagttctgggtgaatgaattggagcttatgaacgtctattttatgtttgcaaatgcaacagtgtcttttgagaaaatcatatcgtcataccctggtcccttgtcacttgtttcaatactggtgagtgtagctgggtgctacatcagttccttagttatatctgttggctcagtgataattaatctgatcagcactttgttatttcctgatgttatggaaatggaactgagatttcagatgtctattcgctggttttgtagtgtcctgatccacacttcaaaaagaggcatcacaaaagaagagttctgcagcaaccattggtcgattcaatcataaataatctctgtttaggcggacaggtatagcaattccatagtccaagcattgtctttctaatctcaaaggcacggacccgttacttccaaatgctgtaataatcgttgctctactcatactaatcctgcaggctctatgcgttgcacggtgatagttaattcaagataacctaatgcattaatgccatacattttaattttgagctaaggccattttttgttatgtacatcattctagtttttgatgctgtgatctcccttgtgtctatcatgtctacacatgtccttcatttcttcaagctaacttagtgtattgatactaggttttcatacaatctgatgtactggaagtatctgtagacatgagggaaaggtttgatgggtactctggtattttggcacatgttaattatgttgatcaagatcttcagtgtgacaatgaaggatggcttctggacaacccaatgggaatccggacagagcgagaaatccatgcagagcttgaaggagcaacgatatacaggagggtgtaccaaaaggttagagatgcttctttctagctgtttatcagctacagaagttgtccaaggagtaaggtttccaagaatgttcattgcatgtattccattaagagaagttgggaaaaaaaacaaagcatccaagtacaaagcctggcgaaccaaaacaaagagaagcccaagcagtaacacctgatgtcttcctgcttgaaccatgccacaagttgcctttactacatcaagctgcattacatttctgacagtgcgcttgtgcacatctaatcttttttttcacctgatgcaatgagtcagattagccaatgcttttgatgaagatgacaactggcataagtgttcctttgttggtcagattgtacttatggtgtttagcatcgggtgctgtcttcgttctgtccagaattcaggtctggaattgctcaccatctatcggtatgcagactgtttgtagaggcaatccagatgaggcaatttgatgtgcgctaggattgttcaaactttggtccgctcaacgttcccttgacttggtagatatacaagaatggacaacgttttcttgacttggtaaagtttggtcattagtttgtgaaacagaatgctgcattgctcttggcatttgataagtgacaggtgaataagacgacaccgaggtgcatgtgggcactttttagtgtttgatgtttgctaagtcctctaccaacaggtcaatacatatgttaatcaatttgaataactcattaattgaaattttgttgctaatggtatcgaattaactcaccattgtattcggcttttcgctgagaaacagtttagtatcagaatcatttatcgaataatttttcgtcgcaacacagtcatattgtactggtgatagctgacactgttgggttacccatgtattgccacgatgtctatatatcatgtgtaaagaatttgtaataagacacataaatatatgttctattgattagatgagcgcgaa

SEQ ID NO: 91670 - DNA, 1643 bp, Zea Mays
gctacattctcacaaatggctgcgggtcgcacccggcgctcggcatccctccccgccgcaaagtcgcgccgccgtcgcctcgcacgcacgaacgccatcacttcgtcgcttacccatcagacagacaaacaaggccgaaactccacgacgtcccccgctcggcagcagcaacagccgagaccctagcgcagcatggcttggacaactgcggccacagtgtgctggcgcctgctccacctcccctccgcccgctgccctctctcgtcccgggcccggtgttccgctgcgcagagcccagacgccgtggacaaggagtacgccgacctcaacctccggcctctgtaccccaacaggggccatcacatgcgcatacggcagcacgtgaacccgctcagctcatccttctcggagcccacggggccgccagagtggaaggaggtgttcgacgaccccttgcttcccctcatggtcgacatcggctgcgttggtggagcgggcacagttctgggtgaatgaattggagcttatgaacgtctattttatgtttgcaaatgcaacagtgtcttttgagaaaatcatatcgtcataccctggtcccttgtcacttgtttcaatactgtgtcctgatccacacttcaaaaagaggcatcacaaaagaagagttctgcagcaaccattggtcgattcaatcataaataatctctgtttaggcggacaggttttcatacaatctgatgtactggaagtatctgtagacatgagggaaaggtttgatgggtactctggtattttggcacatgttaattatgttgatcaagatcttcagtgtgacaatgaaggatggcttctggacaacccaatgggaatccggacagagcgagaaatccatgcagagcttgaaggagcaacgatatacaggagggtgtaccaaaaggttagagatgcttctttctagctgtttatcagctacagaagttgtccaaggagtaaggtttccaagaatgttcattgcatgtattccattaagagaagttgggaaaaaaaacaaagcatccaagtacaaagcctggcgaaccaaaacaaagagaagcccaagcagtaacacctgatgtcttcctgcttgaaccatgccacaagttgcctttactacatcaagctgcattacatttctgacagtgcgcttgtgcacatctaatcttttttttcacctgatgcaatgagtcagattagccaatgcttttgatgaagatgacaactggcataagtgttcctttgttggtcagattgtacttatggtgtttagcatcgggtgctgtcttcgttctgtccagaattcaggtctggaattgctcaccatctatcggtatgcagactgtttgtagaggcaatccagatgaggcaatttgatgtgcgctaggattgttcaaactttggtccgctcaacgttcccttgacttggtagatatacaagaatggacaacgttttcttgacttggtaaagtttggtcattagtttgtgaaacagaatgctgcattgctcttggcatttgataagtgacaggtgaataagacgacaccgaggtgcatgtgggcactttttagtgtttgatgtttgctaagtcctctaccaacaggtcaataca

SEQ ID NO: 91671 - DNA, 1724 bp, Zea Mays
cgctacattctcacaaatggctgcgggtcgcacccggcgctcggcatccctccccgccgcaaagtcgcgccgccgtcgcctcgcacgcacgaacgccatcacttcgtcgcttacccatcagacagacaaacaaggccgaaactccacgacgtcccccgctcggcagcagcaacagccgagaccctagcgcagcatggcttggacaactgcggccacagtgtgctggcgcctgctccacctcccctccgcccgctgccctctctcgtcccgggcccggtgttccgctgcgcagagcccagacgccgtggacaaggagtacgccgacctcaacctccggcctctgtaccccaacaggggccatcacatgcgcatacggcagcacgtgaacccgctcagctcatccttctcggagcccacggggccgccagagtggaaggaggtgttcgacgaccccttgcttcccctcatggtcgacatcggctgcgggagtgggaggttcttgatttggcacgcgaagaattctggcaagagtcagaactaccttgggctagaaatccgccaaaagttggtggagcgggcacagttctgggtgaatgaattggagcttatgaacgtctattttatgtttgcaaatgcaacagtgtcttttgagaaaatcatatcgtcataccctggtcccttgtcacttgtttcaatactgtgtcctgatccacacttcaaaaagaggcatcacaaaagaagagttctgcagcaaccattggtcgattcaatcataaataatctctgtttaggcggacaggttttcatacaatctgatgtactggaagtatctgtagacatgagggaaaggtttgatgggtactctggtattttggcacatgttaattatgttgatcaagatcttcagtgtgacaatgaaggatggcttctggacaacccaatgggaatccggacagagcgagaaatccatgcagagcttgaaggagcaacgatatacaggagggtgtaccaaaaggttagagatgcttctttctagctgtttatcagctacagaagttgtccaaggagtaaggtttccaagaatgttcattgcatgtattccattaagagaagttgggaaaaaaaacaaagcatccaagtacaaagcctggcgaaccaaaacaaagagaagcccaagcagtaacacctgatgtcttcctgcttgaaccatgccacaagttgcctttactacatcaagctgcattacatttctgacagtgcgcttgtgcacatctaatcttttttttcacctgatgcaatgagtcagattagccaatgcttttgatgaagatgacaactggcataagtgttcctttgttggtcagattgtacttatggtgtttagcatcgggtgctgtcttcgttctgtccagaattcaggtctggaattgctcaccatctatcggtatgcagactgtttgtagaggcaatccagatgaggcaatttgatgtgcgctaggattgttcaaactttggtccgctcaacgttcccttgacttggtagatatacaagaatggacaacgttttcttgacttggtaaagtttggtcattagtttgtgaaacagaatgctgcattgctcttggcatttgataagtgacaggtgaataagacgacaccgaggtgcatgtgggcactttttagtgtttgatgtttgctaagtcctctaccaacaggtcaataca

SEQ ID NO: 91672 - DNA, 1250 bp, Zea Mays
gctacattctcacaaatggctgcgggtcgcacccggcgctcggcatccctccccgccgcaaagtcgcgccgccgtcgcctcgcacgcacgaacgccatcacttcgtcgcttacccatcagacagacaaacaaggccgaaactccacgacgtcccccgctcggcagcagcaacagccgagaccctagcgcagcatggcttggacaactgcggccacagtgtgctggcgcctgctccacctcccctccgcccgctgccctctctcgtcccgggcccggtgttccgctgcgcagagcccagacgccgtggacaaggagtacgccgacctcaacctccggcctctgtaccccaacaggggccatcacatgcgcatacggcagcacgtgaacccgctcagctcatccttctcggagcccacggggccgccagagtggaaggaggtgttcgacgaccccttgcttcccctcatggtcgacatcggctgcgggagtgggaggttcttgatttggcacgcgaagaattctggcaagagtcagaactaccttgggctagaaatccgccaaaaggttttattggttttaggttgcagcttgtttggtttctggattggatgattttttcctttttgtaatgtataaatgcccggatctctgcctttcagtttaagagagaaaagaaagatcacaacagttttagaaacaaagaactgggaagctcaagcagcacccccccccaaaaaaaaggcataccgcaccctcataacacggaacaaagaaaatgaactgcagaatcgcatgccatcattttgctttcaaagacatttgctttgctgtttggaacaattctcgaagatgattcagtttcgttctttcctgaggttccacattacatagattgccaggctgttgaaatattttggcataaaagatataagcgtatgccagtctcacacggtccattgcgcataatgcaattatcttgatgtggacaaccccttaaatccaagttgtctgctgcggaatttcgtcttgtgtaagtgtccaagcaaaccatttaaatgtgcatctgttttccatgtgggtctgccaaattaggtttgatttgtacaattgtacccaagtaggagcctttgaactgcatccggtacttatgcattgttaaatttgtagtttggtgacgttctacttgttttgtttctgtagttggtggagcgggcacagttctgggtgaatgaattggagcttatgaacgt

SEQ ID NO: 91673 - DNA, 2630 bp, Zea Mays
agacccgccgaacgacggtcgacggcagaggcaaaaccctcaccttcctccgtgggggcgatggcggcgccggaatcggaatgcggcgggagtgacggctaccgcgacctccgcggcgtgcgcgtcgacctggacacgggagcggcccgagccggtgggggaggaggcttcgccgtctccttctggctctacctgtccgtctccgccagaccgtcctcggtgatcctccaccagatcacagcgggagatgacaccaagttgccgtttcttgctttaggtgaaggaaacaaactgcttctcttcccgttgatgaggctgcacagggaagctcctgctcctgctagttcgtacccatggactgacacaaccaatctatcatctacgagtgtatgccctcttgagaaatggttccacattgggtgtgaggttactgaaaatgttatgcgtcttcacgttgatggtttcctaactgctgaggcccccctttgttcactgtttgatgagccagacagtcaggatgattcaaaccaaattagcttagttggaaatgatggcaagcttgaaggctatatctataatatcgaggtttcatatgtactaggagctataaaagaacaatacacaaagaacccaccatttaagttatctattgactattcatgctctgatggaatcgaagagggtgatgacggcatttggagcatcgttggtgggaaggcatcttgccggagaaatttcattttggaagtagtactaaccaacgcttttggtgaacctgtgaaggataaagaggtcgtttcttcacttgtctatgctgatgatggaacagtagttgcaaaatcaagggatgattctgagcctcctttgcttattacttgcgaaggacttgaatatgcagcgataagcaggcctctaccaattatacgtgggcgagcactatttaaactcaagatatctcagctctcttccaaatgtgacaataagctcttccgtattaaattctctacacttcacatgcaaagatattcttttctggaagcatattccaaaccgattcgctgtatatctcgaagccgcactgtccgccccttgggtcctacaaagcgggcgagttctgcaacagcaaatgaaattgacatgctcagtaatggccaagggtttgttagtactgacaaagtaaatagtcgtggacattcagtgtgtctgcatacgcccatgtttcccaagatagaagatggaatggtggaggtagtagaggcccacaaaatagtatcacagaataagaatgccagaaaagtggtagtaagcaaagaagcacagaatgtaatagggactgattcctcaacatccaactatgacagctttgattcaggaagttcttggagtggatcagaaggagatgatggtattgaaaccttttcagacgctgtggttttcagatactgtctagacagcacatatgaccggtcaaagtttcttagaggtgcatctcttactgttaacaaagatgacttggtaaaacttgcagaccgagtctcgttgtatagtggatgctcccaccacaggtaatttaactcttgtatctgataaatttttcctcactcgtattattgacagtaattctgcgatttatttttcccttctagaaaccaaatattaatgtcgaagagattgctcagagagggtgctgacacttggaacatgatctcaaagaacaatgaacgtgctctttggtcatctgccattccagagatcataacaaaatttacgaacattgcccattctgtgcgtaggggtttatcagagcaggatcttgaggttttaagaggcattgctggttgtggtgaggacataggaagagatgaatttgataggctatggtgctggttatacccagtggctgtttcattatcgagagagagaattaaaaagctgtgggattgcacagcacctagatggatagagggcttgattacaacagaagaagctgagagtgcactaagaagttccagggaattgttaaaggaggcaggaacatttgttctcagatttcctatcacccgaagctggccacatccagatgctggaagcctagttgtcacttacattggctctgatagctcaattcatcataggctactctctcttgattccagtgatgctagcgctgagaaactgcaagatttgctgctccaggaaccggaactatcacaattgggcagggttgatcgggtctcaatcaccatccggagatgaccgaggcttcaaacggttaaacttacattcaaaagcaggatttaggatgctgccacgagaagagggtcagcagcagctcgacgcatacaagttcattgtcatccaagagcatagcccataacacccattgcctgttttttttttgaatcaaacacccattgcctgttgttaccatgtacaggttgtaaattggttcccttggtagtttagttcgtacaaagagaggtactagtgaggtctagttgcttcagaaaaccaacagtaacatgagctaccatgtgtgtcgcaaaaagaaagaagctgtcatcatgtgcctcgaaactggaggattttcagtggctaacatgttgcatatagaattgacagttgattta

SEQ ID NO: 91674 - DNA, 2522 bp, Zea Mays
cgaacaggaagcgcaaccgaaaaacctacggcgacagatctccacccaaacatctcaccagtcgacagtagtcatcagccgtctaacaaaaccgttaaacggacggaccatcgtcccgggcagacccgccgaacgacggtcgacggcagaggcaaaaccctcaccttcctccgtgggggcgatggcggcgccggaatcggaatgcggcgggagtgacggctaccgcgacctccgcggcgtgcgcgtcgacctggacacgggagcggcccgagccggtgggggaggaggcttcgccgtctccttctggctctacctgtccgtctccgccagaccgtcctcggtgatcctccaccagatcacagcgggagatgacaccaagttgccgtttcttgctttaggtgaaggaaacaaactgcttctcttcccgttgatgaggctgcacagggaagctcctgctcctgctagttcgtacccatggactgacacaaccaatctatcatctacgagtgtatgccctcttgagaaatggttccacattgggtgtgaggttactgaaaatgttatgcgtcttcacgttgatggtttcctaactgctgaggcccccctttgttcactgtttgatgagccagacagtcaggatgattcaaaccaaattagcttagttggaaatgatggcaagcttgaaggctatatctataatatcgaggtttcatatgtactaggagctataaaagaacaatacacaaagaacccaccatttaagttatctattgactattcatgctctgatggaatcgaagagggtgatgacggcatttggagcatcgttggtgggaaggcatcttgccggagaaatttcattttggaagtagtactaaccaacgcttttggtgaacctgtgaaggataaagaggtcgtttcttcacttgtctatgctgatgatggaacagtagttgcaaaatcaagggatgattctgagcctcctttgcttattacttgcgaaggacttgaatatgcagcgataagcaggcctctaccaattatacgtgggcgagcactatttaaactcaagatatctcagctctcttccaaatgtgacaataagctcttccgtattaaattctctacacttcacatgcaaagatattcttttctggaagcatattccaaaccgattcgctgtatatctcgaagccgcactgtccgccccttgggtcctacaaagcgggcgagttctgcaacagcaaatgaaattgacatgctcagtaatggccaagggtttgttagtactgacaaagtaaatagtcgtggacattcagtgtgtctgcatacgcccatgtttcccaagatagaagatggaatggtggaggtagtagaggcccacaaaatagtatcacagaataagaatgccagaaaagtggtagtaagcaaagaagcacagaatgtaatagggactgattcctcaacatccaactatgacagctttgattcaggaagttcttggagtggatcagaaggagatgatggtattgaaaccttttcagacgctgtggttttcagatactgtctagacagcacatatgaccggtcaaagtttcttagaggtgcatctcttactgttaacaaagatgacttggtaaaacttgcagaccgagtctcgttgtatagtggatgctcccaccacagaaaccaaatattaatgtcgaagagattgctcagagagggtgctgacacttggaacatgatctcaaagaacaatgaacgtgctctttggtcatctgccattccagagatcataacaaaatttacgaacattgcccattctgtgcgtaggggtttatcagagcaggatcttgaggttttaagaggcattgctggttgtggtgaggacataggaagagatgaatttgataggctatggtgctggttatacccagtggctgtttcattatcgagagagagaattaaaaagctgtgggattgcacagcacctagatggatagagggcttgattacaacagaagaagctgagagtgcactaagaagttccagggaattgttaaaggaggcaggaacatttgttctcagatttcctatcacccgaagctggccacatccagatgctggaagcctagttgtcacttacattggctctgatagctcaattcatcataggctactctctcttgattccagtgatgctagcgctgagaaactgcaagatttgctgctccaggaaccggaactatcacaattgggcagggttgatcgggtctcaatcaccatccggagatgaccgaggcttcaaacggttaaacttacattcaaaagcaggatttaggatgctgccacgagaagagggtcagcagcagctcgacgcatacaagttcattgtcatccaagagcatagcccataacacccattgcctgttttttttttgaatcaaacacccattgcctgttgttaccatgtacaggttgtaaattggttcccttggtagtttagttcgtacaaagagagg

SEQ ID NO: 91675 - DNA, 1658 bp, Zea Mays
gaattgctgcctcccccgctcttgtgcgtggcgcccagccggcacggaagctctcctcgcgctagctagctagctagctgctccaaatagcaaggccaccaagtgagggagccaggcaggcaggcagccagcacgcccaccaggccacctccctttccttcccctcccgagggcatgcgtgcgcggtccaagcgtgccaattgactcgcgcacgctctctcagtcccagactcccactctcccagtcccagccctctctccctgctgcaccgtgtcctacttactcctagcgagctcgtcagccgcagtaccttgctccgcctccgaccccggcgcgagcgggaatctacacccacgtgctcgcggccgtccatgggctggccgccgagcagcggctggggcgaccggcgacggaacgtgtccgccgcggcgctgctcttcctccacctgctgctactcttctccgcccccgggacgtgcacgccggcgagaggggtggcgccgccgccgacgacggagcaggacgggtactcctggtcctggtgggacccggcggcgacggcggcgcgcagggggctggtggggccggggtcgtcgccgcccacgtgccgcagccgctgcgggggctgccacccctgccgccccgtccacgtcgccatccagcccggccgcagcttcccgctcgagtactacccggaggcctggcgctgcaagtgcggcaacaagctcttcatgccctgaccggtccaacggcaacgacaacggcgacggcgacggcggcgccacctctccctgctgcgcacacgctggtaccggtgcactggtgcatctctcactcactggatctatctagctcgtcaggctaaggcagcagcgggctgcgtcgccgtggctggtgcctgcacgtaccgcactgcacgcatacatgggatcgaaggctagctctgtctaccagtgctactgctggtgtaggtgtacacacagagagacatggagaacacggcaaggaacaagtaagaataggacacgagacgacgaagagatctgcccatggaacaaagaggcctcgattccgtcatctaatgactggaagagcatttgccgagttcttggagactgatgatgatacgagctagtctggtactccctgctctatgttgtaagtaacctcctgtgtgtgctgtgtgtaccaaagagcgagcgagcgagagagagacgtcgatgtcgccatttttgttcttcctttcgctacggttcttgacatgcatgttagtgactgaaatccctatccctgtgattatgatctgtgacgtgattccattgacatactgacttggatctgatgcgacgattatgacgagttctatatgtggacctgtgttggtcatccgaaacataactttgatcattctgttgtacgtacacttgagttattctaatagatccttgtaagtcatctactacttgctctggatcgagctcgatcgggaccagctagctgagaaccattccttcctccagagttcagacccccgctttcctgtcatgcatcagggttgtctaatctccatctaccttatggccactgcatccgtgcagtcacacgacgctctgtctgagactgagcaagctcacctgcagcagataaaaaaaaagaa

SEQ ID NO: 91676 - DNA, 924 bp, Zea Mays
atggagctcaacttctgcgccagcgcgtcgacgtaccaagccggtcgtctcctctccggcggcagcgtctcagcctccgcaccgcccttcatcccttcgttcagcagctcctcccaaaagtcgtcggtgagctccgccgtctcgaacccgccctgctgctggctccgcgcgcggccaccctgcttctcgctcccgtcctgcctgcgcttgccgagcccctggatgttgagcgccaggttctccagctccgacgtggtccctcgctcgtccagctccgcgaacagcgcccgcgtggcggtggggtcgtcgtcgtcgccctgctgctgctcctcctcctgctgctgcaagccgccgttggccggcgcggcgccgatgggccgcctccgcttccgggaggcggcggagagcagcgccgcgccctccagctccctccgccgggcttgctgctgtgccagcagctggaacaagtctgggctctgcaccgcccgcgccaggaaccccatcatctgcacctgcttgtgctccgcgtgccgcagccgctcctccatggcccgcatgcccgcccgcgtgctctgctgctcctgccgcagcttcaccacctccgccagcaggatgctcttgtcacgcctcagccgctccatctctccgtccagccctccgaaccggcccacctccaggcacgacccctgcgactgcgacgcctggaggtacggcggcggtggcgccggccttcgacgcttgatcagccggagaagatgcctctggcccctcaggaatccttcgttcgcgaactcccagctgtccgggtcgatctttctgaagcccttagcagtatattgcttggtggtgagtggtgatcaaaggagtgagtcttctttatctttaggacaaacaagcagtttgtttctttctcgtaggctgtag

SEQ ID NO: 91677 - DNA, 805 bp, Zea Mays
gtaggtcagacctggcaaacgggacaggggagagggacatgaactccatgcaggagaacatgtctgccaggacactcacgctctctagctccgcgcagcggacaattgtgcggttcgttaagctgccattggttgacaagatccctccgcaaaccgcttggatcttcctggaaaagttattggtattgttgtgttcatatgttttgcaatcggctgaccatgggcactattttgtgatattcatggccattctaaggagattggactttatgcgtcatgggtcgtgcaagtacacttgagtttatttgcttgattaattcgtgatattgatgaagaaattccagatccagaggaatagaaacactttatcacaaagggagaagatcatttgcgctacagtgcgacgacgcccagggccaaggtgctgaaggaggtgaggaacgtcgcagtagtgatctccatggagaagggtgccatggccagaggtagtgggcatcaccagcacggcggccacaggcacgatggctagcagcaacagcaactgctgcttcaacgacaagcgtgcgtgagctctaagcagactcaagcgatcctatcaggtagttcattgtatttcaccattcatatttcctttttatgtccatgtgagatgaggttgtttgttcggcgagtggagcggtgggaaagccacagaggtatacgagatttatgttaatcccccaccccaaagagtcttccctatccatatcgctaaaatttggcaacgcttagatatcatgtcatcatattgggacgcttttattgc

SEQ ID NO: 91678 - DNA, 450 bp, Zea Mays
ggccctgacctcgtcgctcagtgctggcgcgagatcgaggccattggccccaccacgccgcgatccgccaacactgccgacccgggcgcctcaccctgtgccttcgactccgacaccagctcatcgctcggccacgtcggctgcctatgctcgatctatcgcgccgcctttccgtcctcattcatcgcgtccatcctcggcttcctcttccgccttccccgcgatgcctccccgcatcatcgcccaccagcgtcatcacacaggcctcgctcgagacagacgtggcagtggattgggtgtttggttctctttgcagtagcaattggaggcaaacaggaagacactgtagaggcactctcgcacgctattcaatgcagtggcaacagaggtggcatcaaggggcaccaatggcggcaacacgctgtcgcagcatgtggcggagagacaatg

SEQ ID NO: 91679 - DNA, 386 bp, Zea Mays
atgtattatagaaataaccgaacaagtcctaaagaattacaaaaaagtagactatcatagacacaattcgatctgcagaaacggaactaacaaagaacgatattgccttgagctattagcacgcatcagatctgatgatcatctatatatctgcggattcaagggctaatttcttcctgatgaaaacaccacctgcagttttcattgataaagagcgaaagttgtgtgtcaagtgttacggaccttgttcaaacgtatatacatcttgcctgaccttgtattttccctgggacgtacggcgccgctgcaaagaagaaagctggctgcttggctgactccatcgatttagctagggtttccaaacaagcatgcatggcgaattggcg

SEQ ID NO: 91680 - DNA, 216 bp, Zea Mays
atggaaataataagtgagggggataatacctttccctacagggagtctgggagcaacctccacaagtgggcgatggagatggaggccgctgtcaccggcaatagttcaagatggaggcaaggagcaagtggaggaaatatgggaggaagagagagagaaatgcctgaccccgagggaggccagggtgacctccctagtccctgtccgagttgttga

SEQ ID NO: 91681 - DNA, 744 bp, Zea Mays
acgaaacattttctcataacagtacaacatatttgtacataagttatcgttgtattatatatttccgttgtaacgcacggccacccacctagtaaataaataaatgcgggcggtgaatggtgtcgctcatggtggggttgtggggacgggcggagccggaggcgcggtcggtcacgctcgcctcgtacaccagccagccagccagcagtaccccggtccacggcgcccagtccgtgggggtccagctccaaccgtccaagccggcgccccctcctcaaccgtaatgcgacaggtgggcgcggggtggggtgagcggaatcctgccgggcgagtggagtgcggtgcggttgaggccacggcgcgacccccgcgtgaacccaaccctctcacactccggcctgctttcgtcatgactatgatgatgaacagacaggggccgcttgcgagggcgactccgcacgggacggtaccctgtcccttgtcccggccaccgcagccaaacagtgtcaaatcacgcaaaagtaaaagagagagagagagagagagagagagagagagagagagagaaaagtgatgggaacggcaacggggcctggcgctgcgtacggagtacgagagccgcctactgtactcccgtctaacgtgacgtcactgccacaatccgcagcagaggctgctcaacgaaagcaaagcatgcgtttaacctaatcaacagcccacttgacaaaaaacaaaaccaaaaac

SEQ ID NO: 91682 - DNA, 399 bp, Zea Mays
atgaccacgccgatgtccgccgcgcgcacggcggcggcggccaggacgccgtcgaccacgccgaacacgacggcctcggactcctccctggcggcgcggaggctcatgtccacggggaacgcgaggatggaggccgggaagtgggtggcatccccgacgcccgcgcgctccagcatccgcgtctggaacgccacgctctcgtccgtgaaccgccccgcccgcgcgaagtgccgcacggactcggcgcgggtggcccggtgcgcggggcccggccggtacgccgccaggaggtgcggcaggcgcctcaccagccggtggtacagctgcctcgcgtggttcagtgccgcctgccgcaccgtccggaacagctctcggtccgtggccatggaccgatgctga

SEQ ID NO: 91683 - DNA, 435 bp, Zea Mays
atgtcatacctctccatgccattagctatctcgcatgcctcatcaagcatccctaccaacccatatgctttgatcataacattgcatgcagaaacactgatcatcttcttctttaggcaacatacaaaagccttctctgcaagaactatgtatcctttctctccaaaagcatcaatatttgcagaaaagcattcagaattcatatggtggtggaacctgtcaaaccaacgccaagcttgttcaagcatcccaacatttacatacatccttgtcaaagctgattgtgtgtattcatctaccatgaagcccctctcatccatttccttcagaagggcttccgctttagtgaccatgcccctgatagagtatccatataagagcgtgcggcagctcacaacatctggtaccaagttttctgttttcatcttccagtag

SEQ ID NO: 91684 - DNA, 801 bp, Zea Mays
actatacttcctaaaagcatttcaactgggttttcagatctcaccaacaatcccaattacttttaccaattacagaaaatacacaaggcctctgtcttcagcatactacatcacagagggggggggagagtttgtatttgcaagaaacctgacagaataagacatcttacgaaggcatggaacctaacaaagtactccaatacaaactcagcacctatgaaatgagaataccacatctgaaaccaaatagccatggtatctctaagaatgtcacattaccacagggcttgaaaaccaaatatacaaaacatatttcctgaacaaacaaataccacaggagtcaaaaagacactgaaagggcaatgctcaaaataaagtttgagtgcttcagtgcttgctggccttcccaaaccagattacccacggcagaaaagccagaaaactgttgaaaaaagaggaaaaaacaacaacctgaactgaaaggaaaagagcaaaaggcccacaaacaaactgtcaagggcgttaaacccttggctggctggaccgcggctacggagctcgtagccgtcggccgtcttctccggtgaggttattcccctctaccgtaggcttttagaaaataagagagagatgaggctaataatctgcttgccttaatggtcctggttacaagaatatatagggccatagcccaactaactggagtaacaaactcctgaaattatggaactgataactcctaagggaaaactaataatatccatctgccttatctactcgatcagctcgagccagctgtgc

SEQ ID NO: 91685 - DNA, 757 bp, Zea Mays
atggtgtttcttcttattaataatgatacgcagctctcccctttgtaaggaacgaaatatacaaaagtgaatcttcacaccatgcgcggaagtcaacaccagtacacaatggatgatgttagactctcttcaacggttcacatctctccccttccctcaaatagcggcaatagagacacattttggcgtgcatcgctgccacttgcactccctctacgagctacagtgctaacgggaggagaagtgaaccgtcacattttgggtgcggcaaccggcctcctcatacgctgtgctaatcttgggttttgtgccgacaacaatagttagacaacaatagttagtagagaaaaaattataatggatgataaattggtataggaaataatattttatggatgtggaggtttgatatagggggaaccgctgtagagcgtggagatataggggggaagagaacgctgacgtggcacgtgagtgggatatagggggagaaccgctgaacacagtcttatgtctagcaactgacaataagatagttagcagtatatctctgaaccaaataagataattccacgggaaagaagatttacagtgtaaagcaacaaatacattagataaataaggcagagcctatgaattactgctagcaaccagaaacataaaagcatcaatgcccaccaactctccagattgcacacctacatcagatatcaactttcgccgcattggccaaccggaaaaaacaagtatatggcca

SEQ ID NO: 91686 - DNA, 502 bp, Zea Mays
gcaatcactacacttctctctgctagcccggcctagctagcgcagaacttgatcgggtatatatatagtacgtatggcagcatcatcgacgatgactcgatgagctgggcagtgctggtggccgtcgtgctgctgatgcagtgctgcaacgtggtcgtcgcggcgaggccgctgctgctgatgcagtcgccggcggtagcgacagcagacggcggctggctggagatgatcatgcaggtgctacaagggccgggctccaacaaccacaactgccaagctcccaacggatcctgcccctgataatctagctagccggcgactaatcacttaacctgtgcatatatagtatatggatactcgtagttttttttgtactaagcaagagcagctagctaggtgttcggaattatttgtaattaattaactaagaggttaattaactccatgcaaatttcatagagcggcctctgccaccctctcacattatatatatattctcttt

SEQ ID NO: 91687 - DNA, 101 bp, Zea Mays
ttcctcccaatttgaatctaatgggtgctattatcatcgatgtatatattttatatgtgtttagatttattatcatctatttgaatatgaatataaaaata

SEQ ID NO: 91688 - DNA, 129 bp, Zea Mays
gaagacacatttatagaaggtaaggaaatatattttaattcaaaaaagtctttggtgaattttcctagatctcaaaaaaaaatttacggtattacattacagaatcaaccttagttgattcacaccttc

SEQ ID NO: 91689 - DNA, 1674 bp, Zea Mays
atggcggatggctcgacgcttggtggttccgatgccgcgatcagcgggaagcggcgtacccgccgtgggcagcgaaggcgcaggtccgggcctagtggtggtcttggcggtgatcctctgctgctatcttcgggagacttgtcgcccacggctcaggatggtcctcgccctgtgaggtttattgggcggtccaggatgctcgaccgtgctgagttggagcttcgccatgccctgatcgtcagcgttgttgggcaagaaggaactggttgcgccacagaggttagagaggcgctcgcctcaaggtttggccttgatgctgatgcgctccgcctacgtcgtgctgcgccagattcttttattgtcctcttcccctcggaggagctggctgggcaggtgtttagtggaggaccgtcgctcgttgcccctccattgaggttgcatattaagagatggactaggcaggcttttgcttcgggaggcagtgtcttgtcttccctcattgacgtcgagctccgtggtatccctgctcacctttggggactggagacagcggaggttttgcttggtccatattgcctggttcagggactacacccggattctatcagcggggaggacttgtcggtcatcaggttgagtacatggtgccgctctcccgtggagttgccgaaggtgttggaccttcatgctgtggagccagcggtccccgatgaagacggagtttggagtccacgttcgttggtgttccctgtgttggtgaagattattgggccggagggtgtccttgtggaggagcagctgcagccacctccatcggatccctctgatgatgagccggggccgagtcgtcgggctcggtgggtgcggagactgggtgatcaggcctcattgcctcgggtttcggtgcactcgcggctgggccctcgtcttcattcctcgtcgacgcgtgttggaccctctgatgatgtggggcttttggatgcgtcgatggataacagtgatgctgtggcggcgtctgtctcttcggattcgttggcagaaccagttgatgcccctaccctcccgtgtgctgcggttgagatgttggcggcgcctggtgttctggccttgtgtgatgttgtggttcctgattattctcctgatggtccctctgctgatttggctgctgtgttgagggaggattcgattttggcagtgagttgtgttgtcagtgcttcttctgctagatggaatttgaagccgcctgtttttagagtctactccaggaggttgagaccttctattttggatgatcaggatggtccgttggttcagtcgggtcttgataattctatggtgatttcttcgcccttgtgcgagttccagtgtttggtcactaaaccagtggatgccttgctgccaactccacagattccaaagagaaggaagaagcctctacctagtaattttatgccaaggcggagcaggagggtggccaaatttcctccagaactcggttcggaggctgctgcccaggtctgcatgcatttgggtttctgtgatgataatgaagttatttctgtccaggatgccggtaattatgcgaagctatttgtttctgggctctctagcgtccatattgctgctttggcagcgctgtttggctggacggtgccgctgaatggacctgtttag

SEQ ID NO: 91690 - DNA, 561 bp, Zea Mays
atgctgcttagaacaacctggtatccttgaaggaaggcttgagcctgtttatatgttagctgttggcatctgtagttcatgagtgcgcaacacttccattttttggttaagagttattttgtttaattgttgatcaccgtgatttgatatatggaaacattggcacgatttttgaaggcactaaagatgcaaatggaggttcagaagcgactacatgagcaactcgaggttcaaatacaattgcaactaacaattgaagcacaaggaagatacttgcagatgatcattgaggagcaacaaaagcttggtggatcaattaaagcttctgaggatcagaagctttctgattcacctccaagcttagatgactacccagagatcatgcaaccttctcctaagaaaccaaggatagacgcattatcaccagattcagagcgcgatacaacacaacctgaatttgaatcccatttgatcggtccgtgggatcacggcattgcattcccattggaggagttcaaagcagaccctactatgagcaagtcataaggcaaacttcacctt

SEQ ID NO: 91691 - DNA, 122 bp, Zea Mays
tttttttttcggaggccatgtaggaggcaacgttgaagactcagcgcccggtggcccggtgggcaaacgcttgtttggtagggttgggcgcgctctagctaatcttgtatttgttggaaaac

SEQ ID NO: 91692 - DNA, 1578 bp, Zea Mays
caagtgagaaacaccaacgcaaacatagactataatttgttcgttgggatgacaagagcttgacgtaaacgggagggtaatcttggtggccatggcaggtggaccgcaagtacaggcactaccaccaccagatgcagatggtgatgtcgtccttcgacgcggtggccggcgccggcgcggcgaggccgtacacggcgctggcgctgcagaccatctcgcggcacttccggtcgctgcgcgacgccgtcggcgcgcaggtgcagtcgctgcggcggagcctgggcgagaaggacgggtccgcgcagggaggcgggctgccccggctgcgctacatcgaccagcagctgcggcagcagcgcgccatgcagcagttcggcatgatgcagcagccgcagcacgcctggcgcccgcagcgcggcctcccggagtccgccgtctccgtgctccgcgcctggctcttcgagcatttcctccacccgtacccgaaagattccgagaagctgatgctcgctaggcaaacaggcttgtctaggggtcaggtgtccaactggttcatcaacgcgcgcgttcgactgtggaagccgatgatcgaggagatgtacagggaagagttcggggcggagatggactcgcactcgtcgtcggagaacgcggcgggcaacaagggcaaggacgaggcgatatcctcggaggaccacgaggagttccagagcccgtcgagcgccgccgcggccgcagtgccactgccaggccacctcagcgcgttcaagtcggaggcgatcggtgtcatggacgccgccggcattggagcgagctccagcctcgacggcgccgtcatcggcccgtacgcgacgagcctcaacctcggcggcggcggcggcatcctgcaggaggccctcgcgcaccaccaccaccaccacggcggcgccgacgcgaggttcgtgcaggcgtacggcgacatggccggcttcggcggctacgacggcggcagcgtgtcgctgactctgggcctgcagcactgcaacgaggccggcgccggagccggccccgctgagccgcaggccctcctgtacggcagcgccggcgacttcgacttcatcagcggctccgaggacaggcagcggttcgggtcgtcgcagctgctgcacgattttgtggcgtgagcggctggactggacgtcgttggggaataacgtgcgcggacggcgtcagaagcctgggatggccggccggcgccgccgcgggtatacctaccaaccatatgatggccgtacgtcatggtacatggtctcaaattaaccagcaaggttaagcatgcatatatatacatacacatatatatataaggtgtggtaagtgaggtagcataagcagggtaagcagctgtatatgatatgaggtgtggtataaagtaagtgtagggattattattggtattatttttggtagcttgaagattcgtctaatgatgattcaagtccggccagatatggtgtggtgttgttggacctcaagtgagtccatgtacacacaaatgtttcatgttttgtactgtaccagttgttcagttcagcgcta

SEQ ID NO: 91693 - DNA, 3073 bp, Zea Mays
gagtatattattgctcgaggtaggaggagagccaggggttgttagaacaagtccagtctagagagggagcgaaccaaaagggagaaataacaaaaaaagaatagagacacacacacacagctctgttcttcttattccaatcctctctcatcttgctggttcatccttgggatcggctctgtcgtcccctagctagttcgttcggtgctgtggtttctgccgctgtatccaagaactcttgctcttgctgagtctgggacttcagttcctcgcagaggtatagtataagccttgttgtctttgtcaagcaatagcttaaactatcctttgcgtcttaatctgaacaacatatgccggagatgggatggattcttggtttctacgtactccctccctgcttgttgagctttcggtttctagttagctccgtgtgtttggtggtgggtgcaccagcagctgaaataggttgcttctcgttttgccttagtcaaggctctttgaaatccgaccgaattttctcgggagctagttcttcctggctgggatttctggccgggtgccgaattttaggattcgtttcctttcacagcccaccaatttggacttctggttttgctccagttaggtgatgccttcacccaaaacaacttgaaggcttgctatgtcccaggtagctatatatctcaaaagttttggtggcagtcttcgaggaagtggagtcatctcaagtttttatcgatcgtcccagccaggctttacatatcttgggtgccgcacacagtatctatgcacctttgacaacaccaatctgattctgatgacaacaacagccactatctcccgtcatccttgcatcgatctgtcagctggcgtcgcctcgtgcttctgaagacgatggccacattcttctccacttccacgaaccagagggacctcgccggaggcggcggcgacatgtcgtcgttccaccactacgcctactcggacccaccagccggcggcctcatgcctttccccgccaccatcgtgtcgtcggaaggccacgtcgcgcacggcggtgacgacggcggcaggggcgcgttcgtggacgtgaacgcgagggacgggccgacgggcggcgccgagatgggcctgcagacgcagctgctcatggcgaacgccgcgtcggcggtgcagcaccaggggctgtcgcttagccttggcacgcagggggtgccggtgtctctttaccagtaccgccaggcggaggcaggcatggccgccgccgcctttctaagcccgaaccaggcgtcggtggcggcgaccaggagcgcgcagagcatctacgtccagaactccaggtacctcaaggccgcgagggagctgctggacgaggtggtcaacgtccaggacgcgatcaagcggaagggggacaagagccagcagggcaaggattccggcggcggcggcggtggcggcgagggcaaggacgccgagacgagcgacgagaaggctggcgagcacgaggggaactcctccgcgccggagctgtcgccgtcggagaggcaggacctccagaacaaagtgtcggcactgatggcgctgctggatcaggtggaccgcaagtacaggcactaccaccaccagatgcagatggtgatgtcgtccttcgacgcggtggccggcgccggcgcggcgaggccgtacacggcgctggcgctgcagaccatctcgcggcacttccggtcgctgcgcgacgccgtcggcgcgcaggtgcagtcgctgcggcggagcctgggcgagaaggacgggtccgcgcagggaggcgggctgccccggctgcgctacatcgaccagcagctgcggcagcagcgcgccatgcagcagttcggcatgatgcagcagccgcagcacgcctggcgcccgcagcgcggcctcccggagtccgccgtctccgtgctccgcgcctggctcttcgagcatttcctccacccgtacccgaaagattccgagaagctgatgctcgctaggcaaacaggcttgtctaggggtcaggtgtccaactggttcatcaacgcgcgcgttcgactgtggaagccgatgatcgaggagatgtacagggaagagttcggggcggagatggactcgcactcgtcgtcggagaacgcggcgggcaacaagggcaaggacgaggcgatatcctcggaggaccacgaggagttccagagcccgtcgagcgccgccgcggccgcagtgccactgccaggccacctcagcgcgttcaagtcggaggcgatcggtgtcatggacgccgccggcattggagcgagctccagcctcgacggcgccgtcatcggcccgtacgcgacgagcctcaacctcggcggcggcggcggcatcctgcaggaggccctcgcgcaccaccaccaccaccacggcggcgccgacgcgaggttcgtgcaggcgtacggcgacatggccggcttcggcggctacgacggcggcagcgtgtcgctgactctgggcctgcagcactgcaacgaggccggcgccggagccggccccgctgagccgcaggccctcctgtacggcagcgccggcgacttcgacttcatcagcggctccgaggacaggcagcggttcgggtcgtcgcagctgctgcacgattttgtggcgtgagcggctggactggacgtcgttggggaataacgtgcgcggacggcgtcagaagcctgggatggccggccggcgccgccgcgggtatacctaccaaccatatgatggccgtacgtcatggtacatggtctcaaattaaccagcaaggttaagcatgcatatatatacatacacatatatatataaggtgtggtaagtgaggtagcataagcagggtaagcagctgtatatgatatgaggtgtggtataaagtaagtgtagggattattattggtattatttttggtagcttgaagattcgtctaatgatgattcaagtccggccagatatggtgtggtgttgttggacctcaagtgagtccatgtacacacaaatgtttcatgttttgtactgtaccagttgttcagttcagcgcta

SEQ ID NO: 91694 - DNA, 2678 bp, Zea Mays
caaaaacggtggtggggtttctgtttctttaagatttataggaagatagtgttaggcagcccttattggtgggcaggagtatattattgctcgaggtaggaggagagccaggggttgttagaacaagtccagtctagagagggagcgaaccaaaagggagaaataacaaaaaaagaatagagacacacacacacagctctgttcttcttattccaatcctctctcatcttgctggttcatccttgggatcggctctgtcgtcccctagctagttcgttcggtgctgtggtttctgccgctgtatccaagaactcttgctcttgctgagtctgggacttcagttcctcgcagagccaggctttacatatcttgggtgccgcacacagtatctatgcacctttgacaacaccaatctgattctgatgacaacaacagccactatctcccgtcatccttgcatcgatctgtcagctggcgtcgcctcgtgcttctgaagacgatggccacattcttctccacttccacgaaccagagggacctcgccggaggcggcggcgacatgtcgtcgttccaccactacgcctactcggacccaccagccggcggcctcatgcctttccccgccaccatcgtgtcgtcggaaggccacgtcgcgcacggcggtgacgacggcggcaggggcgcgttcgtggacgtgaacgcgagggacgggccgacgggcggcgccgagatgggcctgcagacgcagctgctcatggcgaacgccgcgtcggcggtgcagcaccaggggctgtcgcttagccttggcacgcagggggtgccggtgtctctttaccagtaccgccaggcggaggcaggcatggccgccgccgcctttctaagcccgaaccaggcgtcggtggcggcgaccaggagcgcgcagagcatctacgtccagaactccaggtacctcaaggccgcgagggagctgctggacgaggtggtcaacgtccaggacgcgatcaagcggaagggggacaagagccagcagggcaaggattccggcggcggcggcggtggcggcgagggcaaggacgccgagacgagcgacgagaaggctggcgagcacgaggggaactcctccgcgccggagctgtcgccgtcggagaggcaggacctccagaacaaagtgtcggcactgatggcgctgctggatcaggtggaccgcaagtacaggcactaccaccaccagatgcagatggtgatgtcgtccttcgacgcggtggccggcgccggcgcggcgaggccgtacacggcgctggcgctgcagaccatctcgcggcacttccggtcgctgcgcgacgccgtcggcgcgcaggtgcagtcgctgcggcggagcctgggcgagaaggacgggtccgcgcagggaggcgggctgccccggctgcgctacatcgaccagcagctgcggcagcagcgcgccatgcagcagttcggcatgatgcagcagccgcagcacgcctggcgcccgcagcgcggcctcccggagtccgccgtctccgtgctccgcgcctggctcttcgagcatttcctccacccgtacccgaaagattccgagaagctgatgctcgctaggcaaacaggcttgtctaggggtcaggtgtccaactggttcatcaacgcgcgcgttcgactgtggaagccgatgatcgaggagatgtacagggaagagttcggggcggagatggactcgcactcgtcgtcggagaacgcggcgggcaacaagggcaaggacgaggcgatatcctcggaggaccacgaggagttccagagcccgtcgagcgccgccgcggccgcagtgccactgccaggccacctcagcgcgttcaagtcggaggcgatcggtgtcatggacgccgccggcattggagcgagctccagcctcgacggcgccgtcatcggcccgtacgcgacgagcctcaacctcggcggcggcggcggcatcctgcaggaggccctcgcgcaccaccaccaccaccacggcggcgccgacgcgaggttcgtgcaggcgtacggcgacatggccggcttcggcggctacgacggcggcagcgtgtcgctgactctgggcctgcagcactgcaacgaggccggcgccggagccggccccgctgagccgcaggccctcctgtacggcagcgccggcgacttcgacttcatcagcggctccgaggacaggcagcggttcgggtcgtcgcagctgctgcacgattttgtggcgtgagcggctggactggacgtcgttggggaataacgtgcgcggacggcgtcagaagcctgggatggccggccggcgccgccgcgggtatacctaccaaccatatgatggccgtacgtcatggtacatggtctcaaattaaccagcaaggttaagcatgcatatatatacatacacatatatatataaggtgtggtaagtgaggtagcataagcagggtaagcagctgtatatgatatgaggtgtggtataaagtaagtgtagggattattattggtattatttttggtagcttgaagattcgtctaatgatgattcaagtccggccagatatggtgtggtgttgttggacctcaagtgagtccatgtacacacaaatgtttcatgttttgtactgtaccagttgttcagttcagcgcta

SEQ ID NO: 91695 - DNA, 2674 bp, Zea Mays
caaaaacggtggtggggtttctgtttctttaagatttataggaagatagtgttaggcagcccttattggtgggcaggagtatattattgctcgaggtaggaggagagccaggggttgttagaacaagtccagtctagagagggagcgaaccaaaagggagaaataacaaaaaaagaatagagacacacacacacagctctgttcttcttattccaatcctctctcatcttgctggttcatccttgggatcggctctgtcgtcccctagctagttcgttcggtgctgtggtttctgccgctgtatccaagaactcttgctcttgctgagtctgggacttcagttcctcgcagaggctttacatatcttgggtgccgcacacagtatctatgcacctttgacaacaccaatctgattctgatgacaacaacagccactatctcccgtcatccttgcatcgatctgtcagctggcgtcgcctcgtgcttctgaagacgatggccacattcttctccacttccacgaaccagagggacctcgccggaggcggcggcgacatgtcgtcgttccaccactacgcctactcggacccaccagccggcggcctcatgcctttccccgccaccatcgtgtcgtcggaaggccacgtcgcgcacggcggtgacgacggcggcaggggcgcgttcgtggacgtgaacgcgagggacgggccgacgggcggcgccgagatgggcctgcagacgcagctgctcatggcgaacgccgcgtcggcggtgcagcaccaggggctgtcgcttagccttggcacgcagggggtgccggtgtctctttaccagtaccgccaggcggaggcaggcatggccgccgccgcctttctaagcccgaaccaggcgtcggtggcggcgaccaggagcgcgcagagcatctacgtccagaactccaggtacctcaaggccgcgagggagctgctggacgaggtggtcaacgtccaggacgcgatcaagcggaagggggacaagagccagcagggcaaggattccggcggcggcggcggtggcggcgagggcaaggacgccgagacgagcgacgagaaggctggcgagcacgaggggaactcctccgcgccggagctgtcgccgtcggagaggcaggacctccagaacaaagtgtcggcactgatggcgctgctggatcaggtggaccgcaagtacaggcactaccaccaccagatgcagatggtgatgtcgtccttcgacgcggtggccggcgccggcgcggcgaggccgtacacggcgctggcgctgcagaccatctcgcggcacttccggtcgctgcgcgacgccgtcggcgcgcaggtgcagtcgctgcggcggagcctgggcgagaaggacgggtccgcgcagggaggcgggctgccccggctgcgctacatcgaccagcagctgcggcagcagcgcgccatgcagcagttcggcatgatgcagcagccgcagcacgcctggcgcccgcagcgcggcctcccggagtccgccgtctccgtgctccgcgcctggctcttcgagcatttcctccacccgtacccgaaagattccgagaagctgatgctcgctaggcaaacaggcttgtctaggggtcaggtgtccaactggttcatcaacgcgcgcgttcgactgtggaagccgatgatcgaggagatgtacagggaagagttcggggcggagatggactcgcactcgtcgtcggagaacgcggcgggcaacaagggcaaggacgaggcgatatcctcggaggaccacgaggagttccagagcccgtcgagcgccgccgcggccgcagtgccactgccaggccacctcagcgcgttcaagtcggaggcgatcggtgtcatggacgccgccggcattggagcgagctccagcctcgacggcgccgtcatcggcccgtacgcgacgagcctcaacctcggcggcggcggcggcatcctgcaggaggccctcgcgcaccaccaccaccaccacggcggcgccgacgcgaggttcgtgcaggcgtacggcgacatggccggcttcggcggctacgacggcggcagcgtgtcgctgactctgggcctgcagcactgcaacgaggccggcgccggagccggccccgctgagccgcaggccctcctgtacggcagcgccggcgacttcgacttcatcagcggctccgaggacaggcagcggttcgggtcgtcgcagctgctgcacgattttgtggcgtgagcggctggactggacgtcgttggggaataacgtgcgcggacggcgtcagaagcctgggatggccggccggcgccgccgcgggtatacctaccaaccatatgatggccgtacgtcatggtacatggtctcaaattaaccagcaaggttaagcatgcatatatatacatacacatatatatataaggtgtggtaagtgaggtagcataagcagggtaagcagctgtatatgatatgaggtgtggtataaagtaagtgtagggattattattggtattatttttggtagcttgaagattcgtctaatgatgattcaagtccggccagatatggtgtggtgttgttggacctcaagtgagtccatgtacacacaaatgtttcatgttttgtactgtaccagttgttcagttcagcgcta

SEQ ID NO: 91696 - DNA, 2354 bp, Zea Mays
gagtatattattgctcgaggtaggaggagagccaggggttgttagaacaagtccagtctagagagggagcgaaccaaaagggagaaataacaaaaaaagaatagagacacacacacacagctctgttcttcttattccaatcctctctcatcttgctggttcatccttgggatcggctctgtcgtcccctagctagttcgttcggtgctgtggtttctgccgctgtatccaagaactcttgctcttgctgagtctgggacttcagttcctcgcagaggtatagtataagccttgttgtctttgtcaagcaatagcttaaactatcctttgcgtcttaatctgaacaacatatgccggagatgggatggattcttggtttctacgtactccctccctgcttgttgagctttcggtttctagttagctccgtgtgtttggtggtgggtgcaccagcagctgaaataggttgcttctcgttttgccttagtcaaggctctttgaaatccgaccgaattttctcgggagctagttcttcctggctgggatttctggccgggtgccgaattttaggattcgtttcctttcacagcccaccaatttggacttctggttttgctccagttaggtgatgccttcacccaaaacaacttgaaggcttgctatgtcccaggtagctatatatctcaaaagttttggtggcagtcttcgaggaagtggagtcatctcaagtttttatcgatcgtcccagccaggctttacatatcttgggtgccgcacacagtatctatgcacctttgacaacaccaatctgattctgatgacaacaacagccactatctcccgtcatccttgcatcgatctgtcagctggcgtcgcctcgtgcttctgaagacgatggccacattcttctccacttccacgaaccagagggacctcgccggaggcggcggcgacatgtcgtcgttccaccactacgcctactcggacccaccagccggcggcctcatgcctttccccgccaccatcgtgtcgtcggaaggccacgtcgcgcacggcggtgacgacggcggcaggggcgcgttcgtggacgtgaacgcgagggacgggccgacgggcggcgccgagatgggcctgcagacgcagctgctcatggcgaacgccgcgtcggcggtgcagcaccaggggctgtcgcttagccttggcacgcagggggtgccggtgtctctttaccagtaccgccaggcggaggcaggcatggccgccgccgcctttctaagcccgaaccaggcgtcggtggcggcgaccaggagcgcgcagagcatctacgtccagaactccaggtacctcaaggccgcgagggagctgctggacgaggtggtcaacgtccaggacgcgatcaagcggaagggggacaagagccagcagggcaaggattccggcggcggcggcggtggcggcgagggcaaggacgccgagacgagcgacgagaaggctggcgagcacgaggggaactcctccgcgccggagctgtcgccgtcggagaggcaggacctccagaacaaagtgtcggcactgatggcgctgctggatcaggtggaccgcaagtacaggcactaccaccaccagatgcagatggtgatgtcgtccttcgacgcggtggccggcgccggcgcggcgaggccgtacacggcgctggcgctgcagaccatctcgcggcacttccggtcgctgcgcgacgccgtcggcgcgcaggtgcagtcgctgcggcggagcctgggcgagaaggacgggtccgcgcagggaggcgggctgccccggctgcgctacatcgaccagcagctgcggcagcagcgcgccatgcagcagttcggcatgatgcagcagccgcagcacgcctggcgcccgcagcgcggcctcccggagtccgccgtctccgtgctccgcgcctggctcttcgagcatttcctccacccgtacccgaaagattccgagaagctgatgctcgctaggcaaacaggcttgtctaggggtcaggtgagctgattaagggattcgtcacgcacgaactgatgggtcgatctccttcgatctacgacatggccatggatggcccttggtccgtccttgctaatacggataagagctgctgcgtgggttttatgcaggtgtccaactggttcatcaacgcgcgcgttcgactgtggaagccgatgatcgaggagatgtacagggaagagttcggggcggagatggactcgcactcgtcgtcggagaacgcggcgggcaacaagggcaaggacgaggcgatatcctcggaggaccacgaggagttccagagcccgtcgagcgccgcc

SEQ ID NO: 91697 - DNA, 3174 bp, Zea Mays
atggggaggtggtggccggccgccctgctgggctgcgcagtggcggtggtggccgttctggcggccgccgtggtggaatgcgcggtcacgtacgacaagaaggcggtgctcattgatgggcagaggcggattctcttctccggatccatacactaccccaggagcacccctgatgtaataagctgcattcttcaaaacctctccttctttttttccccccttcttccccggggcggcggggagttcatggctgtggtcagctgtgttcttgatgcaatgctatcaaaagcaaattgctttcctactttagccgtccctctttattccacgatgtgggaaggactgattcagaaggctaaagatggaggcttggatgtgattcagacctatgtcttttggaacggacatgagcctacgcctggaaattactatttcgaagagaggtacgatttggtcaggttcgtaaagacggtccagaaggccggcctgtttgtacatctccgcatcggcccctacatctgcggcgagtggaacttcggtggcttcccagtttggttgaagtatgtaccaggcatcagcttcaggacagacaacgaacctttcaagacggcaatgcagggtttcactgagaaaattgttggaatgatgaagagcgaaaacctctttgcatcccaaggtggcccaattatcctctctcagattgagaatgagtatgggccagaaggcaaggagtttggtgccgcaggtcaggcatatatcaactgggcagcaaagatggcagtgggactggacactggtgtgccgtgggtgatgtgcaaggaggaggatgcacctgatccagtgatcaatgcgtgtaatggtttctactgtgatgcattttctcctaacaaaccttacaagcccacaatgtggactgaagcttggagtggctggttcacagaatttggtgggaccatccgccaacgaccggttgaagatctcgcatttgctgttgctcgatttgtacaaaagggtggctcttttatcaattactacatgtatcatggaggaacaaattttggacgcactgctgggggtcccttcatcacaacaagctatgattatgatgctccaattgatgaatatggacttattagagaaccaaagcacagtcatcttaaagaactccacagagctgttaagttatgtgaacaggctttggtttctgttgaccccacaattactacccttggaactatgcaagaggcccatgtcttccgatctccatctggttgtgcagctttccttgcaaactacaattctaactcccatgcaaaagttgtgttcaacaatgagcaatacagcctcccaccttggtcaattagcatccttcctgattgcaagaatgtagtttttaacagtgccacagttggtgttcagacatctcagatgcaaatgtggggagatggtgccacatcgatgatgtgggagaggtacgatgaggaggttgattctctggcagctgctccattgctcaccacaactggtttgcttgagcagcttaacgtcaccagagacagcagtgattatctgtggtacattaccagtgttgacataagcccatctgaaaactttctacaaggtggtggcaagcctccgtctctgagtgttcagtctgctggtcacgccttgcatgtctttgtcaacggacaacttcaaggttcttcgtatggtaccagggaggatcgaagaattaaatataatggcaatgttaaccttcgagctggtactaacaaaatcgcactactgagtgttgcttgcggattgccgaatgttggagtgcattatgagacgtggaacaccggcgtcggtggtcctgtcgtgcttcatggattgaatgaaggttcgcgagaccttacttggcagacctggtcctatcaggttggcctgaaaggcgagcagatgaatctgaactccgtagaaggctcaggctcagttgaatggatgcaagggtcactgatagctcagaagcaacagccgttggcctggtataaggcttacttcgagactcccagcggggacgagccattggctttggatatgggcagcatgggcaagggacaggtctggataaacggacaaagcattggacgctactggacagcgtatgcagacggggactgcaaagggtgcagctacaccgggaccttccgggcacccaagtgccaagcaggctgcggccagcccacccagcgttggtaccatgtgccaaggtcctggctgcagcccagcagaaacctactggtagtcttggaggaactgggtggtggggactcgtcgaagatcgccctagccaagaggtcggtctcgagcgtctgtgccgacgtgtccgaggaccatccgaacatcaagaagtggcagatcgagagctacggcgagcgcgagcaccgcagggccaaggtgcacctgaggtgcgcgcacgggcagtccatctccgcgatcagattcgcgagcttcgggacgcctgtgggcacctgcggcaacttccagcagggaggctgccactcggctagctctcacgctgtgctagagaagagatgcattgggctccagagatgcgtcgtcgccatctcccccgacaacttcggaggagacccctgcccgagcgtgacgaagagggtggcggtcgaggcggtgtgctctcccgccgcttaggcttagcctgcccgcccgcccctacttctccgactcaccgagcaacggatttgaaggccgaaaccgatgtgtgtggagagtggaactgtaagtatcgacttgcattggtcggagggaggtttagcattcgtccgtctgattccggattaggattggtgctctgctacgtctccatgaactgttcaaagcggccagctgggtccagggatggagctgtagagagagtaggagtagaagactgatcatgcgttcttttgctgttgtgtgttagtagtagctgtgtacctacccgtgacacatctcgtttttcttgaaacggaggaagacgcaggtgaagcgtgcatcgtgcctttgttgttgcaattgtgttgtgtgtggtgggggaggaaaaaaaaagaacaggctttgatgttctcagaagctcaagttcagatctgatagtgcatggaaaatcatgaaccctgaggaatcgattttcgc

SEQ ID NO: 91698 - DNA, 3244 bp, Zea Mays
ctcccactgtcgccctctcccaagaacccgcccaaagaatcctagaatccaagaagaagggcagcaacaaaaaacaaggggcggggggggctgcaggtctgagggcggagggggaggaggtggtgctgccgtgctggaagaccagtgtgtgaagaccacacagagtctctcgcgcacccggtgtgctgtgctgtggtcttcctctttgaccgccttctcggagcggggagtttggccatggggaggtggtggccggccgccctgctgggctgcgcagtggcggtggtggccgttctggcggccgccgtggtggaatgcgcggtcacgtacgacaagaaggcggtgctcattgatgggcagaggcggattctcttctccggatccatacactaccccaggagcacccctgatatgtgggaaggactgattcagaaggctaaagatggaggcttggatgtgattcagacctatgtcttttggaacggacatgagcctacgcctggaaattactatttcgaagagaggtacgatttggtcaggttcgtaaagacggtccagaaggccggcctgtttgtacatctccgcatcggcccctacatctgcggcgagtggaacttcggtggcttcccagtttggttgaagtatgtaccaggcatcagcttcaggacagacaacgaacctttcaagacggcaatgcagggtttcactgagaaaattgttggaatgatgaagagcgaaaacctctttgcatcccaaggtggcccaattatcctctctcagattgagaatgagtatgggccagaaggcaaggagtttggtgccgcaggtcaggcatatatcaactgggcagcaaagatggcagtgggactggacactggtgtgccgtgggtgatgtgcaaggaggaggatgcacctgatccagtgatcaatgcgtgtaatggtttctactgtgatgcattttctcctaacaaaccttacaagcccacaatgtggactgaagcttggagtggctggttcacagaatttggtgggaccatccgccaacgaccggttgaagatctcgcatttgctgttgctcgatttgtacaaaagggtggctcttttatcaattactacatgtatcatggaggaacaaattttggacgcactgctgggggtcccttcatcacaacaagctatgattatgatgctccaattgatgaatatggacttattagagaaccaaagcacagtcatcttaaagaactccacagagctgttaagttatgtgaacaggctttggtttctgttgaccccacaattactacccttggaactatgcaagaggcccatgtcttccgatctccatctggttgtgcagctttccttgcaaactacaattctaactcccatgcaaaagttgtgttcaacaatgagcaatacagcctcccaccttggtcaattagcatccttcctgattgcaagaatgtagtttttaacagtgccacagttggtgttcagacatctcagatgcaaatgtggggagatggtgccacatcgatgatgtgggagaggtacgatgaggaggttgattctctggcagctgctccattgctcaccacaactggtttgcttgagcagcttaacgtcaccagagacagcagtgattatctgtggtacattaccagtgttgacataagcccatctgaaaactttctacaaggtggtggcaagcctccgtctctgagtgttcagtctgctggtcacgccttgcatgtctttgtcaacggacaacttcaaggttcttcgtatggtaccagggaggatcgaagaattaaatataatggcaatgttaaccttcgagctggtactaacaaaatcgcactactgagtgttgcttgcggattgccgaatgttggagtgcattatgagacgtggaacaccggcgtcggtggtcctgtcgtgcttcatggattgaatgaaggttcgcgagaccttacttggcagacctggtcctatcaggttggcctgaaaggcgagcagatgaatctgaactccgtagaaggctcaggctcagttgaatggatgcaagggtcactgatagctcagaagcaacagccgttggcctggtataaggcttacttcgagactcccagcggggacgagccattggctttggatatgggcagcatgggcaagggacaggtctggataaacggacaaagcattggacgctactggacagcgtatgcagacggggactgcaaagggtgcagctacaccgggaccttccgggcacccaagtgccaagcaggctgcggccagcccacccagcgttggtaccatgtgccaaggtcctggctgcagcccagcagaaacctactggtagtcttggaggaactgggtggtggggactcgtcgaagatcgccctagccaagaggtcggtctcgagcgtctgtgccgacgtgtccgaggaccatccgaacatcaagaagtggcagatcgagagctacggcgagcgcgagcaccgcagggccaaggtgcacctgaggtgcgcgcacgggcagtccatctccgcgatcagattcgcgagcttcgggacgcctgtgggcacctgcggcaacttccagcagggaggctgccactcggctagctctcacgctgtgctagagaagagatgcattgggctccagagatgcgtcgtcgccatctcccccgacaacttcggaggagacccctgcccgagcgtgacgaagagggtggcggtcgaggcggtgtgctctcccgccgcttaggcttagcctgcccgcccgcccctacttctccgactcaccgagcaacggatttgaaggccgaaaccgatgtgtgtggagagtggaactgtaagtatcgacttgcattggtcggagggaggtttagcattcgtccgtctgattccggattaggattggtgctctgctacgtctccatgaactgttcaaagcggccagctgggtccagggatggagctgtagagagagtaggagtagaagactgatcatgcgttcttttgctgttgtgtgttagtagtagctgtgtacctacccgtgacacatctcgtttttcttgaaacggaggaagacgcaggtgaagcgtgcatcgtgcctttgttgttgcaattgtgttgtgtgtggtgggggaggaaaaaaaaagaacaggctttgatgttctcagaagctcaagttcagatctgatagtgcatggaaaatcatgaaccctgaggaa

SEQ ID NO: 91699 - DNA, 474 bp, Zea Mays
atgttgaggtttgtggttgatgatgaagtggtgttaccagaattccagaagcattgcatgtctgcggaggcatggaaagcccataactgcataccagacgagcactatattcagacgttgcttgcacaaagtggtctagaagaagaacttacgcggcgatcagtaacatatagtgcatgggatctttcagcttctaaagatcgtgaaagacgcgggtggcatcctgtaacatataaagtctctgatgctactccaagacttataaaatccataaagaccgaaaatagaagggagtggtgtacaagtaatggaaagccagccccctgcttcctttttgccaggaagtttccacgtggagctggtctgaagcttcttgattcagctaccttgccgacgcatgaacaagaagacgagttagactttgtcgaaaccctctccactagtggaggtatcgaccaccactcgtcactgtaa

SEQ ID NO: 91700 - DNA, 472 bp, Zea Mays
gaattataatattggttgcaggacccatgacagatctaattataatattgatgggcaagtgcagtaaggaaaagtcttaaataagaaaagaaattacactatcttattcaatgggaaagctacacaacatgtcgtactcagtctgtattctcttcgcacaagcatgcaaccatgggccatggcgctacgacaccagtgacattgatgtggtctagtgggatactaccagccagagaagccatggatgagctaggactaggattcacacggcatcttggcaggtgcctgtcgtcacaggcccaacgcccgagcgagggaacattaccgtccccatggtggataggaagccaaaggaggcgcgggtgggatgaactggatgctcagaccaagagaggaggagggcggtctgcgcgccggtgacgaacagaagcaaaagaggtggaagctcaccagatcgaagacgaggagtagc

SEQ ID NO: 91701 - DNA, 5197 bp, Zea Mays
tcccatgggccggaagaagcgaacctccgcaccaaaccctactccgccaccgctggacgcctcccgccggtcgccggcggcggcggagaagccagccggcatcggcagggaagatgccgccgtgcgcgccgaggtcgacaaagcgcttgcgtgcctgcagcggggcagccacgcgcgtgcgcagcgcctcacgagggacgccatcgcccgccacggggaggcctcaccgctgctcctgcgggcgcacggcaccgtccacgctcgcgccgcctccgtcctcgacgaccacgccagccgcgcgcgccaccagcgtacagcgctccaggcggcccagcgcgccgtccagctcgcgccggactccatcgagctggcccacttccacgccatgctgctcttcgacgctgccaccgactcccgcgcctacgatgaggtcgtcgctgagtgcgagcgcggcctcagcatcgaggccccctccgaccccgcgccccactccctcaggttgcccggccccgacgtcgaccaggtccagtccgagctccgcaacttgatccagaaggccaacctcgcctccatctcctcttgggtcaaaaacatgggcggcgcgggggacgacaagcttcgcctcatccctgtgcgccgtctagcggacgagccaatggaggcccggcttgtccccacggcgccctccccgcgccgcccaaacgagatcaagaaggcgaccaagaccaccgaggagcgccgccaggagatcgaggtacgcctggctgccatgaggctgctgcagcagcagaaggagcagagcaatgatgttgtgtctgctacccctgcctcttcccggtcacatggagatgatgccccctcatcgtctgagtcatcggtgggcggacatcgagctgaccggagaaaaggtgggtctaggaaagcaacaggctcatccgcgtctgagcgcactgaccaggtgcgtgcctactggggctcgataccagtggagcaaaggcttgcattcttaaacactagcatttctgagctcaagtcacactatgcttctgcaatgcacaaggagaaagatgctgccagtgcagcatctgatgtgctcaatgaggtgatacaatttgccaacaagcatgacaagtgggagttcatggtatgtggtaggtgtcgggagcagtttacacatgtggaggcacaccggtggcatgtcatggttgagcatgttgggctactctcatccgagctgcaggaaatggttccgcaggagattgatgctgactgggcagaaatgctcagtggttgcaactggaggccattggatgctactgccgcactgaaactttttgaggaagatcaacacaacaaccttggaccagatagggaggatgaatcgaattcgttagatagttggagtaacaaagccatggacatgtcagaatcctcagcctggtcacacaacgaggagtctagcggttttggagtggtggtgagggaaggtgacaccaagtggccattctcagatgatgacgaaagggccaagattttagaaagaatccattcatcgttcaaaatccttgtgaagaaccataatctttcagtgcacaatctaaacagggtgattcgatttgctgtagaggaactcagggggttgccatctgggtcactactgcttaatcactctttggacgagtcgccactttgcattcgcttcttggaggcatcatcactgcagaaagtagataatttcttgcaggacttaatgcaggcttctggacttaataggaacttacagaaggctgaaggattaggtgacggggatagtttcatccaaaaccacgatgtactagagaaggttacccttaattctgattcatcagaactgatcattgatgggcacaccttcggcggaaagtttgattccgagagtgttgatactgatgcattgctttcatggctgtacgccggatcttcaattggtgagcagctattggcctggaatcgtatgatcgacgaaaggtcaaatcagtgcgtcgaccttattcgagcacttgggagggagttcaacaacctgcaaaactcatgtgaacggaaacttgaacagctgagaaatgaggatgcctttacttctgtggagggcctcttttgtgaagagcaaacacgaagggagcaggtgggacggtatggattccaaactttcgaggagctcctcaggaagcggcaggagtttttggaacacaacactgaggagcagtccgacagtaacagatctgagatagatgcaatctcagctattttgaaggaacttcacacatcacactttggttatgatgaggcccttactggcatggccccacgcttttctgacttcgatgggggcgaagaagatgaatggaggctgcatgattttatacatccaaatgattcaatggtacacatggttgtatcaaagatgaaggaacatgttactatggagattagcaagatagatgctaagattatgcgaactttatctgtgatgcggcaactagagcacaagcttggacctgtttctgctcttgattatcgaatgattcttttaccccttatgaggtcgttcttgcagagccatttggaagagctggtggataaggatgcgagagagagatctgatgctgcaagggaagccttcttggctgaacttgctttggatgctaagaagaatgcaagcaaagggggtgatatgaaacaatcccatgaaaaatcaaaggataagaagaagtttaaggattctcgtagggcaaaggagttcaaggattcaagctggagcgaccagtctctcattcaccaagacagtgctgacgaggaaacaacagagacatttcaaattcttgctgattgtgatgatctggattgcaaattctccacaagtgatgattacttcaatgaacaagaggaagaacttaggcataaggtacaacttgaagcagaggaacgaaagctggaagagactctggaatatcaacggcggatagaggaggaagcaaagcagaaacatcttgcagaacaatgtagaagtacttatgcatcttctgtaattggtacagctcgtctttcaagcactgggaatcaggataaccatgaaagtgcaatcaatcactcttcccgtacttatctcgaaggcataaagtttggtgattttcgctacaccgagaacaatttcagccagaaacttaatggattggattcatctgatgcacatgcattaaccagcagtgatatgaatgctcctagatggaccagcacttgtaaaatcgctccctacgcaaaccacagctatcaaactggaaaacaaaatcggctacatgtgttgccttcagatgatctgcaatttgctcatagagatcacgctgcaggaacagagaagccaaattttgagaaagtggtgcaataccatcagcggatttgtgcatcaaggatgattttgataaaaggtttcaagaagatcttgatgaagcagtgcgccaaagccttggatacgatgcttatcctgctggtacaataagcacttcaaatgaaacagaagtgtatggcactggccttaaaaatgccgctggtgaatacaattgtttcttgaatgtgattattcagtcattatggcatataaggcggtttcgggacgagttccttaaaacatcatcactgcacaagcatgttgaagatccttgtgctgtctgcgctttatatggtatcttcattgacctgagcaaagcagccaagggacacggagaagctgttgcgcctacttcattgaggatcgctttgagcaaatcctacccgaacagcaaattctttcaggagggccagatgaatgatgcatctgaggtactgggtgtaatctttgagtgtttgcataagtcatacacttcgcgtactgtctgccatggtaaacctcatgagaagaattctattggatcatgggattgtgcaaatatttcttgcatagcacatagtctttttgggatggacgtatatgaacggatgaactgtcacaattgcaagatggagtctcggcggctcaaatatacttcatttttccacaatattaatgctagttcactccgaaccgcgaagatgatgtgtccagattcttcatttgatgaacttttgaaggttgtcataatgaatgatcaactagcttgtgatcaagacgttggcggctgtggaaaaccgaatcacatacaccacatcctttctactcccccacatgtctttacagttgttttgggatggcagaacaacaaagagaatgtggatgacatatctgcaactttggctggtatttcaactgagatagacattagcatattctaccgtggcctagatcaaggaagcaaacacaccctggtgtcagtggtttgttactatggccagcattatcattgttttgccttcaaggatggacgatgggtcatgtatgatgaccagacagtcaaggttgtaggtagttggggtgatgtgctcgtgatgtgtgaaaagggtcacttgcaaccccaagtgcttttctttgagtctgcaaattaatcattcttcagagtcgtaaagtgttgtgcagtggttaacatgccctcaaatatagggtttttacctgtggccgtgaagattagaaatagagtagcaaattcgttttgagcgggggtatagagtagcaaattcaacagctgcgttggtctctgagctttggtcgagcccctcgtaataagtagtcacctgaggattaaaggagagctgtttacccctctgtttttttaacctttggtatacttgctgaacttcggatccttcatctgccaatgagatttcactgccgatcaagttggtggggacgcattcgacatgaactgccatccaacaattctagccggatctgcctaaagctcttcattatgcaccagttatgtatagaattttgtgcttacaatgaggtgacaggtataggagtgtgactgttttgaggccagaaggtttagagaatggaaggaaatggaattgttggtgcggtgtgtatctgtggagtactgtttgaaaagaggaacgatatctggaatacggtagactttgagaaatctgtagtacacgagtctatgtaaacagggactcgatgagattatgtgagatgagtatagcgatgaataccagactccttatcactactgtttttatagttaaa

SEQ ID NO: 91702 - DNA, 947 bp, Zea Mays
tcctagccaccacaattctccaccacctccaaacaccacgaccttcccccatcctcccctccaccactcccgcctagcccttcgctccaccaccttcgagactcccccttcgccggtcggcgtcgttggtggttggagagatggggcagcagcgtacgttggtgtatagcttcgtggcgcgaggcaccattgtgctagcggaccacgccgaggtctccggcaactttgcatctgttgccgctcagtgcctgcagaaacttcctgccaacaacaatcgtttcaactacaactgcgatgggcacacattcaactaccacattcatgatggatttacatactgcgttgttgctactgaatcagctggtcgacagcttccagttggatttattgaaagagtcaaggatgatttttccaagaagtatagcggagggaaagccaaaactgctaatgctaatggcctcaagcgagaatatgggcctaaacttaaagagcacatgaagtattgtgaccagcaccccgaggagatcgacaagcttgcaaaagtgaaggctcaagtcacagaggtcaagggagtgatgatgcaaaacatcgagaaggtactagatcgtggtgaaaaaatcgaacttcttgtggataaaacggaggatctccgagcacaggcacaagatttcaggcaacagggaacgaagatacgaagaaagatgtggtgggagaatatgaagatgaagctcatcgttttcggcatcgtggttgcactgatcctcctcattgtcttgacagtttgcaaggacttcgattgctggtgatgtgaaattacagagcccatgcatccgacctgttgcttttgtagccttgcattccttcactttgatgttgttgttcttgcagataagatgcaggaacatgaaaggaaagaacatgagaaaaaatgtagggggagtgtagtg

SEQ ID NO: 91703 - DNA, 1594 bp, Zea Mays
aaacagggacaggtccgcctcctcgccgtctcgtctgaccgtacgtctttggtgatgaagcatcgatccgggagaaggttcagcattagctctagctagagctagatagccggaggaggagctagtaggaagaggcatggataatcatcaacttgtcgccatggcagcggtggctcagccggcgagcccgacctcgccgcacgtcgcgcacaagatcccgcccggcgacgggccttacgcgagggccaagcacttccagctggtggagaaggacctggacgcgtcgatcgcgtggttctggaaggcgatcagcgcgggcgacaagttggacagcgcgctcaaggacatggcggtggtgatgaagcagcgcgggtacctggcggaggccatcgacgccatcaggtcgctgcggcacctgtgcccgaagcagtcccaggagccgctggacaacatcctcctggacctctacaaggccagcgggcggaccaaggaggagatcgagctgctcaagcagaagctccgcaagatctacctcggcgaggcgttccatggcaggaccaccaagcgcgcccgctcgcacggccgcaagatccacgtctccgtcaagcaagagacatcgcgcgtcctgggcaacctcgcgtgggcgtacatgcagcagcgcaacttcatggcggcggaggtggtgtaccggaaggcgcagatgatcgacccggacgccaacaaggcgtgcaacctcgccctctgcctcatcgagcaggcccggctcgccgacgccgagctcgtcctcgccgacgtgctcgccgggaggtacctgcaggcccgcgaccagcaggacggcaagatcgtccggaaagtggaggagctgctggcccggatcatggcgcatacgacgtggccgggcggtggcggcggtgacggacgacgacgcccggcggataagagcgggagcgggagcgagagcgacgacgatgactgggtcgagaaccagatgctggctttgctcgacgtggcggtgccgtaccggaagaagagcaggaggctgccggtctttgaggagatctcgcgagcagaatagcagatggctgatatagattagcagcagcatcatcatctttcgatcgagctccatgcatatatcgtttgagcgagcgcggatcctctggacctaactgcagtctgcagataggtaggtaggtaggtctgagctgatccagacccacatgtcagtgaccggacgcagaggatctgcttccattattatttgatcgactcctgtccagctcaaccttttggaccaactccgtggcgatagcagtagcagcagcagaaaggtaaagcgcgcgtgtgtgtgtgtgcccctgtgaatctgtggatcggagacagtgtgcagtagcatagcatcagcagcaaggtatttaaagcgtgcaagtgtgtgtataactgtatatacgcttcttatatgcatctgtggatattttgcatggatcggacgcatgtcgcagtcgtgtagtacgtgcgtttgtaaagctattttcaccagtatactcatctctatgctcatattcaaattttcactatatatctggttggttgc

SEQ ID NO: 91704 - DNA, 1031 bp, Zea Mays
gtggaggcagaaaaggttgcagtggacgatcttagtgtacttgtcattctgattgcttgcacacatgctggcttgatctcagagggtttagaaatatttcacagaatgaaaaatgattttgggatagatcccgaggtagaattggttgatctacttggccgtgctggacatttgcgttgagctggctgagttataaatggaacgtcttgcaaatcttggagctgattctggagtctgtttttctatcaaatatatatgctgatgaagcaatgtggggtgatgttttgaggattaggaaaatgatatgtgatgaggggatgagaaaggatattggacggagtgtgattgaagtggatggagaaatacatgagtttgtgaagggaggttgctcatatcattataaggaggaaatgtacttggtgctttggaatttatctaacatggcagcatctatttgattgcttctttctgtaccaactttgtgaaatcattcatcacgagtctgttgattcaacattctagtcatgcaccaaattgcatctgatggttcatagcccagatggtaactgcctatttttcaagcctgaattttcctgctcaagcacaagcaggtgccaacatgaacagtaccgactcaatgaggctcttgagtatccatgtgctgtccatttattattatttttcttgacttgcttccacagtggtgactcaacatgtgatttaacgaagaagatttatgcttttggctgcagttgttactccttttagtcagttttaaattgcatcatgcattagagtagccacttgtggattatgggatttaaaagtggttttggcctttaaaggacaagtttagtcctaattgagaagtgtctgcacctctgtaccattgttctttacttcatcagagtgaagatacatgaagttcagatttcagaatgaagacttcaagattgtatactgcctcttacttccgtctactttatgtgtttcattttatatctgtgttgttgtttgctgattacaaaaat

SEQ ID NO: 91705 - DNA, 451 bp, Zea Mays
gttcctcgggcagtcaggccacctctccgcctccccgttatggctctccaaccgcttcctcctcgccctcgcgtccatcccggtgtcgccacgctcgcggacgccgtcttcgcgcgccccccggatcccgccgcccgcgaccgattcccctggaacacgtccgtccgcctccacgcccccgcatcgcgctgctctactttgcgtggatgcgctattgcgacgtgcggccgggcgcctacaacgttcctcactgtcctcaaggcctgtggccgcgccggactcctggttcacgccgaggccgtgaggagagagggctgggcgcggacctcttcacggtgaacacgctcatcaacttctaatgcaggatcctggattgccactaggggaggattgtgttcgacaaggcgggcaacgtctcatggaactccatggtcgctgggttcttcgggaa

SEQ ID NO: 91706 - DNA, 1636 bp, Zea Mays
ctccacgcagctccactccacgggctagcagcagcagcagcttccccatgcatgcaatggcgtggtggggcggcgaggagggcgagccgttattcccgtccgtggacaagtgcgacgcgtcccgcctcggtcgggactccacgctggtggcggacctggacggcgcgctgctccgctccccggacgccttcccctactacgcgctcgtcgccttcgagacgggcggcgcggcgcgcctggcgctgctgctgctgctggcgccgctggccgcggcgctgcgccgcgcggtgtcggagtccgcgggggagcgggtgctggtgttcgcggccacggcgggcgcgcgcgtcgccaacgtcgagtccgcggcgcgcgccgtgctgcccaggttctacgccgccgacgtgcgccgggacgcgtggcgcgtcttctccgcgtgcggggggcggaggctggtgctcaccgccgcgccgcgggtcatggccgagccgttcctgcggcggtacctcggcgccgacgccgtcgccggcacggagctcgccgcgtggcggggacgcgccacggggtgggtggacgcgcgccgcggcggcgtgctcgtcggcgagagcaaggcccaggcgctgcggcagatgctcgacgccggggaggtgcccgatgtcgggctcggccaccggagatcggattacgccttcatgagtttctgcaaggaggcctacctggtgccgcggacgccggtggaggccgtgcgcgcggacgagctgccgaagcgggtcgtcttccatgacggccgcctggtgcagcgcccgaccccgctcgtggcccttctcaccgtgctgtggttccccgtcggcctgctgctatcgctggtccgcgtcgccgcgggggtgctgctcccgatgcggtggctccgcgtcgcgttccacgcgctgggcgtgcgcgtcgtcgtgcgggggacgccggcggcggcggcggcggcggcgacacgcacgggggtgctcttcgcctgcagccaccgcacgctcctggacgccgtcttcctctcggtggcgctgggccggcccgtggccgccgtgacctactcgctgtcccgcctctcggagttcctgtccccgatccgcaccgtgcggctcacccgcgaccgcgccgccgacgcggccaccatcgggcgcgtgctcgccgagggcgacctcgccatctgccccgaggggaccacgtgccgggagccgttcctgctgcggttctcggcgctgttcgccgagctcaccgacgccgtcgtgccggtggcggtggagtgccggatgggcatgttccacggcaccacggcgagggggtggaaggggatggaccccttctacttcttcatgaacccgagcccggtgtacacgatcacgttcctcgacaggctgccgcccgagctcacctgcggcggcgggaacaagtccggccactgggtggccaactacgtgcagaggcttatagcctccacgctgtcctacgagtgcaccggcctcacccggaaggacaagtacagggagctagcagacaacgacggcctagttttaaacttttaatttgtaaaacttcgtcgccactgtagattgcgtaataatcttgttctgtcctggtggcgctgaatata

SEQ ID NO: 91707 - DNA, 1298 bp, Zea Mays
gtaaaactatgattttgataaatactgttgccaaacataccctcaaccggatcataaaaaaccaaactgcaatcttatcaccaggctcacaaataatcatacaaggcaggtgttttgaaggtcataccaaagtttgacaaacatagcacaattagatgacatccaactccatacgaaaactaccaatacactattccgcctcaacgcagcctcctagcctccctctcagactcgagcagtgtgaggatgtctccctcgcgaaccggtcccttgacgttcctcatgatgagacggttctggtcatccaagaacttcactctgacctgggtaacctgacccctggagccggtccttcccatcaccttcaccacaacagcaagcttcacttgggtgtccatactgcacttgtagaaagcatttgtcagttgtcaaggtgaatcaggccctttgttcacaaagttcctcaaatcacagctttgaagtagaaactggcaaacaaattaacaacattacacaaacaaaaaacaaactaggaaaaagaacacgctccatctggtgtccagcagattgcctttgcagtatgaaagagaagtgaagttcacaggttcttgctatggcacagtccaaactattaccatcaccttgcagtcggtaggttctccaagaatgcttgcctgttgtgggcaatgcgctaagaaataactgtccttcacgatgttcgatgcttaattagacaaacctactgatcagctttattcacggactacatttaaacctggagacccctcaaagttctaccacaaagtctctacagatcacatgaataagcaagaacagattcctggtcacacagcgcagcatccaacattcagaaggaacaaaatcagagctacctactcatccatcacgtagtagccatggcacgagagagaaaaaaacagcttaacaccagaagattcagggcgctcatacaacaacaaccaagtctccccaactgtcaaagattttattcgctgtacgctgtcagccttttcgctcaatgaaaataactaatgtgaagctttgctcccccgaattgataaaaaaagtctggcagacatgaaagtggtactacagtaacaaatgaataaacacgcgacacagcataaagcctgcagctacggcatataacagggatggatacactggagatataagatgatcacctctcgcttctcgcgcagagtcgcggacggaggacgacgggcttacgaaggaaaccggggcggcggcggcgatgacagcactggaggaggaag

SEQ ID NO: 91708 - DNA, 649 bp, Zea Mays
atcaatctctccagcctctttctcggatcccccctccccgatttccttccccactctgtcagtctagtgccccgcgcgcgctctctcgccgcctcgccgccggcgacgagcttgagctcgagctcgagctggtttctcgtatcgaagacgcggccgcggtatggatcccatgaacgtagacaacggcggctgcggcggccttgacgcgcagatcgagcagctgatgcagtgccgcccgctcgccgagcaggaggttaaggccctgtgcgagaaggccaaggagatattgatggaggaaagcaacgttcagcctgtcaagagtccagttacaatatgtggtgatatacatggacaattccatgatcttgtagagcttttccgaattggtgggaagtgtccagacaccaattacttatttatgggggattatgtagatcgtggctactattctgttgagactgtcactctgctagtagcactaaaagtgaggtacccacatcgaattacaatccttcgtggaaaccatgagagtcggcagatcacacaggtgtatggattctatgacgaatgtctacgcaagtatggcaatgcaaatgtatggaagacatttacggatctttttgattattttcctctgacagctctggtg

SEQ ID NO: 91709 - DNA, 1281 bp, Zea Mays
agcacgatctatcacgacgatcagcgcgtatccctgacaaaagcacacagacagctcgtattcgcggctgcaaagctcgagctcagaaagatcagcaatggcgtttctctcgcggtcgaggagccacgctgtcccctcggcgctgctggtgctgctgctcttgtcggtggcctcggcggccgcggtgggcgtggcggccaagacggacgtccacgacgtcgcggaggagagcaacaaggacgaggagtcatggacgggctgggccaaggacaagatctccgaggggttggggctcaagcaccatgccgacgtcgacgaggaggagaccgcgcgcaaggctggccacaccgtcaagtccgcgcgcgagtccgcccagcacaccgcctccgagatagggaagaaggcggggtacgccaaggagacggcgggagatgccgcggccggcgcgtcgaacaaggccgggcaagccaaggaccaggctaaggacacggtgaaggacgcggccggcgaagcgtccaacaaggcggagtacggcaagcagaagaccaaggaggccgccgaggcggcgagcgagagtggtgccgaggcgcacgagcggtcgaagaagggcaaggccatggtcgaggagaaggcccgagagaaagccgggcaggggtacgagagcgccaaggacgcggccggcaaggcgcaggagacgctgagccagaccgcggacgcggcggcggagaaggccgggacggccaaggacgcggcgtgggagaaggcggacaaggccggcaagaaggcgcaggagtccaaggaggcggccaaggggaaggcaacggagaaggcggcgtccgccaaggacgcggcgtgggagacggtggaggcggccaaggagaaggccggcgaagggtatgagagggtgaaggagaaggcgcgggagacggcggacacggccaaggagaggctggaggaggtgaaggagagggtcgctgggcccgacgtcgccgccgtcgacggcaaggggaagcaccggagggcggacgtggacaagtaccggtcggagtcggaggacgagctgtgaggagagcccgccgcggcgggtgatgtttgcattcagtgtccaggtcgttttcagcgtgttcaaagctagttttttttttctttcctacacggatctgtatactagtcttctgtttcagcctcgaccatatgctgttcctgctcttagtacaataatctgatgacatgcacacaaacttcgcagaaattcgagttatacgtacaacaacttaatgt

SEQ ID NO: 91710 - DNA, 115 bp, Zea Mays
attcatactacttattaagaaggtaagagtagtctgccgttctgccctccccgtgttctgtcgttctgccctccccgtgttctgccgttctgccctcccccgttccgcgcgcagg

SEQ ID NO: 91711 - DNA, 1933 bp, Zea Mays
tacatacatacatagcatccatcacttgtagactggacccttcatcaagagcaccatggaggaagctcacctcacgccggcgacgccatcgccattcttcccactagcagggcctcacaagtacatcgcgctccttctggttgtcctctcatggatcctggtccagaggtggagcctgaggaagcagaaaggcccgagatcatggccagtcatcggcgcaacggtggagcagctgaggaactaccaccggatgcacgactggcttgtcgggtacctgtcacggcacaggacagtgaccgtcgacatgccgttcacttcctacacctacatcgctgacccggtgaatgtcgagcatgtcctcaagactaacttcaccaattaccccaagggaatcgtgtacagatcctacatggacgtgctcctcggtgacggcatcttcaacgccgacggcgagctgtggaggaagcagaggaagacggcgagtttcgagttcgcctccaagaacctgagggatttcagcgccattgtgttcagagagtactccctgaagctgtcgggtatactgagccaggcatccaaggcaggcaaagttgtggacatgcaggaactttacatgaggatgacgctggactccatctgcaaggttgggttcggggtcgagatcggcacgctgtcgccagatctccccgagaacagcttcgcgcaggcgttcgatgccgccaacatcatcatcacgctgcggttcatcgacccgctgtggcgcatcaagaggttcttccacgtcgggtcagaggccctcctagcgcagagcatcaagctcgtggacgagttcacctacagcgtgatccgccggaggaaggccgagatcgtcgaggtccgggccagcggcaaacaggagaagatgaagcacgacatcctgtcacggttcatcgagctgggcgaggccggcgacgacggcggcggcttcggggacgataagagcctccgggacgtggtgctcaacttcgtgatcgccgggcgggacacgacggcgacgacgctgtcgtggttcacgcacatggccatgtcccacccggacgtggccgagaagctgcgccgcgagctgtgcgcgttcgaggcggagcgcgcgcgcgaggagggcgtcacgctcgtgctctgcggcggcgctgacgccgacgacaaggcgttcgccgcccgcgtggcgcagttcgcgggcctcctcacctacgacagcctcggcaagctggtctacctccacgcctgcgtcaccgagacgctccgcctgtaccccgccgtccctcaggaccccaaggggatcctggaggacgacgtgctgccggacgggacgaaggtgagggccggcgggatggtgacgtacgtgccctactcgatggggcggatggagtacaactggggccccgacgcggcgagcttccggccggagcggtggatcaacgaggatggcgcgttccgcaacgcgtcgccgttcaagttcacggcgttccaggcggggccgaggatctgcctgggcaaggactcggcgtacctgcagatgaagatggcgctggccatcctcttccgcttctacagcttccggctgctggaggggcacccggtgcagtaccgcatgatgaccatcctctccatggcgcacggcctcaaggtccgcgtctctagggccgtctgatgtcatggcgatttggatatggatatcgtcccgcttaatccacgacaaataacgctcgtgttacaaatttgcatgcatgcatgtaagggaaagcgatgggtttcattggtggcttggcttaagccttaaaaactccgtcgggtcttgcgaaccaccacatcactagtgttttgtactctactcctcagtggaagtgtagtgacagcatacaagttcatcatatatattatcctctttcttcgccgg

SEQ ID NO: 91712 - DNA, 1905 bp, Zea Mays
cccagacgccaacgcagagtgcgccactcccagctccgcccacctaccaatcacgccgctccacccaccggcaccatcccgagatatggccaggatccaggacggtggcctcgacaacgacacgctgcagcatctgcggagccgcgccacgcagctgctgctcaaggaggactggagggagtacgtcgccgtctgttcccacatcatcgacgccgccgcctccgtcgacgaccgccgcgtactctgctccgcgctagcgcaccgcgccgacgcccgcgcgcggctcggggatgcctccgctgggctcgccgactgcgacgcggcgattgcggtcgagccggcccaccccggggcgctgctctccaagggcgcgctcctgcggggcctcggccggtacgccgccgcggctgactgcttccgagcggcagcgctcgcctccggaggcggtggcgccgccgtagccgaggcgcggcagctcgctgagcagtgcaggcggctggaggcgcaggcgaggagcggggcggtggacctgtccgagtgggtgctcgcggggttctccgggaagttcccggatctagcggagtacgtcgggtgcgtggaggtgcgccggtccccgcatggcggccgaggggttttcgcggtgaagaatgtcgaggcggggactactttgataatcgccaaggcggtggcgatcgggagaggagtgattcctgatgcctccggcagcgacgagaagatgttcgtatggaaggattttgtcgggaaggtgctcgaagctgctgagaaatgtccgaagacggcggctttgatctatactctgtccaccggccaggagaggcaggacgagcttgccgtccctgacatggcaatgttcaggaaagaaacagaggatgacagtctcagtgatggtactaccgcggggaagacgacgaggacacaggaggctgttcaaatggacaggatcttgaaggtgctcgatgtgacctgcttgactgaggacgcgccagccgccgatgtgcttggtaacaatggcgtcgtcaattgcggcgtggggctctgggtcttgccgtcgttcatcaaccattcctgccaccctaatgctcggcgcactcacatcggggaccatgccatcgtccacgcgtccagggacatcaaagccggggaggagatcacatttccatactttgatgtgcttgtgccggtgagcaagcgcagggaggcatcgagagcttgggggttcgaatgcaagtgtgatcggtgcaggtttgaagccgaggactccattcttgggcacgaaatccttaagttagagaactatttgctcagtggaggagacataggagcagtggtgatgcagctggaggagaagatgaggaagtccatggtgaaggagaggcaaaaggcgttcttgcgtgcgtcattctggagtgcatactccgcattgtatgattctgataagctgatgaagaaatggggaagacgaattccaagcgaggcccttgtagcagagagtgttgctgatgcggtcggcggaaatgagtgcgtgctgagagcaacgctgaggggttccagggatggcaatggctgtggcaatcggctagaggtggaggacaaggtggtgaggattgggagggcaacctatggcaagttggtgaagaggcacgcaatgagagatctcttcagacttacactggatgccgccaacaaattcaacctttagattttgatactgtcactcctactttattccttggttgggcaacttccaataggctcatgttaatcaatgattagtaattattcagcaaatattcttgtttgtttgacatttataagaagtggggtgagacggattaaatatcatccatgagagctttatcttcatgctctcttgattttggtttc
